United States Patent Application Publication US 2008/0114160 A1 - sequence listing, part 77

SEQ ID NO: 29121 - DNA, 17729 bp, Oryza sativa
cattaatgagaagttttctggatcaatgtagcgttgttagatgagttgggtagttcttttggtattatgtgttgccggtgggcccatgatcatgtatgactttgtactgccaatatgtttaaggccgagaattcttaggtgcaagacttaaatttgctattatgtgtaagaccttaatttgctattatgtgcacgacttgaaacttcttattatgtttggcttggactctatgtatgggttgaaatgggatcagatgtgagctaattatgtgtgattgttttttgaggggttgattatggaactgctagtattgttcattattgggtagcttgtcattattctgtagcttgtccaatatgctgaaatgaagttgctggagcttattttcaaaaatagtgatatggagggtattttaattttttatatagtgtggtcatcatgtagaaatattattttgtagtttgtagactatgagaggtaacctcaccaactaatgtgtggaggtaattgtatccaagcatcccatgttcatccctccatccaaacaaaagataggatcattccaacccatcatatccctcaaaccaaactaaaaacagggttcgttctatcccttcaaccaaacaaaaaaacagaaccatcccattccaaaaaacagggatggaaccaacccatcccatcccatccccaaaccaaacacatgctaggaggctgatctaacgtgacggccaaaaaagaaaaaaggatagaaaaaggaccaacgaaaaaaaagggtttgaagggtttgaaggcagtcagctagctatacgagttgagcctatagctccccttgtgggctatgtcaaagagaggtaggtcaagcacagaaataacgtactaggctgggatcgaaaatgaagaataaatgagtttttctattcgatctcctaaatttggttgagggtttttatacacttgatctactatttccctttttatcaaaatctgagcaaattggtaaaactcggaatataaacagtgacttttaaatagatattagatcccataaattaaagcggaaaaatgaaaagaaaaatcatgggaaaaatgatagagtagtagtggggaatcgattttttaatgaggagggaacgcattagaggcagatcaaatgtgatgggaaaaaaatacggagagaaaaaagactgaccaaaaaaaggaacaatgacaacaaaaaaagacactcttccggtgtttgaagattgaagacgtcaatcaactagctatgcgagttgagcctatatctccccttgtgggctatgtgaaagaaagctaggtcaagtaaaagagataaggcactgggctgggttttgacccaaaaccaaggagtataatgaagtgtataatgtatagcgatccaaataggaataagttcaccggtggtccctcaacataatagcgagattttttaagatccctcaaccacaaaaccagaaatgttcgctactaaactcattcaaaccgttcactggaggtcccttggcagtatttttgccctgttttgctgacgtggcatcctagttagcaaaaaaaataaaaaaattaagtggggcccacatgtcagcttcacatatctttttttctccttctcttcacttttcttcttctcctcttcacttttctcttcaccggcggagcggcggtgggcgagcgcggcagtggagcggcggctagtggtgggcgagcacgacgacgggcagagcggacggcgaacgagcacggagccacagcccacaggtcacgagaggttcggatgccggcggcgccggccagcgacgcaagagaaggggaggttgttgtcgacggcgggaggtggccggaggaggaggtattgctatgttatccattgttgaagacagcagtgggctatgctagttgggcctacaactttacctgtgggctagatcaaagagagacaggccaagcaaagagaggtagcgggctggcctaggactgaaatggaacgaataaatgagcttttggtccaaaacaaatagtataatgcatacgatccaaaaacgtttttacccgttgcaacgcacgggcattttctctagtccaaatcaaattaagaaaactaagctcgagttcagattcttaccggatttgaagccctaattctaccgggaaaccccactgctaggaagcgacaccaccgcacctttacctccacaaaggtcgcgttggtcaccctgtgcgcgcgccgtcttggagttcctccaccgtcccatgcgtgcgagttggcttggcaccccctcccccgcccccaccccccgccgacgaagcccggccgctctcggtgcccgtcaccgcttgcacgcccgcttcgtcggaccgccgacgctgtggcttggcttggcgccgcccttaggtgtgcctctcagccggtgaagccggagccgctcgctgccgcgtgcctattccttgacggagttattactcttttatggccttacccttaaatattactctttatcgtcattgtaattctaaaatatcgatcctaatagtcattagtattatgttttatagtttgtagatatcccatcagccgtcgacataatgcttctttatggcccactcactgcacccctctattgtcatttgccacccctttgcttgctctatcacgccgccattttctttcgtgattaaagttcaattaataaattatttctagaaattttattaaaatttcaagcaatttatgaagtgaatcaatgtgggaaatagaatttcctttaaaaatcatggttacgaatttttttttcaaaattttccacgccctacagaacaccacaaacatcatttcaggaattaacttgattaaacttattttgttttcgtaaaaggaagtagactcaccacatactctcaccgtcccaaaataaacgtaacaatgagttttcatgcccaactttgttcatcttgtttcgtccatcttatttaaaattttttatgattagtatttttactgttattagattataaaatatgaataatactttatccgtaacaaaagattaaagttgggcacatgaaacaaatggttgcgcttattttgggcgcttatgtactagcaccaaccaacggtacaggtgcgcagatggtgacttcaagttcccccacgaaactaatcatggagaaatcgagggaacccaactggacaaaccgacctcatacggcagcaacacatggcgacgcccagagcgaaactcgacgaactcctcgccgagcgcgcggaccacaatggcgcgccgccgccggtccagcaggcagaccgtccccccgagccggagcaccacggcgccgctcgcgtcgccggaccacaggagcgccacctccgactccgacaccggcggcgagcagggactccggggtactcccatcaagtcgacgaccttggtgcacgccatccggagcaaggccatcccgtggcaggtcagcttcatcgtccatatctccacctgggtgcttcggccgacgagcagcgccaacgacgacgacctcctgtcgccgccgcgccacgacgacggcgccagcaggagctgccccggcgtgacggttgcctcgccggtgcacgacggggcacggagttcggtggtgggcaacggcatgatcgtcgccgccgctgttgttcccccggtctcgccgtcgcggcggcggatggagacgtcgacggcgaggacgaagtaggtgtaggacggcggcggcgagtgctggtatggtgggtcgaagctcacccgggacatccggcgttggagttggtatgtccggtcgtctctcccggacatctcgccgaggaagtaggcgacgccggcgacgacgacgggcgggcggaccagcacggggcgcgggccgaggcagccggtattgacgacggcgagcgtggtggctgggccccacgtgccagtgtccgtggtcaacgcctgcatctccacgcgtgtcctcgcgaaaaggcgcacggcgaggagcctgaacgggtggagctcggagtcgtcggaggtcactccgacgtcgacgccatcgccgccgtcgtcggcggtgagcactaggtaggacgacccctcacccttgcttgtcttcctcggcatgtcgatggcccgcacgtagcccgtcatagggttgcacaccttcccggaaaactcgccggtccggaggacgacgaagccgccgcgcgccgccacgggttcgatgcgccgacaaggattattctcgtcggagtccgacacgaaggacggtatctgacagttgtctccgctggcgatgtgatcgtggcggccggcggcgacgaagcggaggggctcgtagttgtagccgtggtcatgggggctggggcagcgaggctggaagaagaagccatggaggaggcccgggacgaagccgtccgcgttgcggaggcggaggtcgcggcggaagccctcgccggagatgacgcggcggaggtgcttgcatgcggcggcgcatcggagtagcgtgatggggtcggagcgctccgcgatctccacgacgatgtcgagcggcagagccggcgacgacgacgaggacggcggctcctccatatcgatctgatctatctcggctgatgagtccgacgttaattaccaataaggttttggtcgtacctcgtaactactaagtccaataccgaaactatcgacaaaagcgaaataaaacggatcgaaaaataacctgtgcgctacaagatgtatgaatgtatgtgggacgcgactccggctctagcgcacacgcccgatgggaggaggttaaaaaatggtgtacgatttacgtacaaaattactttaaactgatttttctcttaaattacttatccaaatcataacccgattgcaccattaaattcgtttgcaattaaatcatcaaaacaagaccacatatggatatattccgacgaaaaaaatttagcctattattaaattatttttaaatgttgcatgatgtttcaccaggtatatcggaattgtttcactaagtagatcgaaaatgttttactcgtttaaatcggatgttgttttaccttatataaaaataatgtttctgtaaatagcaaaagaatgtttcagtttactgcaacatttggttcatacatagtgaaacattataagtacactaggtgaaacattttttggtggaacagagaaaatgaaacgaattcccttaatagaaggtatccaaaatatgtgggttttttattgcaatggaatatttcagttcactgcaacattagaactatacatagtgaaacattgcgagtacactgggtgaaatatttttggtggaacaaaaaataaaccaaattaccttaatagagagtttccaaaatgtgggtgatttgttgcaaaagaatattttaattcactgtaatattagatctatatatagtgaaacattataattacactaggtaaaacatcttttgtgtaacatggggagggacaagtgggtgggtccagtggaggtgcgcacatgcactaccagggaatggaagtctaccgtgtgcctaaacaactcggtaacagggctaaaactcacggtaaggtcgttcctgtgagcaaactctcgggaaggtgtactcggcagcctttcacctttaccgtgtcactcttcccgtgagaaactgcttgcgaacttaggatgtgctgaaagcttaccgtgtgaaaacaccctgccggtaactttccagttaacgacacgtcatgcatggaacggagtgaaacggggtggttggaactcacgggaagaaatccataaaacacaggaacatgaaacaccttaccgagagtttttagtgacccgggaaggttgaaatttttcccgtgagatttagcacatggtgacatttgagatgaatacacggtaagattatgtagctcattgtacagggtttcacacattcacgattgtactgcactgatacagtaggcaagcaactaacatgtatgcatatacatatcatccaaacatgacagacaagcatcacatatggaaccacacaaatgtcaggtgaacattaactgtatattatcccagtatgaatttttgaatacaatgatacaagaacacaatataaatggctgtctgaagtggctataatgcaatagtaacaaggtgagtctgagttcttacaacctctcccagggaggcaatagagaaatgttagaggctagtgagtaaccaactccaaatttgtgtattgacagcaccaatcaactgcaatcctttgcaatgatccaattgtatgcctgaaattttacgaaagtaagatgactgccaaatattattacagcacgcaactagtttatgaaaggttaattcttgtgcatagttgacaaaggaaatattcatttggggaggcacaggatataaaaaattggcattatagtctccatcaaaaaaatgaaccatgtaccttagaaatactcgtcaaataagatatccctactagtgggaacctcatcatcttcagcagatgaggaagtgcaataagattcatcatcctcgtcatcatcatcttcatcttgaatagatgatccattgagaagcttcaagtccttgtcattgcaaatatcttcagtatccctgctaatggcaacttgctcaggatcattgttgagttcttgaccaagatcaattacaaaactgccggacagaccatcttcttggaaatagtggacaacattgctattaggaacaaaattgtaatcttgatcattgggtacttgtagtctaccaattggctgcaccttatacacaacccaccaattagtgaggtcttgcacagatttacatgggtacggcatgtaatacacctgtgtcgcttgatgagacaaaacaaatggttcgaattttggaaggattgacgcatgagcaacctcaaccagaccatatcttggtgtatacctcactttgcttgggtcaaaccaatggcaattgaagagcacaagtgtgagaggttttctgccatcaaagctaatttctactatttctttgatgtaaccataatactcagttgtgtcactattttctccctgtcctatagtcaccaaaccactatttattgtagttgcatttggcctctcatgttcatatttgtgtattcggaatcgatacccattcacatcatacatattatatagcaagactcgagtgtggcatcctttagctacttgcctcaaatcatcactcatagtttcatctaacatactctagcagtgaaatgaaaggaaataatgtgtcaataaattgtggcataatgttctattatggcaatattgaaggttatgttatagaaaaacataagtattattaggttattgacacaaatgcaattaagaggcgttaaactgcaaactaatgaaaacagaaagaaaatggaagaaggcactattaattattgaggtcttgaatttcaaaactgaagttatcaagttattaattggctaggttctttttgttagtagaaattggcaaggattttattctttccagatttccgacctaacagatgatcaattgagaagtgtctccatattaatgacatgtacatacatgttcagtactattttcataatgcttgtaaaaaaattaactcagattgtagtatgaaaaagccatatgcatactaggaacttgcactaatccaaatgtgctttactattgtaggaccaaatttatagcactgatataagaagtcaccaaatttagagttttagcagtaatactttattggtttgatggggattacctaggttagttgcaggaacattcatgaaagaacttaatgttcaacagttaggaaagtatgtatacacatgcaagatattacatcgaagtaagctagctagatttcctaatctgatctgaaaggatatgcattgctacgcgtataatataagtaaagtctgggctaaagaaattacttgttgatagaaccaagatacgaaattaggacgatctctcccagcaccattccgtaagatattctcttgttgttgccttgttgggacacctcgtctagtccattcctcatctatgaatttcctgcaagataaaaatgcacacactgatttaaagtaaaattatatgcagctatgaactagaagtaactcatatcaatttcatagttaatacccaatgtagtcatccacttcagtaaggtttgtaagcacatacaacatggcagcattccactcttcacgagttaggtgtcgagggactccacgactagtagaatccccctaatagagaatagacttagggaacaatcagtagactgagtagcaacattgtatcgaggaacaggattgtgaattgtctgcacttgatcaggaaagtatatggatgtgaagtttgagatttcatctagtatgtaaacctctgctatggaagcttcaacacgtgctcggtttctaaccttgctcttaagatacttttggcctctttcaacggggtaattccatctaaattgcacaggtccacccatgctagcttcatatggtaagtgaatcattaagtgttgcattggattaaaaaatccaggtggaaagatcttttctaatttgcaaaccaaaacaattacttgagactgcatgtttgccatctctataggatcaaactgttttgcgcaaagtttgcgataaaagaagctcacctctgctagcacttcccacacatgagttggcaagtatccacggaacatgactggaaagatacgttccatcattatgtggtaatcatggctttttaacccattgatccgcatggttttcaaattcactcctctccttaggttcgacccatagccatcagggaatttcaatgtttgaaaccattctaatacttccttcttctgagctctattcaagcaaaagtcagctcttggctttacccactgactagatgcatgtttttggatgaggttcaattcaggtctattacaaagtgctgcttgatcaaggcgagccttgatattgtccttcgtttggtctggaatgtcaaagcaagtattgaaaattgcctcagcgacattcttctcattgtgcatgacatcgatgttatgaggaagtactagtttgtgaaagtacgggagtctccacaaactagatatatgtgtccaatggtgatccttgccatagcctacaaacttatctccattagcagcagggacaaggttatctaaccgggcacggatctcttgacctgagagacgaagaggtggttcattgctaactgtagtgtttgatagaaaagaatttgaatcacttctaaaactatgatcaattgggaggaactggcgatgacaatcaaagaatgagtactttccaccaaacttcaacctttttccttggagtgcctccatacatgttgggcatggcatctttccatgcacacaccaaccggaaaatataccatatgctggaaggtcatggatagaataaagaaaggagactcgcatgatgaaattcgtcttggtggcacgatcatatgtcaacacaccttgctgccaagcatgtataagttcatcaactaagggttccatgaatacactaatgtgtttgccaggataatttggcccaggaattatcaaggtaaggaacatgttgtgctgccgcatgcaaacaccaggtggaaggtttagaggaatgacaaacataggccagcaagtgtacgaagaaaaacccataccaaatggacagaacccatctgttgctattgctattctaacattgcgggcttccattgaaaagcctgtgaagtctctatcaaatttcttccaagcctcaccatcagctgggtgtacaatcttgtcaggatggtaccgatgaccattcttgtgccatgtcatttgcttggcctgcgattcagacatgtatagccgctgaattcttgggatgaatggaagataacgaagtaccttcctggcaacagttaattgtttcttgtgaccattactgtcttcaacctccacatacctactctctccacacttatcacagtgcatcttctgcgcattctctttcctaaagagcatgcaatttttaaggcatgcatctatcttctcatatggcatgttcaatgcactaagaactttctttgcctcatacaagtttgctggtagtttgtgcccttgtgggaggagagcacatatcacatttaaaagtgcatcaaatccagcaattgatatagcatactgagacttgacagctagtagtcgtgtgatagcatcaagttgtgatacctgtgtgtgttcgtggagaggttgagttgctgcagacagcatttgaaagaaagcttgcgctgtaggctccggatcttcctcctcaactgagacataagcatcatggacatcatctatcatctcatccatccgatcaatctctgccaccctatcttcatcttcagtgctttggcatatatcgctttcacgtgcaggatatgtatcaccatgatacacccacacagtatatgctggcctgaaaccaaatttgcaaaggtgtttcatcatcatatctcttgtttgaggacgtgtgttgttgcagtagttacaaggacacaacacaccagcacgtcctgtctccctgttgaatgccttgtcaagaaattctgtagtcttcgatatccactcagcagtaacttcgccacactttcgacggcccttgtacatccaactgcgatcagtttccattgtacctagttatgacaaagtgatagaataaattgatgttaggaaatgtccttctattcatgaaaggttcaagaataataaaggcctagtttagtttgtatgattaagaaataaaatatcaaccattagttcggatcatcaatcacccaaactttcacatggcataacaacctagttctgcaatcccttagtacaaccgcaacctgactagtaaattctagaactggtcactaataaaaaagatgatgaaacatgaaggccgaatgaggattccaggagcaagacaacaacacctgagacgaatcagtcctagggagggttgctggacgagcagccaatcctcttccgtgcgtggcgactggtggcgtcggcacggcggtgcacgtgcgggctggggtctcgtactcgaccgacaccagatggatgggcgcggggcgacgtcgtgggtttggatggggtgcgcggtggcggcggcctggactggctgcggcgcggtgatgtggccttgacgggacgcggcgcagcggcggcggcctggactggacgcggcgcggcggcggcggccttggacggcggcgcgatgtggtgggttgattgggatgagaggaggacagagagattggggattttggtgacttggccacacccaccagatttttggcgaccttgccgcgcgcctgcgagaattttgccgcgatttatttctgacatgtggaccacgagcgttactgtattgttttctaaccaaaacacacgataagattaggaatgcaaactaccctgttcgtccttttttctcaacaaatctgcaaactgaactatttacgtgtggattgcaaactgaaattttgtactaaatttcgtttggtcccaatacaatgtgaaatagctaaaaaaaaatactcactacgttttatattactcgacttgacttttttgttggtcaatttttttaaactagcaaaatgaacatgctttcatctaaattccatgattttcgcttccactcatattctaaagattgatgccgcgtgcccgctcgtcctctgcctacttggccttaaccaaggaagaagaagaggaacggacgtagtcgagcatgcgaacgtcgccattgtttcatgtcaaaaatgcctcgccgtcggccgccgacagccgactgccctccgcgcgcagtagccaccggcggcggaggtggtggagcagtcagtgaacaacatacggttcctcgccgtggacgcaagctatgccctcgccgcgcaccccgtctccctcgccgcggcatcccgtctccctcgccgtggcatcccgtccacctcgctgacgcccgtcccgtcctcgccttcaccacccggcgcaccgcaagtaccacgtcacgcaggacgacccgtgtgacgatgagaaaaatatgaggtgattaaaaaaagtagataagttttaaataagattataaaaaacatagcaacatttttttttacttaaaaccaacatattatcaaacaaatttgtttttgtagatgtagctaaatttttctacaaacttattcaacacctaaaaaattttgactacaaaatagtcaaagcgagatataatacgaatcggagggagtgcgtgttattaaaattagttaacaattcctttgattctgttatgatttgtagaatttttgaactaaattttgattgatccttgcattaagtgcctttgctaaacaaaaactatttcctttttaacttcgttaagaattaaactttggtttgctgtatataataagaatttatttcttcaattaatttaatcaaatttattcaaatttataattttgattaaaagtgttgttcagatgtctatctcagaatttatttgcgttcatttcaagaaaaaactttcgtttatctttaatttttcaacaagctatccaaatattcaaacctgtttttcttaggaaatgtttagctttatatcttaaaatgtttttaaacaatgaacatttctaactttcaactaaaaaagatatcagcttgttgtcatgctattgagattgggactcctatttaaaaaaatttcaaatggcattaatttgaaagcattcataatatataaacatcttttagtgataatttggttgacaatgaacaaaagacaatagtaccggaaagcactaaccgagcctagtttgttactaatttgtgcgacccttccataagttgccagatattcactccaaaatatgaaataatatcagtcatcagttttgttgaacgcgtgagttatatctggacagtggccactgccacaccacataagttccaagttgataagttccactgtatgccaacatttccaatcaaaagtaccaaacttccggttcacaaactccagagcacagcaacatctatgaccaaaagtacctaaggcaacatgcacaccgaaatagctactagagtccgaatatggactcaggttcatgcaagcccttaggaaagtaaacgtatataactaagaacaaaagactaaaggcaacagccacaaccaacagctactcaggttcatggccatgaccatctaggtcagtttaattacaaaacacatccacatgttccaggcatgtagaactagtccattctttccagcagtagcaaagtcataattatcttcagattgcgctcgctgcgtcaagctgaaccatctaaattgcaccagaaacaatagcagcccctccatggtcagcacagaatgggtttccattcagagccgaagatacagacaaagcctgttttatgttacaaacaaaatggttaatattagtcctcataagttatatggggaacaattacttcatgcacagctagactaccatgtatcaaatacttactgggttagtcaacatgacaggcaagggaggaggacctgaggctgaaggtaagtcaatgttcagcttaagttgtatagcctgcaatccatttcacatgtacactagttagtgcgaccatcacagaattcaagccctcaaataatgaaaacactactagatggatcctataaccacttactcttaaagcaacttcaaagaacgatgatttttgttcaaacgctatcttttccaactccctttccttgcgctctagctccctctcctttctatcttgctccttctctcgtgccctctcttcacactcacgctccttctcctgctcccactcctgccgctccctctccttctcacgctccctttcttcacgctctcgttctcttgcctcgcgctcctcttgtagttgccgctcaaggtcttcaatttggtttgtgttgtcaggatttgtccgcagtctcctgcgaggacgtggatcgttaagtgaactgtcaccaaagattgctgatgagtcaatgtgcccatcaccgatcatgaatcgaccatgtttctttccaccaccagccatgtgcacagccattggatcaatgggagaattgcgccaatcacttcctgctccatgcagctgaacataagcttcattataggcctcctacagtcagatcaaatggtgtattagtactcatgcacaaatgataaactaccactaaatattcagcacttacaagcttcccagttgcatgtgtgttacatctgaatcgtccatcctctccatattccccccttccttctgtgtaggcctccatttgagacactacccgctttttcttcttctccaaaaacagaacatgggtaccatatatattataccatgatctgctacatgtttcaacatagatgcacataccaaatttttttggaaacgactcaagttagcactgccttggcggtgagatggccatgtcattttctccctccgtatcctatgagcatgtgagctagcctgccattcaggattacaccacttcaatcgtatcaactcccgccacgcattttttgcctttaggaaccaccatggttctacctataggagaagcacagatttattaattactaatctgatcagtagatcacaacaaattatcaatgaacaaccatagcacctgtaggtactcttcctctgttagatatgtcctgcaagcaatatcccgagaagtttctacctttaaaatcttcctttggtaattgagcacggccaggatacgagtttcataaatcaggtccgaaaaaaggtgcttgatacaattgcggacaacctttctagcatcttgttccgttctctctgcccacctgaagtaaagctgcaactacagaaagttagcctgcttgacattgaaaagtgtggtattaagatactttagtattgtacagcacaaattggccataaactatgaaaactgaagacacaataaaatgcatagtgtacttcatatttggagaaggtaatgctctaaaacaaacccagaaatcttcctcaacacgatggagacggcttggcaagcgattcagtatagcgctttctggatcgtccggtgcaatcctgtaatgtttccaactccatgctggctcatctcttcctttaaaattgacaatgccagggaaaaaatgcttaataatcacggtcaggatgccagtggggaccctaatgttgcccccaaaatcattagcctgccattgcctgtgcaaatcaatgaacaaacagatcaagccttcatatttcaactaatgaaacataccaaaattagcctatttacctatctccttttggagtcagcacaggtttgtcctcatctcgggtaggtcgtggtggcatccgtgtgggaccacgaaaaaacatttcctcatctgtttcttcgccagccaatatctcatccaaattagaagaattatcaggttgttgggaacctgaggaccttgttctacatctcggcaagatagcagcgctgacagcctgatctgaaggattggaatcctccctgcagcccaagctcaatcgccgcatattgctacaaaattaagatatgcagtattatattaaacaggtcaaaaactacatagtagcaacatggtataataatgcctattataaaatgtcgatacaaagatgtagtacaccatagcattgcagatcatcacacaacatggtgctgtcattccaacccgattcaaccattcaacatcgatctaaacaagtagggccgtggcaaacactcatactaaccattatgttttctgaaaagagggcaagttttgcctaaccaatatgtatccatcaacaagtacacaaatatgaaaacacattattctgacagtgcaagaactctcacccacatcattttgtagtctaatattgtttttatttacaaagcacaacaacttattcatatggtacttgtggtattacaagaaattaaaatgagatacagttcctagaaatcatacaccgaactatttctagttcttgggagaaaatggatgggttttctagaaccaagacccaactttacatacgattcaagaaaaaactcaacatatacataccaccagctggatggaagatgaggtgtgctcaagctggacaacgaaggggagcctagcagatggacgtggacatgcagggagcacgtacggccaggaatgcacagcgttgctcggcggccgtgcggcggactgacgctggggcgcacagctatcctgccatgtgcgaagaagagaggggaaaaatcagaaaggggaaaagtggcgaggagaatgaggcggcagggggtggggaagtgaggggatcgattaaaagggctagggttttgttgttctctattttgggctgacatgtgggccttcggctgtaactcgcacgggattctcctgttactcgcgcggcaacgaaaatcaggcgcgccagccagccgcgccaacggaaatcttggcgcgccatccgcctgcgccaacggcgatcccgcgcgccagaccaaatattccgcgcgcttaacggcagaaactatgggtcccacacttaccgtgtttctcgattcgtcccacggcatttttagccgcttcccgagtttttccttgtacacacacggtatgctttaaacgttaccgtgttccatataacactctcggtaaccaactgaggtacacggtagtctcccactctctggtagtggtggggggaggggagcgatcgattttcctacctcccctagtcgaccgatcctaattgttcctcatgaatgtgatttgtgtgattatgtgtggatttgttgaatttgtacgcatgaatttgtgatctgttgatttttgagattctgaaattaattgtaataggaatttgagatcatgaaatttagtaattgtattttttagataattgtagtatctaatctcaagtatcactatcaatttatagaaatttacaatttttagccctaaaatgggcattagtacgattcttgaataggttgctagcctaatattaatgtccgataaaacaatagctgtgatatgatagggtttctgaactgctagtgttaatggttttttttggtagtgttgcacgggccatcgatgcatatgtgtgcatccgcttctatcatggtgtctcctacgtcactaacagcgtctttttgttattcctcctctgccaacccgttattatctctaccccaatcctgaaccctaatatacaatacgtgctgccactatcgccgccttcacttgagaagactcatgctttctagagtgatgacttatgaaatcaattaaaaaaatattttttttcatcggtttcacaggaatatactcgctcctccgtttcgaaatgtttgacaccgttgactttttagcagatgtttgaccgttcgtcttattcaaaaacttttgtgaaatatataaaattatatgcctacataaagatatatttaacaatgaatcaaatgatatgaaaagaattaataattacttaattttttaaataaaacgaacggttaaacatgtgctaagaagtcaatggcgtcaaacattgtgcacgccatccggagcaaggccatcccac

SEQ ID NO: 29122 - DNA, 7316 bp, Oryza sativa
agttggtatgtctggtcgtctctcccggacatctcgccgagaaagtagcgacccccggcgatgacgacgggtggcgggaccagcacggggtgcgggtgaaggtagtgatcggcatcgacgacggggagcgtggtgactgggccccacgtgccagtgtccggggttaactcctgcacctccacgcgcgtcctcgcaaaaaggcgcacggcgaggagcctgaaccggtggagctcggattcgtcggaggtcactccgacgtcgacgccgtcaccgccgtcgtcggcggtgatcagtaggtaggacgacccctcacccttcgccgtcttcctcggcatgtcgatgggccgcgtgtagcccgtcataggattgcacaccttcccggagaacttgccggtcctgaggacgacgaagccgccgcgcgccgccacgggttcgatgcgccgagaacgtttattcttgtggacgcggttggagtcggatacgaaggacggtatctgataggtgtctccgccgccgccgctgccgccgctggcgatgtcctccgccgccgaaagctgatcatggcggccggcggcgacgaagcggagcgggtcgtagttgtagccgtggtaatgggggctggggcagcgaggctggaagaagaagccatggaggaggcccgggacgaagccgtccgcgttgcggaggcggaggtcgcggcggaagccctcgccggagatgacgcggcggaggtgcttgcatgcggcggcgcagcggaggagcgtgatggggtcggagcgctccgcgatctccacgacgatgtccagcggcagagccggcgacgacaacgaggacggcggctcctccatctcgatctgatctctatcggctgatgactctgacgcacctcatgcacgtagctaggaagtccaaagcccaaacgagaaaccgaaactaattaaaaggttaattgaggcacttgggcgcccatttttttctgagataaatcaggtgcccacataatcatatgtcatcatgcttgcatatgccagcaaaaattcctaagcaaactttaaaactattttttcttaaattatttatccaaattatgatccgatggcaccattaatccatcgcaataaaatctttaaaacaagacaacacttggatataatccgataaaaaaatatttagcttattattaaattatttttaaatattacacattgttctaccaagtagatcgaaacttttcactaagtagatcgaaaaatgttcaattgtttaaaggctaaaacacaaccaaatcacctcatgaaacattttgctacaacatatgaaacaatagcttctcaaaaaatcgagcgttgtttcaccttataaaaaaataatattttaagcaaatagcgaaagaacgtttcaattcactgcaacatttgatctatatatagtgaaacattatgagtacgcttgctgaaacattattggtggaacaaaaattaaaacggattccttaatagagcgtttccaaaatatatgggtaatttgttacaaaagaatatttcaattcactacaacatttcatccatacatagtgaaacattataattacactagctaaaacattgttggtgaaacagaaaatgaaacggatttacttaatatgggggtttccgtaatatgtgggagatttgttgcaacggggtgcaagtggtgggagcgcgtgggaggcaggtggaggcgcacgtgggggagagggcgctgttttcttcgcggaggcgcgcgcgggggagggcgcccgatttttttccgccggatagggtacctgatccccagcattttcggctatgataagttgtttttctaggtttcctgtaacaggggacccgcataactttgagacccgcaccgttcaaccatcgggtggaaataatgccccgtttgtagcttcgtaggggtgagccctgtccccaatggggaaactaccacccttaggtctaagaaggtgctttagatatgtttttcttttgcctaattacaattattttaggccatgccatataataaatacagtaatagacttatataattattgttcttctagatcgtaagtatacaactagttgtattttattatactataaaacagataaaaattagaaacgttaatttattgttttagaaaaaataatgggctatatctcttcgttaatttgaagttaatttgaaaagttcagttttaaagatttttatattccgataaatatccgttactgtattcgctccgatttattttagcgctgttagatatgtttttcttttgcctaattagaattattttaggccatgtcatgctaattagagttatagatcaactaatataattcttgctcttctggattgtaaactatacaactagttgtattattactaaaactaataaaaaatagaaatgttgatttgttgttttagaaaaaataatgggctatatctttttgttgatttcaaaagttaagttttcggggtttttatattctgataaatatcttttgatatttgctccgatttgtgttagcttcgtttgcaggtttccgatttcgattctgaaagaaaatgataacagtataggtggttttcattagttttcgagctattttcattctacaaaccaaaccaaccgagcgaacacacgcaccatcgcgaactcgcatcatatgctctgcaatgatggtagatatttgtataaaatcggtgaaaataactgtatatatttatacattttgttccaaaattttttatgcagatgtagatatcgaaggaacccaactggacaaacccatttcgtatggcagcaacatatggcgactcctgtagcgaaactcggggaactcctcgtcgatcgtgcggatcgccatggtcgctcggtccagctggcacaccgtgccgccgagccggagcaccacggcgccgctcgcctcgccggaccaatgcagctccacctccgactccgacaggtcgcacggcctccggcgaaccgccgccgtgtccaccacctccgtcgcgcgcgcccacgccgacggcgccgcgagcatgtccagcgtgtggatctccaccctggtggtccggcagacgagcagcgccaccgacctcctgtcgcgcgacggcgtcagcaggagctgcttcgacgtgacgaccgccgccgccgcctcgctgctggtgcagcgcgagcacgacggcggcttcagcccctccggcgccgggatgatcgtcgcggccttcgtcgtcccgtttctaccgtcgccgccgccgtggtcggagacgtcgacgcggaggatgaagtagtgagacggcgggtgcgggcgctggcggtcgaaggagtgggacacgacgaggaagtaggcggcgccattgacgacgacgggatgccggccgagtagctcggcgcccgggtgttggtggatgtcgccgccgacgccatggacgggaatcttggtggtggggccccatctgccagtgaccggggttaacgcctgcatcttcagtcgaagccgccgcccctggttcgtcggctggcagagctgcacggcgaggagcctgaaccggtggagctcggagtcgtcgtcggagctcggtccgagtccgacgccatcgtcggcggtgagcagcaggtatgacgtcaccaaatccttcctcggcagagggatggggagcacgtagcccgtcatggggttgcacacttcgccggaggacctgccagtccgagcgacgacgaagccgccgcgcgcctccacgggttcgaacccgagggccagcgactcaacggcgtcgtcgcccgccgggagctggccatggtggtcgccggcgccggcgccgtcggcgaaaaagcggaccggctcttggaggaaaccgtgggctccgtggagaggctggtagtagaagccccggaggaggaccgggacgaagccgccggcgttgcgaaggcggagctcgcggcggaggccctcgccagagatggcacggcggagctgcctgcacgcggcggcgcagcggaggagcgtgatcgggtcggagcgctcggcgatctccacgatgacgtcaatcggaagacctcgtgacgacagcgacgacgatgacgacgatgacggcggcttcatctctgatgtcatcgtcttcatctctgatttctctcgacggaagagaaattaaacgtgagataaataatgccaaacacaatgggactttgttacgtcttagtaagtcaaaactagtactaggactgtaggagtccaagacccaaacgggaaaactgaaataaacgtatcagaaaagaataagtgggaagtagatttttgtggaaaagcctacaggtcggatgttcgatcctttggggaaaaatcagatgctgaactgacgtcagcacccgatttacgtgtaaaactactttaaactgatttttctcttaaattacttatctaattaatgatccaattacaccattaaattcgttgtaattaaaatttcaaaataagaccacacatggatatattccgatgaaaaaaaagcttattattgaattatttttaaatgttgcatgatgtttcaccaggtatatcggaattgtttcactaagtagatcaaaaatatttcactcgtttaaatcgggtgttgtttcaacttatatgaaaacaatgtttcagcaaatagcgaaagaatgtttcagttcactgcaacattagatttatacatagtgaaacattataagtacattaagtcaaacattttttggtgaaaaaaaagaaacgaattcccttaataggaggtttccaaaatatgtgggttttttgttgcaatgaaatatttcagttcactgcaacattaaatctatatatagtgaaatattgtgagtatactaggtgaaacatttttggtggaacaaaaaataaaccaaattcccttaatagagggtttctaaaatatatgggtgatttgttgcaacggcgcgttccataatatcaaaatccactgcaacatttgatccgtacatagtgaaacatcataagtatactagttgaaacattgtaaaactactggttgaaacatcaaaagagaccatatgcaatattaaaaaaaataataaaaaatctagaatatttttgtcgaaatataatcatgtgtggtcttgttgtaaagatttaattgtaatgaatttagtgatgcaatcagatcgtagattagataaatagtttatgagaaaaaaatcttttgaagaaataagagatggttgcatgtgagaaaaaattctttgcatgcagacgtacactggcaggcacaaaagcagcgctcgatttttctccacccctgccggtcgcccgggtgtgagcattttcggatttttgtgtgtgccaggacatcctttattttgtgtaaggcatttaaaatgtcatctactccctccgtcccataaaaaccaatctaatactgaatatgatatctcctgatataacgaatctagatatgcctctgttcagattcgttatactagaatatatcacatctagtcttagattcgtttttttatggagggagtatataatatatctttccacaaacatgtaagttaaaattcgacttatacaattttataacaaaataaatttaaccgtgaattacgtctttgattcataatcaaattagttattttttcacttatataagttgaatttaaacatgtatgtttatggagtgacatatcacgtaataatatggtacttttttttccaaattttcttggatgattttcaagcgacatgtaaaagtgagaggatattcttaaggaataaatagagtgtccccagtctttgctacataattcgcacggcttgtaatttgaaacgaaatctaattttatgtttgagaaaataattctgcctttttctcatgccgatcgccgttgttcattgtggcctcgaacaccttaaactcatcccggtgactattaatacctctacgtagttttcatgcagactccccagagctcgtgattctggaactaccataattattccgtagtgatactctgatagagctaagcaagtcacactaatcttgaggaaaaaaaattgagagaatcccttatacgccaatcaaatttgactagttcccttatatgccacttaaaattagcttctctcttttatgtcactggtttaagtttttccacctttttataccactcccagcactataacgtttgttaactgttagtccaatgttagtttttttttctaaatgaccattatgccctctcaactaaaaaatgtgtaaacttaaaaaaatcataactagcttattttaaatcctttttgaatgaacataattttgtcggaaccaatgaaaaatgctctttgtattaaaaatattgttggaaagctgcatgtttcgtgcttatattgaaaattcatttgtgatggtgatggctaaaattgcacgtgatgcaaaaaaaaatcaattttcatatgtcgtatgcattagctatattagtactaaaatgctatatatatacatagactaacttctctatcaaataaaaaaaactcattggttgtataccaaatctcaagggcaaatgcatctttttgctatgaagttaagggtcaactggcggaggattgacggcaatgacatagaagggaggacaaacttgaaccggtgtgatagaagggaagggctaatttgaagtggcatataagggaatcagttaatttggagtggcatataagggattctctctaattattaatttaatgaaactaatttggtaatgtaaatattactcccgccattccaaattgatctacatatttcataggtacaccaagaccaagaaaagctaatagctctctcacactatatttactctagcaacaaactcaatgcatgtaccatctccactatttcctagccaatagcaaatcaagatattgcatgtgggttataaatacttgtgtgcatggatgcatgcatcaatgtccatttactccaatgcacaaataacgaataaaattaatgaatgaacacaaatatgtagatcatttaggaataacctcaaaaaaaaaactatacgtaaatcaatttggaatagagggagtactatatttgtctataaacttagtcaaacttaaagcagtttgactttgactaaagttaaaatatcttataacctgaaacggagggagtatttacactactacgaaacctcttatagaggactcgataccgataagcattttctcacctccacattttgaaaaattatagaaccatcggctttgagcact

SEQ ID NO: 29123 - DNA, 29123 bp, Oryza sativa
cacttcccacaatccatatcctttccgcacccccaccccctctaaagaaccttccaaactcccaccgcccccaaaccattagtccataggtgtaggtgaaggtagagaacgtggtcaccgtggctgtgccggtgcagctgccacaggccaggctcactgactttggcgccgagctcgacgacaagtagtgaccgcatgcaatgaggatgctggtggtggcggcagaggaggagtgatggtggcaaggttgaggagcactggtggtagcgccgccctcgtcgatctgtgccactgcttcatcttccatagccacaagctcgtagtatatatatccaacatccacctccattgcctcgacccgctcctctaccatcactaccaacttgccccacactacattccttgccctgtttattttcattttctgttgcaattttgatcgattccatgaatgtgttcttggatgggggatgatggggatcataggggtggttattgggtgtggatcaggagatgctcgacgcatcggctcgaatgcatggagctttttttattgatggaactggttataagtgccggttatagggtaagaaccgccacctgtcatcttcataggtgccggtgtttgaatcggaacatatgcggagggcatagctaccccaaatttgttttggttgggaaactagcacctatgaaggcatgactagttccaaaccgacacctatgaagattcctgcaagtaatgttagttcaaattgttaaactggagtaggctaataagtatgtctggaccatcacacgcttgcatcgtccaaagaaaagtgttcaaatatatatgaaagagtctttggtgagattctataatctttgcgcaaaattgccctgatgctatgtcatgcaagaaaatcgatatctatgaggttttgcaatcaactgacgacatacttttgataggttccggccagggttcaatgcatcggaaagtggaaaattttcagggtttagttaaattacgaaatttcaaacaaaaattaatgttgaacaagaaacttgcagaaattcgaccaaggagagtgggctagcatcgagtccatctaaagccgggccaggaggttgaaactaagcataatgcgaggaccacgcgacttgtgtccactcatcgatcggaaatctgcggagcggccgccgtccactccagcttaaagccttctgccctaatccagtcttgcaagcagattaaagcctctattgtctcactggtcaacctgcttctataatcacttatgaccctctcagcagtggagaatgcactttctcaagctacagtagaagcaggggctgctaacaagtcacgcgctatgcttgtgagttggttgccttgcctttatggtgttttgctaattttcctattagcacagtctgaaactatcttaaaagttttcaactacacatgcatggtctgttgatttacgatagttggcatgtgactaggtgagattttctttgtgtatcctgagcaacgcgcgtgaaatgtctaggttgacatgctgcatgcatgcatggcattgacattttaatttattacaattactaggttgtagcccgtgggtttcctgtcatcatgacttctcttcttttttaaattgtttttctgatggtaaggcacgcaaagcgcatcttattatctcttttttatattgtttgcctgatggtagggcgcataaagcgctccttatacctagtgtgcttgaaagatggacaaatttttgggtggcaattttttgctctgatttcctgttagcaaatggtaagaatggtcacttgaaccatagtgtcaagctcatctacttagtgatgttgctgccacattgtgccactggtgatataaagtttggaagtttgaaaatgttcttttgatgcatttttggttcctgcctggcatttgcactccatgttgtcgtggaactgctgctgtatgcctgtactttgtagaaatgaagcatgtttaaatggcgtccataactttacaccacactttacggtcctgcatacaaatctgtatgtttaaatgctatatgcctatagtccgtagaaatgaagcatgcataggaagttactcgtatactttagtgtctaaattttagtgctatactcctatacattctagttcactttcttgtaccactttacttgctctcatatttttggataattgtttaatcaaatactattagtctagcgtcagttgcttgtttgcttggccaatgaaatgaggtgggttggggatgggaacattgggttttgttagtgcaatatattatggggacatcagattggtctacaaagtagacctatcattcaaaaactaatatcgtatatgtggattgtttcttgttgtttctctagcgcataaaaaaataatctaacatatggtactgtactatcaggttgctgggctcaaacatatgcgaacttcgatggaggagtggccaaaatgctttggtggctgctccagcattgtcacgtgcttttgaacaggttttaattatgttgtatgagatatgctcaaaaaaaatgttgtatgagatgtgaaggttggaatgtgtttttactgatctgtaactattttgttgctgatgatgagagaatgtaaattaatgatctgtaattaattttgctaaaattatggacgaaatatttgtattttgctaaatttagcagcagctgaattttacttgggctaaatctagtagtagcccaatttgaactgggttgaatgatgactaaaaggccgaaaaaataccccacaaaaaaacaaatcggcccaaaacaaaaaaaatctagctggtcataaatgggcataaatgggccgaaagctcctggaaacccgaattgggccacaaaactcgtgggctaaatcctacgtggcattgatgacacatcaacatccaccttggcgtacccatggcacatatgtggcgatttgaatccgtgacggaaaaaaagtcctatgtggcagctaatctgtgatggaaaaatgtctacgtggcagctattcatgaaggttatttttcgtcataggaaatgggcttggctagactaactagatctcgggctccatcgtgacggtttaaaaccgtcatcgattctgttaatctgtgatggttttcgacgaaccgtcacgcaggtcaatccatgacgctcaatccatgatgatttctgaaaccatcacagatgttgtttggtgatggtttttcagcgatccgtgacagaaattttccatcacggattaacaggattcttgttgtgatattagaatgtcctccagtattgcaagatatcaaaatcagtagtagcagggacattcttcctccaagtacatatcaagatgactagctttgcttcttagcttcaaagcaacatgctgtccccagtcagcccatgggttgtcgtcgatgttatcatcgtcaacttgaaactccacattctcacttgtttgatcattatgagcacttttgttcatatatatgtgaactatattcagcaaacaactctcttattttggtgtgcacaactgttagatacccgggggcaatattctcctagctttcgctgctcatatgcactaatgcagtcccccttgatggtagttttagaaataagttaaagcacgaattcaagctagcaacaaagctcttaaaacctagggtattccacaaagttataggacagctcatgcacaacaatcaatttaacaagttcttttctacataattcttgatcaaattgccaatccttaagagcagcagcatgtgaatgagtagatgacctgatcgagtacttccaccatttgacccaatctagctttaccatcacaactatccaaatgtctgtggcaattgctcctatcaactgttggaattaatgaatgggccttagcccactcgaagattaattctttggaaaatcacaaaagcccacctcatgggatggcatgcatgtggagtttagtaccaccttgcttattctaggagagggggacctccttaaaagggaggatgtcctcctagtcacttgaagcatgtgtggtggagagaagaggggaaacacacgcgctcgctcgcctcgcctcgccggggaggcggcgcgcgtgcacgacgtacgcgtcgaatggtccgaaaaattggctcctcacccttgcgcagatgcagcttccttttgcagttttgttttgctgcaaattcggattcgtttttgttttggaaacgttccgaaaaatccggtgtgtgcaaacggcgtggagtccggataaggtacgcgcgacttatccggttcggttacgcgcagtagagatcgtgcgggcgccccgatcaagcgacccttctctatataaaccgacctgccgtcttcacgcaacacaagcgaaatcaatctagggtttgcctcctactctgtactgcgccgtcgctcgtagactactccatcccgctcgccggcgtgcaccgtcgatcgggagagcaggtctccggaacctctgccttcgacttcctgcaccgggagaaggaggcaataaggtttttgggaagcgcttcgcgcgactgctccctgtttgttcgcgacggctcgccttcctcttcgctcgcgtgtttcgtgccttcgtagacacctgcgaaaagtttcgaccaagcagccgatctttccgtcacctcggtacgtgttcaatatgttacgcatatttgatctgttcatgttatactgtgtagtttacatgtatagatctaatgatgcgttcatgctagttttcatctgtaatgtcatgatttatttatgggatagattaaatcattatatgtctataatctcaacattccaaaaaccttattataggcactgtgattttactatggctggttttgccgatgcactgaggccggataaattcaccggtgtgcattttaagagatggcagatcagggtcactctgtggctgacagctatgaaatgcttctgggtgagtactggcaaacctgaaggagttcttactgctgaacagcagaagcaattcgaggaagccactactctctttgtgggatgcattcttagcgttcttggcgatcgtctggtcgaggtgtatatgcatatgaccgacgctaaggagttgtgggatgcactgaatactaaattcggtgctactgatgctagcaatgatctgtatatcatggagcagtttcatgactacaagatggctgacaaccgttctgtagtcgaacaggctcatgagatacaaacgatggctaaggaactcgaactccttaagtgtgtcttacccgacaaatttgtggccgggtgcattattgcaaaactacctccatcttggagaagtttcggtactgcactcaaacacaagagacaggaatactccgttgaggggttgattgcgtctcttgatgttgaggagaaagctcgggaaaaagatgccgcgtctaagggcgatggtgggcagtccagtgccaatgttgtgcacaaggcccagaacaagagcaaggggaaatacaaagctcagcagaccaccaacttcaagaagcagaagaagaacaacaacaatcctaatcaggatgagaggacttgctttgtgtgtggccaagttggtcatctggctagaaagtgtccacagcgcaaggggatgaaggcacctgcagggcagacttctaagtctgctaaagtgaccattggcaacactggagatggaagcgggtatggtaatttacctactgttttttcagttaatcaatctactaattggtgggttgatactggggccaatgtatatgtttgtgctgacatctcattgttttcttcttatcaggtcgcacggggttccaccgtcctaatggggaatgggtcacatgcttctgttcatggtgttggcacggtagatctgaagtttacttcgggaaagatcgtgcagctgaagaacgtgcagcatgtcccttctatcgacaggaatcttgttagtggctcccgtctgactagagacggatttaagttggtttttgagtctaataaagtagtcgtgtctaaacatggatattttattggtaaaggttatgagtgcggaggcctgttccgcttttccctttctgatttctgcaataagtctgtgaaccatatttgtggcagtgtggatgatgaggctaatgtttggcattcacgtttatgtcatattaattttggcttgatgtctcggctttccagcatgtgtttaattcctaatttttccattgtcaaaggttctaagtgccatagttgtgtgcaatcgaagcaacctcgcaagcctcacaaggctgccgaggagagaaacttggcaccactagaactcctacattcagatctttgtgaaatgaatggggtgttgacgaagggtggaaaacgatatttcatgacattgattgatgatgctactagattttgctatgtgtacttgttgaaaacgaaagacgaggctctagactattttaaaatttataaggcagaagttgaaaatcaacttgacagaaagataaaaaggcttaggtctgatcgtggtggagagtttttctcgaacgagtttgacttattctgtgaggaacatggcatcatacatgagaggacgcctccctattctcccgagtctaatgggattgctgaaaggaagaaccgcacactgactgacttggtgaatgccatgttggacaccgcgggactgcctaaggcatggtggggggaggcattgttgacctcaaatcatgtgttaaacagagttcctaacagaaataaggacaaaacaccatatgagatatggattggtagaaaaccatcactttcttatttgcgcacatgggggtgcttggcgaaagtcaatgtaccaataacgaagaagcgcaaacttggacctaagactgtggactgtgtttttctgggatatgctcatcataacattgcctatagatttttaatagttaaatccgaggtaccggacatgcatgttggtacaattatggagtctcgtgatgctaccttctttgagagctttttcccaatgaaggatacacatagtggttcgaaccaaccctttgaaataattcccagttcatcacaccaccagaacaaactgaacatacacatgaacttgtctctgaggaggatgtcagtgaagctcctcgaaggagtaagagacaaaggacggctaagtcttttggtgatgatttcactgtgtacctcgtggatgacactcctaagtcaatttcagaagcatatgcatctcctgatgcagactactggaaggaggttgtccatagtgaaatggattccattatcgctaacgggacttgggaggtgacagagcgaccctatgggtgtaaacctgtggggtgcaagtgggtgttcaagaagaagcttaggcctgacggtactattgaaaagtacaaggctcggcttgttgctaagggctatactcagaaagaaggcgaagatttatttgacacttactcacctgttgctagattgaccacaattcgtgtgctactttccctagcagcctcacatggtcttctcgttcatcaaatggacgttaagacagcttttcttaatggagagctggatgaggagatctatatgtatcaacctgatgggtttgtagttgaaggtcaagaaggcaaagtgtgcaaattgttgaagtctttgtatggtctgaaacaagctcctaagcaatggcatgagaaatttgacaaaacattgacatctgcaggctttgcagtcaatgaggcagataaatgtgtgtactatcgccatggtgggggtgagggagttattttgtgcttgtatgttgacgacatactgatatttgggacaaatcttgaggtgataaatgaggttaaatcattcttgtctcaaaattttgatatgaaggatttgggagtagctgatgttatcttaaacattaagctaattagaggtgagaatgggattacactcttgcagtcccattatgtggagaagatcttgaatcgtttggctacattgatagtaagccttctccaacaccttatgatcctagcttgttgcttcgcaagaacaagagaattgctaggaatcaactggaatactcccaaatcattggctcgttgatgtacctggctagtgcaactaggcctgatatttcctttgctgtgagcaagttgagccgatttacctctaatccgggagatgatcactggcgtgcgtttgagcgagtaatgcgctatctgaaaggtactatggaattggggcttcactatactgggtatcctgcggtactggagggttatagtgattctaactggatctctgatgtggatgagatcaaagccactagtggatatgttttcacactgggtggtggtgctgtttcatggaggtcttgcaaacagaccattttgacgaggtcaaccatggaagcagagctaacggcactggatactgctactgttgaggcagaatggctgcgtgatctattaatggatctgcctgttgttgaaaaaccggtgccgactatccttatgaactgtgacaatcaaacggtaattgtcaaagtgaatagttctaaggataatatgaaatcgtctagacatgtgaaaagacgattgaagtctgtcaggaaattaagaaactccggagttataacgttggattacatccaaacagcgagaaacctggcagatcccttcacgaagggactatcacgaaatgtgatagacaatgcatcgaaggagatgggtttgagacccatgtgagttatactatggtggtaacccagtctatgtgatcggagatcccgtgaattagatcctgggaagaacaaaccattaataaactagaggagagtaccaatatatataccctctccaagtgaagatgcatatactctcgtgagctgcaaggcaggttggctatgccttaatgagttttgttggctttaattagcgaagatgttgtcctgcagagcattcttgaaagaactcacctttgtgagcttgactgttggtcgcagtctatgaagattttgggtgaatcttctaggaagcttactaaagacctaggagtatgacttatacgctccacccgaggggtagtctacagacggtctagtaccagataagactttgagtgaaacttgcttgcacaagacttgcaattcaaggcgtagtccattgttcaagttgtgagtaagtgtagcttggagttctaggtggatgttcaaccttaattggtctccatcgaaccgctggtatataaacagtatattggaaaaggcaaatcttagtgggattttgagatttggtgagggattgttggaattaatgaatgggccttagcccactcgaagattaattctttggaaaatcacaaaagcccacctcatgggatggcatgcatgtggagtttagtaccaccttgcttattctaggagagggggacctccttaaaagggaggatgtcctcctagtcacttgaagcatgtgtggtggagagaagaggggaaacacacgcgcgcgctcgctcgcctcgcctcgcctcgccgggccgggccgggccgggccgggcaggcggcgcgcgtgcacgacgtacgcgtcgaatggtccgaaaaattggctcctcacccttgcgtagatgcagcttccttttgcagttttgttttgctgcaaattcagattcgtttttgttttggaaacgttccgaaaaatccggtgcgtgcaaacggcgtggagtccggataagttacgcgcgacttatccggttcggttacgcgcagtagagatcgtgcgggcgccccgatcaagcgactcttctctatataaaccgacctgccgtcttcacgcaacacaagcgaaatcaatctagggtttgcctcctactctgtactgcgccgtcgctcgtagactactccatcccgctcgccggcgtgcaccgtcgatcgggagagcaggtctccggaacctctgccttcgacgtcctgcaccgggagaaggcggcaataaggtttttgggaagcgcttcgcgcgactgctccctgtttgttcgcgacggctcgccttcctcttcgctcgcgtgtttcgtgccttcgtagacacctgcgaaaagtttcgaccaagcagccgatctttccgtcacctcggtacgtgttcaatatgttgcgcatatttgatctgttcatgttatactgtgtagtttacatgtatagatctaatgatgcgttcatgctagttttcatctgtaatgtcatgatttatttatgggatagattaaatcattatatgtctataatctcaacatcaacatccctatcagctttaaataatttgttgcattgaatacacttagctgcaagcaccaatatgccatcatatatgggttcaaagtctttccaaatctccgaagtaagttttctctttatagatctacgagatggacctatatattgccataaaatgaaattgacatggaatttcctaggaaaagattagggtcatgtcataggacaaaatcaaattgacactgatgtatggggcttttaactatttgccactcttacgaatggaccttaacgatttgccactaggcccacatgtcatagacacatgagggcccacgtgtcattgacagagcgtggcaaatcgttaattgctatgtcacaagagtggcaaatagttaaatttccccaaatgtatttgcacttaccatatccctgagaaatgttgtttgctcagatggagactttggcaatgttgtcgatgtggatcttgttactcgtgctagctactgattggatgacatcaacatggaggaggctaccaggccatcggacgtctgataaaaaacgaaatatcggacgcctctcatagcccttagtagcagcgcacctagcactatatttaaagcgcaagagcatgcagccacatgtgctagcctatgtatgcagcatgtacggctactagtactgtattataatgtacacatatatttttattctttgaactcttttctcttaaaatatatatttgatctgtgatttgattacatcattggatttgttataataaaatctttataacaagatctcagatggctatatttcgatataaaaaaactactgaaacatcgtgaaatgcttattgcaacaacaggtagtaccatatgtgacatttcaaaaacccattgcaacaaaaaaaaaactttaaagtgcaacatagtccaattctaattgaaacatttgtttctcattgagtcaaacactgaattttaacgattgaaacatatatatttttttcgtcataatataatcatgcaagatctcattgtaaagatttaataacaacaaatacaccacagtaatcggatcatgaatcgcataattagtttggaagaaaaatggttttaaagatcatgtctcaatttgcatgttcctatatacttgcatgcaagttgtgcatgcatacggctgaggaaaagtaactgggaaagagaaatcaggaaaaacaccaggaaaggtgaatcaactttagactagtatagaggaagctggcgtccgatgtttgtcttcccgtcggacgcgcgacacgaagcattttcccatcaacatccgtatcccaggggaaccgacaataggaataattggggactttagttgctttgctggtggggaattctgtccctgcaacacacgatgcttctgttgagttgccgaagatattccactaccgtcttgagcctccatgcataattcctacggagtaaaatagaaaacatcaaaatattttacaataatcctacttactttttttaacggtataagacaacaataaaatagctatccctgaaagtaactgtctcaatatccaatcaatttgcatcagtttttctatagagatattaatatactagtactagtttcatagagacttttttgtaactattaatttcagaagttcatttgcatatgaagagtatcgaaatgacaactattacataatttcagacctataatgtagcatgtgcggcggtgacgggaggtcgcactagaacgggattgtttatctgtgacgggctgaaagcatcatcactatcgggtaaggccccccatcacgatggttgttggcgctgctcgtcggccagagcacccaggtggacatctggacgatgaacctcctccacaggacggccttgcgccgaatggcgtgcaccaaggtcatcgacttgacgggagtaccccggagtccctgcacgccgccggtgtcagagttggagatggcgcgttcctgtggtccggcgatgcgagcagcggcgtggtgctccggctcgggtggacggtctgcttgctttgctggaccggcgtcggcgcgccattgtggtctgcgcgctcggcgaggcgttcagcgagtttcgctctgggcgccgccatgtgttgccgccatatgaggtgggtttgtccagttgggttccctcgatttctccatgatttcattcgtcggctggggaacgtgaagtcgcaacacaatttcgccacccgcagttttgcaccccaccatgcatcatgcatggatctatgggagtgaattataaactctcctaaaaatattctctccgtttcacaatgcaagtcattctagcatttcaatgtatatcaatataaatgtgtgaaatgctacaatgacttacattgtgaaacggagaaagtaaataaataacaataaataaatttaaaaaaaataaacaagatatattgatacatgataaatcactacaatacaaatttaacttctctaaattatatgatatatccatgtattaatccattcttcacatattacaaactgttaaatggcatatttcatgtaaaaactttgcatatagaagatgatttaaaatatcaaataaatatatttttggttttataataataatagctcaattaattatacgctaattcctttttcgttttgtatatgctgactttgtttccagcttaatttatttcaaattcctcctaaggagtttggactaggccgccaaactaaagatattttctgtttaaatgttatactgtctcgtcttcacctcttcaccggacagttcagatcaggttgacgacgattgtatcctacggaaaatttataactagttcaaatcaacttcaaattatgtgaaacttatttctaaaattttgtaaattccagctctatctgttggaatagaaatacaaatgttaacaagtatattttatacacaatatgcaaaataagccaaattggttaataaatggccaatgctaaaaatagcctttcatagctaagttttaatcctattaacaatactattgaatctaaaatgtgataatccatgctttaaccctaaaaacatgacacataaatgatctttaaagattaaatcatggaagaagcacatttgtgtaaaaaaaaagattccttaatcaattgtaaaactaaatgtcacgcctgaaaaatacctttccgaaatgccattttccttttttcgtggctggtggaagagaatgaaagtctagctagaatatatccttctgcagagaggggtcggccattgcactgtgcaagtgtagaatgcaattcaagtctacagatcacgtctggtttgcactataggcctcatcaattgggttattgaaaggcttatgctgatatatttatgccggtaattaatcaaggaaaagtgagcgatatcttaaaattttcacatggcattgtactacgataatggctctgctcatatgtattgttttttaatttagttcaaagttagctatatgatcatataaccgatgccaaaaaaatggtcctaaaattttgtggggtgccagcttacatatcaggttcacacaaaaagggaaacacccgccatctcaagcagccaactagctagctagtagtacttcttactactcggagctcaaagatttcttaaccaccatatcaattgaaggagccaaaacgaaaccttaggttacaggttccaaaaaggcctaaagccaccaacagagcaaactatataaaccatctcattttgtttcattgcctccatctgcattagcatcgaaatcaccctaaagataacaatcggagaagcggataagatcaaatacaacgaataaaagcttgcttgtagcattcaccaaacaaactatataatgttttacaaattttactattatcagcttttgggtttggtccagaacaagcttgcccagatttatgttctcattagttgtctatagattgattttatacatatgttctatggtaagaggtgtggaaagcagggtattaatcaatcaacaccaataatctgattagtgaagattaattcaagtagcattcttttggtgggagatactaatttaacactataacagttaagttagacagggaattgaagacactataactgtgaaactggaaataatctgagttggaacttgaaacacttgacagtggaactggactaactcacccatggcagcagagaagaggatgggactattctgaataggtggacgaagactggcctagtgaaaggagccataaatgttctcagtgtggtattgaagactaatatgcacaaatagcctttcgttcacgacacagtcctcacagcttctgaccgccagcacgtcgagctaacattcatgatgccttccatgcctaaatagctactttcccattgttttgtggcttatggaagatgataaaaatctagttagaaaatgtgcttttgaagcgagaggttggtcactgccagtgttgcactacgcaagtgtagaatgcaagtctatatatcacttccatcttacactgtaggtctcatcaagtgggttggtgaaaggcatgtgtgctcatatatttatgctggtgatcaaggaaatgtgagtatcttcagctttgcatatgacattgtactataaaatccgtccacatttataattgggttttcatagtcgtacaagaggataaccgcaaggtactataaattcataaattctagtaacaatatgtgatacttcttgatatcttttgtggtgttaaagtaagcggcgtcacaaaactaggacattgccacgcacataccctaactttacatatcctagctaaaacctcatcctcacttcagcccagaatgatttttttctttgttttggctctgcattgtcttttaagttgaaagtttgttgtgagattgcccaaacgtaagtaatgtttaaaaaaaaggtcatgctattttgtgggataaaaagataaagaggggaaaatatacggtggaaactacgtatgtatacatgtagtggaaacctggaaactattgttggataaaaaaatagactctgagatttgtccacgtcatcacgagtaaaaactttactcgcagatttactcatgagttaaaattttaccatggtgacgtggacgaatctcgaacatccatttccattttttgatccaatggtaatttccaagttttcactacatatagggtttgcactacatatttttccgataaagagatgccatctcaagctgccaactattcctactactaggagctcggaaggaggctgttctagagcatctgtacaaatacaccacacaaatatagccacatgacattggaaaatgatatgttcaaccaggatctccatgtaactatcaaaactcagagagcacccaattccttttcttttaaaattatgtagttcattgaattctgtttttaatgggtaatcataaaaaatgtttcattttcagtgaagaaggggcgtaccatatctctagcatagaagttgtagtcctgttagcgagtctgtccacttcaatatggtaatgtgccattttgaaaaatataacataaatcatatatatgtaaacaagaaaacgatgcaatcttaaattgtcatggaaatttagataaaaaaaaagacaaatggtactggcacggcatgatgaatcatgctgaacacttatctttttttcatctcgatatgtaggacgaatttaatatttaacttattttatatgtaatacatccattaattttgatggaatttttgaaatattgctacttaacatcgctaagggatactcctgaagaaaacccacgcacaataactgatttctctctgcattctctgaacccattgcgggtgccatcggcctaataactgatcatgctagatttgaagcacggcagcaaccaaacagagcctcttcacctcttgcttcgggtaatcaaggtttcaatgaattagttcactatcacacctttggcaattcagttgttgagctcttgtgtcgtcattgttggaatctgcggtctatgtgtctcgtcatgtcggtggcgttccgaacacgtcctacatgtcacatgaggaaaaaatcttctagattcttttctgtgcaacttccctaaagcccaacacgctcagtatcaaaatctggtgatctctctgagtttcacagaacagatgacacattgacactgagtgttgggcatctaaaattccagatgccctccatgtctagagtatactaccatctacaacacttgcacttggagaaggaatttatattcaatcacatcataccatatggttgcagaaaaaagaaaactgctatagaaacccatgcatgcattcatatggcaaacaccctgtgagtctaagatggacaatgtgtgctttataaagcaacagtgtttttgttgcctccagtaaattgtcaattatatgagatggctggttaaccctggcatgagcatttgtattcttggatatttgttaatcagctaggaaaaaagttaatcctgacatagcattgctgatcgagcatcgccaatcaaagtaatttcaaccattatttatgaaatctactagtaaaaaaatattttgccactggtagttgaggtagcagtacaaatatatatgagccattgaattagaaactatgaagagtcttgattgattctacaaaacacctcatataacatgttatatttccacaatatggtatcagtacttcaaaatttccgttgcagctattatagtaccacacccttaaacaagtattccgtcttaatcacttaattcttctatcaaattccaacagagcagcattactgagaaaacatagtcaaattaaaagcatctggtggagaatatctaaacatgggatgtgtaatctgagatgaacttggaaaaagtacgaattactcccctgaactatcacggtcggccaattaccccctaaacccgaaaaccagacatcgtttaccttgaaccttcaatatcaaacaaattaccccctcgacataatccagagcggttttgtcctacgtggcaatccagtcagcattttttttatggtggggcccacctatcatataaactctatcacctgtctctctcccccctctttcttaggccattgggcgcaggtcgagcggtgcgccgcgcgggggcgggtggtgagcacggtggcgggtcgacgagctcggccggctctagtggcagcagcgggggtggtgagggcggcgggacttggagcgaggcaacggcggcgggacgtggaacaacgcgtgttcgctacaatttcatcgctccatccatccatccatgccgcgtgtgtgctggatctgctggttgttggatctgctgctcctgcgacccgtggccgcgtgtgtgctgtcctctcgctggttctgacgaccttttcttcctcgatgccgctgtagatggccggcggtgagcaggaggaatcatcactggtgttcttatctccgaggaattttgattctctgtgtggagattatggatatcccatatctacacggcgatgatgtttgggctgaatataggataccgaatatagatagaatatcttatttgtatttcgagtttgtttctcaacttgtacatcaaggaaataccttgagacttagtcggttacgactgtattttatctgtatctgcctattccgttagggatatagattatcttttgtaacacggactccttcccatatataaggggggtccgggtgcctctaggggcggatgttgattttctcccaatcatccaatcaataatacactcggcggattcatccccggacaggagtagggtattacttcttgaataagaaggcctgaacctgtataaatcctttgtctccaaacccatacacttttccagcttgatagccacccccttttattattgccgaaatctagtttcgacagttggcgcgccaggttggggttgcgtcaagcttttcgccgatcagtgcaatgggttccgtctccggcatcgacgacctcgtcttccctcccgggcagacgtttcggttcggcagcctcgacttcgtcaccaacaacttcggcaagatctctctccttgactcggagtcgaaccagtcgggagagaaccggatctcagtcccgtttggattcccaaacgcggctgaaagttgcttcaagaccatctcaatcgagtcggcttcaaaccactcggctgagatcgcatcttctccaacgtcaccagatcaagatgatggggcttacccaccgatcctgatgaagctccccgacgatttggcggccgtctccatcacgacagcgtctccttcccgtaggcctaggcggaagtcggcttcaacaccgatttcgcctagcttcagggaagtcggcgtcatcctccaacctctcggcacggtttcgaccgatcagctggatggctacaacagctctcccaccgtcgactcgcgccccaccgacatcgtggagtatgacgaatttagctctcgctacaacgacctggatctcgacgacttcgacggaagcctagatgacaactacacccctctctacttcggcgtcttcatggccggtaacgagacggaagagcaacgccaagcccgggaaaccgaagcacgtcgcgagactgagcgtcgccgactggaggaggagcatcaagcacaagaacaagaacggctacggcgtgagcagcaggagcgtgaacggaccgcgaaggaggctgaggatcgacggcagcgagctctggaagcagggcgccgagcgcgtgatctcattggccaacaagatgttgaagggacacctgttttccgcacccctcaacagaatgcggttgccgcgatcaccctcctcgacaccctcctcagggagaacgagctcaatcaatctgaccacgtcgtcaacatcttgaaccagacgaagaccatgattgcggcttcggtcccagttaactccgaaagcgtccacacgccgactggcagccgagtcccccacttccgatctcatgactaccgtcatccaagcctcagcattaccggcgcaggatccaatcgcaggagcaggggccacgacgagcggtctgttcactcacctcccgatcatcatagggagcgccgagtggaacggcctcgctcaccacctcgtcgccgccccgtcgatcttcgcgacaccatcatacagcgccgagcagctcgaggttatcatcattcgccggactgccacgacgacgaccttgacggagtagcagccttcaccgacgacctgcgtcgagtggattggccagccggcttcaagccgactggaatagagaagtacgacggtaccactaacccagaatcgtggcttaccgtctacggtctcgcaatccgcgcagcaggaggagatagcaaggccatggcgaactatttaccagtggctttagcggattccgcccgatcttggctccatggattgccccgtggtacaattggatcttgggctgaattacgcgaccacttcatcgccaacttccaaggcaccttcgagcgtcccggcacacaatacgacctctacaacgttattcagaagtccggagaatcccttcgagattacatccggcgattttctgaacaacgtaacaagatctccgacatcactgacgacgttatcatcgccgcattcaccaaggggattagccccgaagaattggtcggcaagttcgggcgtaagcctcccaggacagtcaagctcatgtttgaaaaagccaacgagtacgccaaagctgaagacgccgtcaccgcatcaaagcagtcgggtcctaattggaagccaaaaaaggatacgccggcttcgggaggaggtggaagtaacaatcataaggaccgcaagcgtaagcctgcggaacttgttgcaaccgccagtcactcttctcgacagcgttcgcgcgtcaacacgttcgacaagatcatgaactcccaatgcccacaccatcctaactccaaccatgtggccaaagattgtttcgtttacaagcaattcgcggatcaatacaccaagactacacggaagaactccgacgaagaacaaagcacgtcgaggaagaaggacgacggcgacgccccggcaggatttcaagtccaccgcaaggagctcaaccatattttcggcggccccctggcttatgagtctaaaaggaagcaaaagttgaccgaacgggagatcaatgctgttcagcccgacacgccccaatatcttcgatggtcagagatcgcaatcaagtttgaccgctcggatcatcctgaccgagtggtccacccggggcggtaccccctagtactagacccagtggtccgtaatgtcaagcttcgcagaaccctcatcgacggtggcagtgcactcaatatcctcttcgccaagaccttggatgatatgcagatccctcgctccgagctaaaaccaagcaatgcgccttttcacggagtaattccaggattgtccgcaactccactcggccagatcaccctcccggtcacttttggcactcgggaaaactttcgcacagagaatatcagctttgaagtcgctgatttcgagacagcataccatgccatactcgggcgcccggcgttagctaagttcatggccgtcccgcactacacttacatgatgatgaagatgcctggtccccgaggagtcctatccctacggagcgacatcaagcaagccgtcacatgtgacaaggagagttgcgacatggcccaaacccgcgagatggcgtctgcccgagaggatatccgactggctgcagccacggcgagcgaaggagaagtgcccgctaccaagacttcaaaaagcggagaaagcgaagccaagactaagaagattcccctagatccctctgatcctactaaaactgctgtaataggcgccgagttagattgtaaataggaaagcgcgctcatcacctttcttcagaacaataaagatatctttgcgtggaaaccatctgatatgcccggtattcctagagaggtgattgagcactccttacatgtcaaagaagatgccaaacctatcaaacaacgactccgccgatttgcacaagacaggaaagacgcgatcaaggaggaattaaccaagctgttagcagcaggcttcatcaaagaagtccttcatcccgactggctggcaaacccggttctagttcggaagaaaacagggcaatggcgcatgtgcgttgattatactgacctcaacaaatcctgccctaaagatccttttgggttgcctcgcattgaccaggtagtcgactcgaccgccggctgtgagcttctcagttttttggattgctactcggggtatcatcagatccgactgaaggaatccgactgcttgaagacttcattcatcacgccctttggagcttattgctatgtcaccatgccgttcggactaaaaaatgcaggagcaacttatcaacgtatgatccagaggtgcttctcaacacagatcggccgcaacgttgaagcttatgtggatgatgtagttgtcaagaccaagcaaaaggacgatttgatctcggatctagaagaaactttcgcgagcatccgcgctttcaggatgaaattaaaccctgataagtgcaccttcggagtaccgtcagggaagctgcttgaatttatggtgtctcataggggcatccaagccaacccggagaaagttactgctatcctcaacatgaaaccgccaagtacccagaaagatgttcagaagttgactgggtgcatggcggcgctcagccgatttgtttcaagacttggcgagcgggggatgcccttctttaagctactgaagaaaacagatgatttccagtggggacccgaagcacagaaggccttcgaagatttcaagaaactcctcaccgagccaccggtcttagcctcaccacacccgcaggagccgttgttgctatatgtagcagccacctcccaggttgtgagcacagtcttggtcgttgagcgcgaggaagaaggccatgtccagaaagtccagcgaccgatttattttgtcagcgaggtcctagccgactccaaaacgaggtaccctcaggttcagaagctgttatatggtattctaattactaccaggaagctatctcactactttcaaggtcactcggtaacggtggtcacatcatttccactcggtgatgtactgcacaaccgcgaagcaaacggacggattgctaagtgggctttggagttgatgtctttggacatatcattcaagccccgaatttcaatcaagtcccaagcgttagctgattttgtcgccgaatggaccgagtgccagcaggatacccccgcggagaagatggagcactggaccatgcattttgacgggtcaaaaagactttcgggcactggagcaggagtggttttaatttccccaactggagaaagattaagctatgtgctttggatacatttttcggcatcccacaacgttgccgagtatgaggccctccttcatggactgcggattgcaatttccctagggataaagcgtctaatagtccgaggcgattcacagctggttgtcaaccaggttatgaaagagtggtcctgcctcgacgacaatatgatggcatatcgacaagaggtacgcaaattggaagacaagttcgatggactcgagctcagtcacgttcttcgacacaataatgaagccgccgacagacttgccaactttggatccaagcgcgaagtggctccctctgatgttttcgtcgaacacctttatatgccgacagtacctcacaaagatactactcaatttgcgggcactcatgatgtagctatgattgaagccgactggcgagagcccctcatacgatttttgacttctcaagaactcccctaagacaaagatgaggccgagcggatttcaaggcgaagcaaactttatgttatgcatgaagctgagttatacaagagaagcccttcaggaattctgcagcgctgcgtatctttagaggaagggagacaattgctgaaagacatacattctgggatatgcggaaaccatgctgctgcacgcaccattgtcggcaaagcttaccggcagggttttttctggcctactgcagtgtccgacgccgacaaaatcgtgcgcacatgtgaaggttgccaatttttcgccagacaaattcatctaccagctcaagagttgcagaccatcccgctgtcttggccgtttgcggtttgggggctcgacatggttggcccgtttaaaaaggcagccggcggttacacgcatctctttgtggccattgataaattttccaagtggattgaagctaaacctgttgtcacaatcacagcaaataatgctcgagacttcttcatcaacattgtgcatagatttggagtgcccaatcggatcatcactgataatggcacacaattcactggcggagtttttaaagacttttgtgaggactttggaattaagatttgttatgcctcagtggcacaccccatgagcaatggacaggtggagcgcgccaatggcatgatacttcaagggattaaagcgcgtgtttttgaccggctaaaaccctatgccggcaaatgggtgcaacagctgccatcagtactttggtctttgcgtactacacccagtcgggccacaggccagtcaccttttttccttgtctatggggcagaagcaatgttgccgagtgaagttgaattcgagtctttgcgttttcgaaattttcgtgaagaacgctacgaagaggaccgaatggatgacttacaccgattggaagaagtccgcgaagcggctttgattcagtcagctagatacttacaagggttgcggcgttatcataatcgcaatgttcgatcccgtgcctttttagtcggcgacctggttttgcggaaaattcaaactacacgagatcggcacaagttatctcctctatgggaagggccatttatcatctctgaagtcacccggccaggttcctatcgactcaagcgcgaagacggtactctcgtcgacaactcttggaacattgaacatcttcgtcgtttctacgcttaagcttatcattgtattttcctatcttgactgtcaacatcaagttttcttcttgacgttgtcagtcgggggctattatcataataatggagtgtgattttttatcaattcaatttgcttacttggtctatcattgccttgtttggttttcctacttagtctgcgaggactgaaaggttttaatagcttctttgggttttaggctcaacaaagcttaacaaaaacttctaagaaatcaaagactaggctagaattatcacgcacagcataaatacaccagtattgtacaaattgagcctccatgtattacattcatactcagtcagaatcagttctttcatcatcagagttattactactcggctgaaagttagtattgtggaattgatctacaacgtcgcttgcaattttgtcagccgcattttgagcactgctgataagatcaagagcagcctcttcacttgtcccgtctgcaaagccatcaatggtgtcaacttcaattcttgggtacaaggatttggtcatcgctaatgccatgctagctcccatacttccagctttcttgatgttcttgaaatacacatccggagcagctctcagcttgtcaaagatttcggttgcgtcgagtgcactcggaccactgttattcaggaacatagcttggacaagtggggtagcgacattagcaacttcatctcttgctccttcaagcctcttgatcttaccaaccaggacgtcaaattgagcttgggatttgattttgcgatctacaaaacacatttatgatgagaatctgctgcgttataaagagagaagttcagattgtcagctggcagtaccttcaacttccttcaaggcagagtccctctgtgcagccagttctaccttgtctcttttcaaggcttcaatttgcttttccatttgagccatcttggcggcttgcactgtttgaaatccaaatggttgaggatacagttgcgacagcatagatcaatgcgacaggtctagaggttaccttttgacgaaccactcagctcgaagtttgaatcctggagctgagcaattcgctcccttaattccttctccgtctttttggcgagctccttggcctcgtgtaactggtccctaacagcttcaagagttcccaaatgaggaaccagtctttctaaagttgcggtcttggcctcattgcgaagatggattctctgcataatggtttgtgatttagttctgctaaaaagaaaacaaagtcaccaaaggcagtcgcccggaagacttacatttacaatacgagtggcttctccaagcgccttcttcagctggcatacttcctcatcttctttttgacgatttatgacgataccggcagcttgtgagttctcgtcccaccatttgattaagataggaggacgagagtcgtcggccgcctttatgcgaaggatttcttcttcgtcatcgcctggtggtcctgatgtgtttccaagacgttagacggataaactgaagttatttaaatcggcatcacttgagaagataatttacctgaagatgttcctagctgggcgtgaggtgatccttgttctttatttggagacccaattatcgagtcgttaccagcctctggcccttgagaagttgtcgtctgcgcttcaacttcggggatctcttgatcgggacccacatccgactggtttccagtcgggggctcttgggttgttgcagtttcagttgcttccgactggtttccagtcggtggctggtcactcggatcggccttgtcatccgaagcatgggcgccagtcggctggctttcggcagtcggctggctttcggcagtcggctggctttcggcagtcggttggttttcggcagtctgctcaacgtctttggataaatttggctctgtcacagccggatcaggatcttttccagttggatctatgtcggatggtttcctgcaaagtgtcctttcgatattcagcgtaatttctatgagagaagcatgtcaaagggagatggtaccgagaggtttgtacctggaagatgttctaatctttggcatttgacggccagccagttttttcttgggcatggtacgctttgggagtttattaggcgagcccttgtccccagatttatcgtcgtcgccttcatcgttgtcgagcaccagttttctcttccgagaacctgtctgtccagtcggattggaggtttgaggttgcggatctggtctgatttttgaacctccacctccctgaacggtgtgctgacgaggcgaccggcattgagtgattgcgggatcagatttcatcaacgcatattcctaaatgagatgcctccacggttaattaattcaacatgaaaacaagataatgttttggtcatagattgaagatttcagaggcatacctgcggaggcggattgaatgcattatatggcacaactggcagctgatgtgagtagctgacgacaatagcatttgagaaaattttatacattctctccttcatgattttaaagtccagagagtctggttcttcacgattgggatcatgcttgccgtcgaactcgaatgctgtacgggatctttctttaattggtgccaatcggcatttgatgaaatgccgagtaatctgctctccttgcaagccttgttctttgagttttagcatgcggtccatcaattccaaggcttgagcagcttcatctccgatcggaagagagttccaagtatcttggtacactggaggaagacaagagtactcgggaagagcaggctcaggattctgaacataaaaccagttcacatgccaccctttgtttgaggtcttgaagggcatagagaaatacttctggctcagagttcccctcaactgaaatcctgcccctccgactacacatgccttatttttgtttggttggggcttgagaaaaaagattcggcggaacagagcgaagtggggtttaattcccaagaaggcttcacaaacatggatgaaattggcgatatggattatggaatttgggtttaggtgatgcaagctgattccatagaagtttaatatcccgcggaaaaattttgaggtcggaagagcgaagccgccatagaagaaatgagagaagaccacaatctcgtgtgtatcgggggtcggaaaaatctcaccgcacgctggccgccacccgatgatctccttggcagggagaacgccgtgcgccaccatctccttcaggttctcttccgttacgtcggacggcgcccattggccttcaaagctttctttctcctccgccatcgattttacccgaatgcgctgatttgattcgagggatggctagggagaggtgagggattgaggcggtggatcacgggaaggattttgatgcacttttcgaaggtggatttgagcggaatggtgaaccctagtttgccggcgcagttctctactgtagcagggagtggggaaaatggcgagagttccggcggggaagacgaagtgtcgcttggatctcgggatttcttgttaagggtatcggaggtgcaaatgggcttaggcctgaacagtacctcagcccaatacttttaacagcgtggcccattgtgttccttagggacttaggcattttttgctttggcaatttatgcgcacaatagtgttgcccaatgctgataaaatcctttttacgcggtcatataattctttggaattattgcaatgcaaattaaaaggtgcccgacagaaaagcgttatgctgtttttgtaagcttttttaggctacaaaagctgtttgggttaacttggaatgacttgtttttattatagtcattcccttggtatgttatatgcctgttttcattatggtaaatagtcatagcctaggctattagacttattcattcccataatttttataatacttggtgggtaatccttagagtttttattcggatgcctgtcaagtgtgttcattcgtgaaccttttagagtgttaaccactcggattctttttattatggataaaaggcagtcggctagaatgcctctttaggcgccgcgtatgcttttgtcatatgatgcgcgattgtgctaatattctgttctcaactatatgtttagtttgttaattaatcacatagttgggggctacacctaattaggtgcatctattcgatgcaccgtattctttattgtttcgccctttacagtcttcgtcttcgctactcggcaggccttggcatgaataatttgaagcactcggattactatctttgagaaggctataatggttgactgcaaaggtctcgggggctactgtggagattatggatatcccatatctacacggcgatgatgtttgggctgaatataggataccgaatatagatagaatatcttatttgtatttcgagtttgtttctcaacttgtacatcaaggaaataccttgagacttagtcggttacgactgtattttatctgtatctgcctattctgttagggatatagattatcttttgtaacacggactccttcccatatataaggggggtccgggtgcctctaggggcggatgttgattttctcccaatcatccaatcaataatacactcggcggattcatccccggacagg

SEQ ID NO: 29124 - DNA, 16865 bp, Oryza sativa
ggagcaacctagccacgcccactgtccgctcgctcaaccaccagagaaagaggatgatgtgattcaatatgacatgtgggccctatattttttaatttttttggctgattggatttccacgttggcgccacgtgtatgccacgtaggattaaaaccgctttggaagtgctcaggggggtgatttatccggtatgaatacttgaaggtgtaaaatgtccggtttcgtggttcggggggtaattcggctaaccgcgatagttcgggggtaattcgtactttttccgatgaactttaattgcgttggaacaacactgatgttaagtgctgttgctatgaaattcaactagcattaccatgccaagttgccaaccttccctttgatcaaagtaaaaccatgaataacctctgccattagtaattatatgataatcatcatcccaatgctcttgggtccgactctgaccagtccatattacactccaggaaatcctgtagatgaaagaagatgaaaggtgtaggatcgaatacctagaaccaaacctacaatagggttgtgaaaagtaggaataccaaaaaagggaaaacttttagcaaaactaaaagttaattaattaccatctaacttgacaatgttcctgacgaagttgggtctggccacagagctcacgccagtctgacagcaccttaaccatcattctaaccgatgtagatcggctggtctgatcgtccttcaagccgccatctcctagagccgccgccggtctaaccgccctagagccgctggtctaaccaccaggttgccccgagcaaaaccgagcaaaatcataaagcgcagaactcttcaaattaaatcaactttattgcttctaaatgaggaagctccgaacgccgctttcgagggataagacccacaccctgtgcaaggcaagcctctttgatcacattgcccctatatttgcaagatattttttattgaaaaatgcattgcttagtatacacgataaacatgtttaggccctcagattgtttatgcaaccgacagaccgacctagtagtcgcacttatattacataggttgatgtttccttacctttgatagctccacaaatatttgcgtcattattgttatacgactatcgaggtagttcgcttagccatgcttatgttgtattgtcgggtgggaaacctgggttattccaattatatgcttaaaaatctggtgcgttgtaccgacgtgttgtgaaataaaatgtgttgtgaaatggtgatgatgcaaggtcatatctttgtggtttggccatgtattgtcgataagcatcgtttgctttgggaaatccatccaaacacattacagtgcgaccacacgggtgtttatgggatacctctggctaaataattagttatcatataggggttggtgtgccaatggttgtggggtgccgaggatgaggagacgaagtttatttagccctattgggtgtctctttttattgcctctattgtggcacgcgatatcagtaggagacatcgtcggtatttcttgagtggatgatggctgaccttgcctgatactcggctaagagacttagcccaactagggggcatgcgattttcatgggttagctttggaaaggccttaccatgaacttccgttaccgataggtatcggtaaccggtgatagtttcatggggtaaagcatgtaacctctgcagagattaatgaattgttcgaacacccgtggcacggtcaagtgtcacaccccaatctgataccgccgtacaacggcacctgacaggagcgtgtcgtagggaaacggcgctcaggtcgggtttttcacaattcattttattttcaaacacaccgacaccacaggtcgggttttggaggcttcacaaacccatttcccaagttttcgacaagcaatggtgtatgtgggatatttggtatacgcgctcagagagcacgaataccgaggtaccacaagggtggagcgacaaggaatcagggatgtacgacctacggaaattagtgcgactactgggtaggtccgtcggtttggcacgcaaaccgaggccaagcaagttaagtgtgtgattctaataatgcaagttacaaacaaaataataatgatttttcaattataggagcaattgatcaaagggtgacttgccttgctcaaggtcttcacgaagcttcacgaatcttcgagaaaacctgcgatcgacgaaaatccgataaccgcaactatacgcaaacaatcgaaaacctaaacaaaagaccaaaagaaagatcctatttagactaattagtagtgccattaaatagatctcaattttacggaattactggaagtggaacggagtcaatcggatgagcggttgagaagatatgaattttggaagtttaattggagtttctggaataggagaaatggtttatgaaattttatagaaataatattctcaagaatattattgacagtcactgacgcgcgggaccaaaggaaatgatttgtggaattttggaataaggaattgatttatgggacaaaggaaaaaggatttattaaatccctggaaaaagaaaaggatagagggatgtatattagacttgttcggtggcattggtgcggcccaaaggctaacgcggctcggccgaaccaaatgggccggcgcgggcgcgaggagaaggcccatgagggcgcgcggggagagagggaggcccgtcggggtgggcgcggtccaccgcgcgggacccacatggcggtggttgggttcacggtggggagagcgcacgcgggtgcggcgctagggttcggggggggaaaggcggtccacgcgcggcgcgcgggtggacgcggtgtgcggtgggcccacgcgcagcgtgtcggctctccgtggaccgcgcgcgagggtgggggacggagggaggcggctgaccgaggtcagcttttgacccggtcgcgtcgaggtggcgccgacgtggcaaccacgtcggatggggaggcaaaggaggccgggcaggctgatccgacggctcacggggtgcggggggatccggcgaacggcggcgagccggaaggggcggctagcactggcggcaggaggaggagaaggggaactcattccacggctcgcatcaggaagaggacgcgcgacgacggccggcggcggcggccaatctcgccggcatgccgacgtggccgcgcgcgaggagagcgaagggtgcgcgggctcgggcttagccgaaccggtacggtgttgcgacgcgcacgcagtgacgcgggacccgatggtcaccggcggcgcacgcacggcggtgttatgcggcggcggaagcggcaagacggcgcggagacaaaggagaaggccgacggccttggggcagccagggggaggtcaaggggatccccgggggcgtggcggcgagaggaatcgacgcgagagaagccgacgatggcggattgcggcggcggcaatcaccggagagcaaaaaggggaaaacacgacgagacgacgagggtttgattcaaagggatgggagcatctccggggttcaaggaatccgttcccggcgtcggattggacggagcggcaccgaggttggctggcgacgagagacggcctccgggacagagcatggtggccggcgagctagcgcgcggtgcaagggcgacgagcggcgattcggcggcgagacctggggcagtgtccatgcgtgatcggggggctagccgagctaccacgcgagctagggagggagaggacgagcaagaagggagaacggagggtggcattaccaagccgagacgggcgcagtgacgagcggccgacggctcggaagcgagctctccggcctcgggccgaggaaggggaggaaggagggtgcccggagtcccgcgtcacgcgtcctcgcacgcaccggtctcccggtgctcggcggcggacggcgacggcgagagcagaggaagggcgacaatggcgcggtggagtaggagtgtgaagtgggagggattgagatgggatggggagcttggcttcggggttttataggcgcggggtgaggcgatgtcggtttgggggggggggagaaccgaccttggcggtcaagcgctcggctggcggcagcggcggtttcgtgggcgatgcgaaagcggcgacgacgtggatgctttgggcggcgaaggcggtggatcggacggccgaatccgaaccacgggagcgcaggctggcgcggtcaaggtggaagcggcgagctggcatggtcgcggtggtggcgtgggcgcgacagggcgcaaaggtggcgtcagcggcgccctgtgtccgctcccgcaccaggacaagggagagagcgaggcggccttgcccgcaagggaaaagcgaaaggaggaggaggaagggagccttgctccttccgtttttgggcggcgaggctggagaggcgcgtgggattggcgtcgccgcgttggcggcttgtggcatgcggaggcggggccatggtgacgcagcggatgacagcgaaaagggaggagggctggtttggcggcgagcgcggaccaaggcggtcgacgcggcaggggcgacggtggcgcggccacagcggtcggccatgagcggcgccgcgcgcgggagcatcggcgtggcgcggtcaaggtggggcacaggcgcggcaggacgttgtcggcgtcctctgcctccgcgcgcaagaagacaagggcgagaggagagaggccgggtttagaagggaaaggtgagggaggacggtggaaagggaagcctctcccttccgttttgggcggcgggcaggcgaggcgcgcgcgggaagggcggccggcgaattcaaacggcggcggcgggaatcggcgccgaggtgaggagttcgacgagagagagagaggaaaaagacgagagagcgagagaaacagagagagagcgaccgcacacgcgcaacgcacgtgcgagggggtggaggaggagcggctgagaggagatgggccgaagagaaaacggcccacaaaagtccgagggaggcaaaatagactttttcggaggagattgatctggagagaaatggagagatttagggtttggattcgacttcaaatttgatattcaaactcgagggtttagggatgaatcaagggagactcaaggaaatgattcgagatggggatttgaataattctggattcgtagaagtacttggcgaggattcaaggaagcatttgaatttcagaatttgatttcagagactcgaatcggaagaggaaatttgaggcgaaggattttgatttcgatgagagggaacaacgggatttgaattgagatcttggcacaacttagactcgcacacaaagaatgaaaattttcgcaattaggatttttgccgaattagtttttaacgcctcacgaaaagcggagcgttacatcaagggcgagtgtaaggtgtttctcatagcgtagatttgtatgacaaaggtttgtggaagagtggttatttgggaagggaaacgtttccagagtccgcctatgtggcagacggccaacctttgtggttagcaacgggtctatgtgacctggggtgtcgtctgacaccgaagtgttgttagagctgagaaggtgttgatgtgctaggatagctgggtgaactatgtgaaccatgtgttgttgtgaaagtgaaaagaaactaatagaggaaacaaaatagttattgcttgttaatctcgtgacaagttgttgcaaagcaacttgtcaaatgggtcgaggcgtgagcctcctcccgacaactaaaacttgactcagtaggagttttcgtgaaataaatcactttgccaaaaaggcagctttcgcaaataaaaccctatcctccttgtttaaaccgagcatgtcactctttttcctagcttgctgagtatgttaagtactcaccttgcccttatattaatctatagagtatgaagatgaagacgtcgaccacaccgctgaggagtgtctccaggagcaagccgagtatgaagacttctagatgtttcgtgcctagccccaagcctcccttgtggaataagatagtctcgcctaggttcttttcctagtgcttagttgcttagccgcttagtctctccacgttattcgcttctgcgccatcgcctttatggttttttgtattgttgtgttgctcatctatgggcctgtccatgatgtcaactttcgaaagtactactacccagtgatgtaataaagcagtttactctgatttcacatttattctatgtgtactagctagtatatcccgagactggtactatctcacaggtaaagcataacaccccgatgtatgttagctgtgtttatggctaacgaatgtcggggcgttacagtgcaacaacaacactcctatctgaaaattcgactaaacttgaagtgtaggccaaaccctaatttttctctcaactcttctcttacaaaatcgataccgagaggtctcaacccctcctcttctgtttataccctgagatggcaacccaaaagacacgaattctacttgaataatttgccctaatccaataggaaacctactcataaaagtaacaatcttatcctactacaattcaaagttcaatcttcctaaatttgaactccttccaaatttgattccgcttttcaaacgcacacaatctctcttatatgccatcaaatcttcataaccacgttcattgttctttagtcaaagcatcacgcatgatctcccgatcgtctggacatcaatttctcccaagtcaactctcgatccatcacctgcaacgctatcccgagatatcaagacacaagtaaacatgaatcaaacaaggaaccatctcgagcaaaagttcttcccaacttgattcaaaattagcacacaacagtattacacacacgtagaaatcaactagaagtcataaattgaagcaatcacgagtatccaaagaaacattctgaaatcaactccaaatagagtctagccagtcagaccatcggactggccgcttggacagaacacaacacgccgatctggccggcctacctatagcccgatctgaccagtcctagtaaaaaccacttcgccaattatccacctattatcaaaaccaatataaatcatatgccattgttttttgatgtaatcatatgccaattgttcataaaaaaaatatgtaaatcaaaaacattgatttcacaaaaggatctatacatattaattaagacttcaacttatggtcggattcaatgcagttagctaaaccttctgaatcttttcaaggtaacacacggtagctagctgattaatagagttggcttcaccgtgtagtttgcaaacatcttcaaaaggagaagagatatgtcttttcatccaaactcgaggctttttttttttggtcctgctagccacatatgctcatgtaaggtagcattacttaggtgtgagaggcatcaggattatatatatgcataccacgcataggatgggcatctacacccaaagctattttactcttcagcaactgcttgattcctggatgaacaaattcaccaagatcaagaagtgtctgcttgcaactgaagtgactgcagtttgctggaccatctggaaagctagtaatcctgcctgcgttccaaataagtttccagcagatccagttgaggtaattcataatatttgtcattggatctcatctatggcatctatctatctatctattatctatctatcttctatctatctatctattatatactaaaagtccattaaacttcctataaacgctcctacgccgccatgtggtgctcctacaaacactcataggttgccatgtggcattttataatctcaccgtcgattttcatttaaaatggtggacccgttattttaggccattagattagatctatttgcatcctcctaatatcccgtgcatatgtgtgaaaccgtttgtaccagaaaaaacttacgtacgtatctatggtagggacaacccatttaactgtttatttgaaaaaaacgctcgtacgtaccttaaaaaatattaaaaagatgctgttcatatggaaacaagtacgtacatatatgcacgaaattttaaatttaaacaaatgcgtacttatatgaaactatatttcttacaattaaatttaaattttaagactaatattaactaggtttttcttttaaaaaactacaaggggagaaatgtttaggatatgtatatgtacaccttttttttattaatttctgtgtaacaaattgcgtcaatgcaaatcaattaagggcagagcttgatagtacaaataaaacactatgattaaattaaaatacatttatttattcataaaagttttttagtctttttatagaaaaggtaaaaacaccttattttaatttacacttaatttattagacatatgctccaaacaaactaagtatacctctttttttaccctaaaaaatgtatacatccttttttttatgatgaggaagattatagacaattgtttatatggatgaattgaatattatataatataaatcttaagtagagcttagaaaaattatctaaacaatattgatgaagaaaatttatggagaaaacatactgctaaagcttggtgaatgttgctcaattgatattccacccttataaatttttcaaacacatcctagatgcatacccgcgcgaatgcgctattaaatttcctaaaatgttctcatgccactaagtggtaccctataaacactctcgagtcgccaagcggcactataataaataataaatcagagaaatcctaccaacgattttgttggacccattattttagaacattagatatattttattaaagaaacagattcggcacaaacgtaaaaaaacaaaattaaaagttttggcatgttatacgaattaatgaacgtatgtacggtacgtacttccctcccgttccttagtatattattttctctcttcacgagaaactaaaataaaaacatttttacaggcaaaaaaatcccacaaatagacttctaccaactagctaggtctagaagctctccctctctccctcgatctacatatgaacgcaataattctaagtcgctacgtggtctataaaattagaaaacgtactaaaaaatatttataaaaaacaaagcaaccagctatcgatttctatttaaattgatggatacattgttttagattgttagattttttaataaaaaaatcgcaaacctctctccctcccttccaccccgtgcggcattaaaatccattaaacattttataaatgcttataaaatcttagagattctggaaaacaaactaatccattaaacatccttaaattgttcctaagccacaaagtgacaccctacaaacaaacgctcctaggtcaccaaggaacactctaataaataaaaaaaaaatctgaacaacgattttcatttaaattagtgaatccattgttttggatggttaaatcgtttttttaaaagaacacacacatccagaacctcgccatcacataggaacgaacatgcatacttccctcccgtttctttcagttttatctatcttcatgataaaatgataatcaaaattatttttacatgaaaaaaaagcccacaaatagacctccacctactacttggtctagcagttctccctctatcacttaaacatcctacaaactgaaatttcttaccttttcatccttttcaaaacttattttacaaatagactcctcgaaaaacttattacaggaatgggcctattttttttgcgccagagaggctggcaccatcctccaccctagcgccagccaccctggcgctgtcaccgtgtcaccgtggcactagggcacacgtgagtgggctgacatggcaaagggaggcgccacgctggcgcctccgtcccacacaccacggtgctagcaaggctgccgcactccccctgggtgggccgcgcccttaacccgtgcgggccccacctcctttctcctcccccactcattttcgccaacttaggagcccgagcacgcagagaagcccttctcccctctctcccccccatctctactcatcaaatccactcaatctttttcacaagttttttttggaaatcgaagataaaggtatactcctccattccatccttttttttccgttttaatcggttgcatttgtagatcggagggtacccctagaaacccttttaactttaaatataattaaatttgaatcaaataaaaattgatctcattggatttatttttgggttataagctatccttctgggaagtcaaaatatcataaattttctcataggaaccacctccattctttcaacacaatatttttttataaattcaaaactgcacgatgtcaagtaattttactttagaatttatatgttgcaagggtaattataagaaaataatcagcattcaaagcatactaaataagtttatttttcgtttagtatatatacactaaacatttcaataaaaattcacccccacaaatttcacttacattatataaggtgcccgcgcatgtgcgcgggctatctttctagttgctgaagaagtagcaggaaaataaatgcagaaacaccgcgatgagggtaaattagtagggtaccccgttttcatgcaccgtgataggcatgaaacaccaataatgcacacaaataatttaaatgtgtaaattattagatgtgccaattggtacaaataagaatgtttccttatttcttctgctctacttaaaattcatgatggaaacttctctagtcccgttaatccaaatttaaatgtatatattattagatgtgcaaatttgttcaaataagattgtttcattattttttctgctctacttaaaattcatgatggaaacttcactagtcccgttaatccaaagtccaggtgccgagggatgaatgactattgcctctcagatgcgatacgcattgtagatcaattgccaatctagaaacactctggcagaaaatgtttaatcgattctccatgtccctacctcggagcatacattttaatttgaagagagtatgtacgagattatggtggaaatgggattttatatttgcagaaagaaaaatatgttctcaagatgcaaatatgacaaatggtatgtctactgcatgattgacagtacatgctgaaaggatgtctgtttttatcttgatatatgggattaattttatattgattttttcaaagtttataaaacttggtttatgtcttatgatcattccattgatttctttgatttttcttgaaacatcgatactctacttcgatataaggggattccatgctgttgtcaaaactacagtcctgtagaagcatatttacttcatttttctgttttacataacctgttacttgtctcaccgtctgactaactgatcaaggtggagttaaaacaatctggcaaacaaacaaatcatcagcagggagtcatggcgattatgaatcaactcacatacatcacattgtggtactccactcttcaattgatcgatggccattatattatcgatcggatactggctatgaggtcatgtcataacgttcggtatgaaggagagaaagtacttcaagttttccctgtgcagatttcgttccatcagaccatatggaatattttgatcccccatcagttcaacaagcaactaacgtcgcgatgtgtggccatctatcattatttccagatgccttccatgactagacagtgctacctatatacaacacgagaaagatggagagaggcatttgttttcagatcataccatgatttctgaagaactcttccatacaacccatccatctaagcaaacatccaccctttgagtctaagtgtctaagacgatgaagaatgttccttttcctatagcactgctactgttatatcctcatcggtaaaacatcacttatacgatggttggtaatcgtaacatcaaacatttgtacttggacaaaaatttgtcaggtaagaattttacatcgaattcctgaccaagaattgaagagatgaacatttgtacttgagcataaattcgtatgttcaaaacatggtacttctgttctgtactgcaaaagtgctgttgcagcagtcctagttgtaccacgcccttaagaaacactaattcctagtcaatcacttagttcctctatcaaattataccaccagaagtttgagaaagcactgtgtgtcagatgaaatcatttggtagctagaacaaagattcacatgagatatgtagttcggatagagtcatttggattgaaatcataattttccaaacagcggagttgtgggaaacactaaaaagtattggttgaaggggacaatagtgtgtttttctctgtgttcttactcccaggttcccaacacccttctctcgttctccacgcgcacgcttttcaaaatgctaaacggtgcattttttgcaagaaatttctatacgaaagttgctttaaaaatcaaattaatccatttttgaaaaaaaaattactgatacttaattaatcacgcgctaatgaaccgctccgttttccgtgcgtgatatatgggttcccaactagaactaacgaacacagtgtttggttctaggtactgttatgaactttacttgagttgaaataacatcatggctaaatggtacggactgtagtgagttttcaggacattcccaaaatttcggggatttcaaaacgatagttcagagaagccagtgaatataatttcagtttttcatccattagctaggcccaaagcagcaccgcaagtttttcgcattaatgcttgatcccacagctacgtactaagccttctccattgtcaagcacgatttgaaatcaataaattaaaccaacacttcatgacatcaacaatgatgataccttccatgcctaatgcaggtatatataccttcatatgacatgtgcaatatggacattcacaatatggtagagtttcctgagaactcaaaaacgaaacataggcgtacgtcaatgccttcttattctgggaaggacactacttccctactagcagaccgcacacctgttgttgagcaactagcaagctactaggtttcccattatataggtttatcaaaattataattaaaggatttaaagcaggatataccctggtaggaagaacaataactaaattcatacaaagggaatcttatcaccagaaaaatataactttggatatccgcttgtggaggcatcactgtgcccgcacaatcctctgaggttttcaattttgggatgaaaacagagcgatactgatggataatgcccttaccatattcggtttcatatgtggctaaaaatatgacaacaaatagcagatgtaagtctcgatccatcacgagctatactcccataacctcaagtaacacttgcacatgaaaaacaaagcaactctatatccaggtaaaaattttggaccaacttgattcatttcagcacacaatagtatcgcacgcggatagaaaaccatttagaagtcatctacatgaagcaatctagaaaatccatgaaaacaacccaaaaccgactccctcccggattctgccggtctaaccgtcgggttacccgatcagaccgcctgaacacctctggtctgactggcgctcactgtttagtccgaccggcctagtactaaccatattgttcaccgacagaaaaatactattcactgtattttcaacaaacactcaccttcactactggagaaaccatctttgtccggttggccaaaaaccacaatagttctggttgtaataaaaaccgggacgaaagatggtctttagtcccggttcacatgctgttaggggcagtcaggcccctccggtatctttagtcctggttggagtttccatccagcattaaagtttggacctttagtcccggtttgtgttatcaaccaggacataagacccagttggtaacataaaccgagactaaaattcgatgtaccatatataatccctaggacttatcctcccaaactcctcatctcctattcttactctctctttatctttttctttgccttatcctctccttcttcagatggagcttatcctctcctcatctttctttgctgcagatcgagcgagccagcggagggccgcggcggccagcgcccggcggtggcacgcggcgacggccggcggggccatcgcacgaggagggaagcaccggggagacggcagtgggcgggcgccagccgccgaggtggcgggcagcggtgctccctaggcggtggtggaaccataggcgtctaggcgggaggctggcgagttgtggcggacggccagcgcccgatctgtaaaatttgtgatgtggattttttttctgatctgtgcaatgtgtgtggccgatctgttcgacgcgaattcttttctgatctgtgcgatgtgtgatatgtggatgtatttggggatataaagaaaatacagcttgatgtatttcgggattttgtgaatgatttgtggtgttcgaatgatttgtggataattttatgaatgatttgtgttgctcgaaatcatgcaagcaggaaaaaaaagaaaaaaaatcattacttccagttggtaacttcaaccggaacttaatctttagtcctggttatttcaaccgagattaaagatgggcatgtttagtcccagattcgtagtcccggttgcataaccgagactacagggggttgcgaactgggattaaaaagggttaatttctctaccagtgctttgacaattgttcatcaccaagattaggcatcacatgattctacaataaatcttcctatggtttagaaccgtgatggtgaatgaactagcataatccgtatgaatatttaaaatatgaaaactattctataaaagggttctctagaaataagcttacttcctctaaccctatcaataaaagaagccagtgacctttttacttaaaatcttcaggtaagcttcaaaaaattatactatatagtatctcgggcacatgatacatgcgttcggtatcgtggtgccaaattaaggaccaactaatgcgtcctatgtgtttcgacaggacatgttggagatgaatcgccaatattcaatgcactgtagcagcaatatcaattcatttcgtcgcaatctagcttgtatcatatatttgaatgtattatatatctacagaaatatactttctctgtttcacaatgtaagtcattctagcattttccacattcatattgatgttaatgaatctggacatatatatctatctagatttattaacatcaatataaatgtggaaaatgatagaatgacttatatcgtgaaacggatggaggacattgtatggtgctcaggggagctgttatatataccaccttgggagattccagactacatcttgacgccgtgttctgaaaattcgaaagttaattaaatagcagatgtacgttcaccagaaaaattgaattttacattcaagacagatatcaagatacaaaacatttcaagtaattgtacatctacttcaattcaaattctctttacatcagcatccacaatgaatttgaaattgattttttttaatgtttacataactttgcgtgtaaaacatcgattggtttatgtgaaatttttgaaaaatgtcgccatccccgtgctcgaaaaatacacccaagcagacatccattggttccatctgcctaattcatcaaacaagagttgaagcatggcaattgttcaacaaaaccctctttcattcaggagataatatggcggagatgtaccatcgtggttaggcacacaatacctgagccgctgagccctgtgggtgtcattaccagttgctgcagctgtacaccttgctctgccactacggtaaagttatactcttcgaggcacaagggagccaaagtgcttagctttctcgtgtatctttccttccttcaaaccagatgttgtatatcactgtctcccaaggttcgcacacaagagttctcaccctccaggatgggcatactaaaattccacatgcctttcaaacctataatatacctctgtttatcacttgcaagatagagagtggaatttgaattcatattgtggcatacatataatttctgaagaactccatatgcaaaccatccttgtggcaagcaagcaccctgcaactgagagtctgtcgaatggctccccggtagcaacattgcatttatcgtccccagtgaagcctcacttatataagatgggaattctttcctgaacttttgtagttggccattaattttgttgttaggttcgcatatgctactgcgtccattacttcgaaaggtctgagaggcgtcaggcttgcatgcacgctgtgatcggaatggtcatgttcacccaactgtcatctatctatctatctatctattatctatctattattatatactaaaaatctatgaaacttcctacaaacgctcctacgctgccatgtggcactcctagaaatactcctagaccgccatgtgtcattctacaatcctaccgtcgattttcacttaaattggtagacccattattttagaccgttagattatatgcattgttttgtacttcctacatatactaagagaatcagattaccagaaattaagtacgaacgtacaaagatatacctatcggtactgttcgtttgaaaaaaaaaacaactaacgtacgtatacgatgaaaaaaagctatcaagaaaaaaaaaacattgagatattaccattcacgtgaataaaaaaggaacatgcacatgtatgc

SEQ ID NO: 29125 - DNA, 16556 bp, Oryza sativa
gacttctcttcatgcacaatttgacggctggcttggatagtggcctcaatgtccttacgttctcgccgttcagctatgcttaacttggctttctccaggttgaattggtgttgctcaaggtaaacggctggagtaaggatatcggctaactcatctaggattaaagcctgaatctcgggtagctgagccctgattgagccacagtcaaccactaagttgtctagcgatgatgcttctagccgatctaaaatgcttccttgagttttcttcacatcatcagataaaggagccaaggctttgcttgtggtatcttcttctccttcatcaagatagtctctgatgtcaaaagagaaaagatcggctaatacctgcagtgacaatttagaagcagattagaggttaaacgattatagccgatttgaatgcttcttatgataaaagaaacttactgggatagcaggagcagctggttgttcttcttcctcgatgtgatgacttcccgcagctaaaggggtatgatcacttgatgattgttgaacaggaggagaaggaggaggtgaaggctgaaaggaaacaagtgtcagatagaatcggctaaaaattaactaatgaaagttaaaactatcttactggtggagctggtttagatgttgttgcagccgatttcttcttcaccgcagtcttctttttctacaattataagacttggtaatgatcggctataagacaaaataatcacgaaagggattaaagagagacacttacccttgagaagtgaacaagagcagaagtgtcacgcccggaatttctatccaaaattccaaacgcttacatgtgtgtgaaccctcgtccaggaatcagccgaggcacacaataacaaattgataatacagtacaaatattactctaattaataagcgaataaaatgtcattacagaggtagatagttcctctcaatcaataaagttctaagcagcggaaattaaataaacggcgcagacggctccactccacaggcagcttgaccaaggctacacctaatcctccacaccatcagcctcattgtagaactcttcctctgatgaatgattgcaaggtgagtatatgacatactcagcaagccacgcagcaaatatgcaagtgcacaggataacaaaggatggcataatagggttccatttgcaaaagcagcatttagcaaacatttgagaatttaacaaaacagttaagtaataattaaacaatattaatccaacgctatacaacataccctgttgtataggcccaaccattctgaacaaccaccccggctgcacagttctatctccaaaccaggaatgtaccattccaaaccaggagctaatcaaattattaccagttatagcatctcttacaatgatgagaggtgtgagactaatcacgaaagacattgttagacccgcccataaccgcgggcacggctattcgaatagttttactctggccagaggtgtaccactgtacccacaagacacaaccccacatcatgtcaccatgtgcctcaataccaccacggtatctcggaaaggagttgtgacaatacccctcgcataacacaatccactgcagcgcaccttcctggatcataatcacccccttataaacaaggcatggactccccagcgacccccgtgggcttatctccgccacttctcagtctggtgccccgcaatgaaccatgctatacaaaagataaagccgttgcccatgctggcttgtggttggcacgataaatgtttcacaaccgaaactcgtgaaccggtccttaattgtcatgagcacgaccatcaaaaccatgtgctcacaacccaccattaccaggttttagttggcacattaattaattaactaatcacgattgaccatcgtgaactatcaataagccatcatgaaataatagtgagtcattagttatcccataagtgtactaaagtttctaagcagggctaagcaattatatctaatatctagttgaaccaatataaataaaactcaactagtcaaattaatataacccaaggtatcaaggaatatggtaatcaagtacgaaagggccataacaaagaataggtcaattccacccaatgacattcaaaaatagatgcaatagttgaatagaaacaatagctttaaataggatcaacatgctcaaagggttgtttgggatctgtgtgacttgccttgctggccttggaattcttcaaactcttcttctgcgaaaacggactctccggaaacgacggaatctaagcagaaaagagcaaaatcaccaaaacagcacataaacaagcatgaacagtacatgtggatatttttaatgtgtagatctcaattttagaaaaatttagagacttgaaccaactaaatcggagctaagatgaattagttatgaatttttaaagattaaatcggattaaaacacttaaatcggttaaaattgaattatgacgcaataatgaattatttttgaaaaggaaaaggggatttattgcgtcagcggctagggtttgggtggaccggcgcatgggcggcggttcacatgaacggacggccgagattgatccgatccaaatcggatggccgagatcgatcggtccacgaccggctcacgggagaggatcccgatgacgtcaacgatgacatcaccgacgacggcggcggctcggcgaagaagacggctcaggcggcggacactcgccggcgaacggcggcaccacggcaccaacggagggcaccagcacgtagaggacaacgcggcgaacacaccggtgaccaaaacggcggcggaaaaggaacggacgacgacggcgacgagaaggaagcggcggctaccttcgggttgtcgacggcgacgaagctccggcgggttccgacggctgcgaaggggcggacgaggacggcggcgacttggcgatgacgacggcggtcttcccgagcggcggcgacagctgaagcgacggcggagcacggctgaagcggcggcggcgacggcgaagctagggcacacggcgctagagctcttccggcgacgagaggtgaaggcgagggtggcggcgagaagagaagagcacggggatcctttaaaaggggctcggaggcggcggcgaaggcccacggcgacggcaacggcgaaggaaactcgcggcttggagagagggaaaaccgatccgaatcgaactcgtctccgacgctttccaaagcgatttaaccaaagattccaaaggagaaaaggtagaggagatcccggagatcatttcccctctaacaaatcgaccggagaaggaaaggaacggccggatttggaaaggaaacggcggcggcgcgaaactagggtttcgggcggcggcggccgaaggttgacgacgactgacaggtgggccccacctgtcagcgaccgaacgcgcgcgcgcggctgcggactgggccggctgggccgaggagagagagaacggttttgggccgactttcggcccaaagccaaaagaagactttttaaaacctttttcaatttaaattatttcttaaatgcaattccatttattaaaaatacttccttagctcaaataaatcccagaaaaatctaggaattatagaattaagcaaagtatttaatgaaattttatctggccccattttatattggaatttattaattaaaattagatcttcttctcaagactttttaaaattatttctaaaaattccatttaaacaacaatttatatattttgaattttcagggtgtgacaagaaggagttggaggggtttgcttaggcgaagccgatggtgttcttttagtatcacttaccttggctgcggcctgatcaacctcgtcttcaattacctcttcatccagagcttgttcgatggatggatctagggtaggcagatcatcagttggcttggttttctttgtcttcttcttcttaattggggatacgatgcttacagccgagatctggttttcctctttttgccggcatcggctgattctctgacgagcccttgaagaagagctaaggtcttgggggcatcatagccgataaccggaggagatagcccacctccgttaggaattaaacctggggcatattggatgtctttgccactgttgctttgatgaggaggggaagattctgttatctgcaaatcaaaaggacgattagttgagattaattggccaaacagctatttaactaaaattgagcaaagttgaagacttacttgacggacaacatctagaaagaggtctgtcatgtacattgaagctggttggtggaataaatgcagtttccattcaccctgccacctgtcaaagcttttgcttctgaatgttgccagttctatgttgttaatactgcccagagggggtccttgaaggctaagtagccgatccatcatcagggttgatgaaatccctcctcggcattggatcttgtcagcgaagaataagccgattgggagttggcccattccgagttgtctagctgagctcattggatgatagaattcataagaagcttggatgtttcttccttgatgaatgccaacaggaaggatgcatgggctgattgcagccgagaagatttccctggatgattggtatacttcatggttgatgtctttgaatctgaagtccactgggtgttcaagttgtgcagagtcttcataaaggaaccagactctagcatctttttgaaagctttcatagaagctacaaaaccaatccttgagcagttcagccgatagttttgctccggcatcagttggtgtagaagcgtattctccgtatgatgtgcatctccgatgagtacgctcttctccatcatcccctacaatcggctctagtcttgggaactcagcttctgatacggatggccgattgacaaccttcatgactatcaggtttaaccaggtttgtagcagccaccagggtccacctgctccaactactgagccgactgttatcttagccgatgcattgctcaacatctggtatagatagccgaggagaattttgcccaaggggaattgtctctttatttctagagcttcagccagaaattgccagttagttgtggggccgcaacttgatccacagaaaagaaatttttctagccacattaatagaaaggccacatgttctcgaggggtgaccgagccctggcccatgtatgctgctacatagcctgaccaacctcctatgcttttggttttgaagtcatattggttctttgtgttcaaactcatagggttggccgatgaggtgacatccagacctatgatcatactgatatctatgaaggttggagtcatcggcccttgattgaatagaaaggcgttagtagtgtttgaccagaagcaagaagcggctgccattaggggttcatctttggctgagtttgctatagtaaggtcaagtgtttggccgattccaatttcatcctagtgaaccttcttgctagctgatacacgtttgaaccatgtggtccagctcttttctggtggaactttctctagagatggccaagacttgaaagtattcttccagtgatctagatctgggttggttaatctaaaggggattctattggtttcaccaacaataaactcggtggggtcaggattgccgattgggccgagaaaatagtggttttcatgcgtcagactgggaattgcgacttggtgagaaagatgctacaaattcgaagcaaccaaaagaaggaaagcgatatgagataagagaagatcgatctgctgctaaagaaggggatttagccgatgagaacttacctcagcgtattcggccgatggtgcaccagatgggctggcagaagatgacattggtgcgggcggagatctcgtcggggaggaaatcgcctaggaatcgcctttgcgccagaggaatcgccgaagaagagagagagaaaacggaagtcacggcgtgagatttctcgggggtaagggttagtatttaaagtgctggaataatggtcaaaagcggcagagtgcgaaactcgctcggagtcggcatacggcaaatccggaacattatcgaatatcccggacttggggggcatgtgttaacaagcaaatttggtaacatctgtgttaggaaggaggatttaatcaaagcggagtcggaggcggagatcgagttcggaagcagagcaggaatcggctggaatcaagatcggctacggttaggatcggttgtatctgagtcgggctaaataagccgatatagccgattctgacaatacaacttgtacgcgacatcgggttcaagttaatgtatttcaagatgattgccacgcacggagagagtcttgggaaggcaattgtatctattaattaggatatcttatgtaaattccttatagataaatgtgggcaaaagtctgccgcaaagacttatagtatcttagagtttgttagagataatgatcatgtccggtatgggcatatcatgtaattctcgggtataaatagaccctgagccctatgtaattttaacacacacgttcaatacaatctcggcgcatcgccacccttttttgctttagttttgtttcgactagttgttgctttcgggttgagctgcatcgatttcgatcttcagcaagaggtaaaattcattatgatagattgcgttcttaggattagtacttccatctttatgatactctaatcttgtgtatgtaattcgtcgagttatcatatatcttacataatctctagcaatatcatcatgtaacctactgtcgtctaacatctgttgatagagggcagccgattaggttaaatctcgtcgttgatctagattatataagatatctaccattctatgaaacttctagcgacttgattgtctagatatcgttcttcttttcatacttaatgctgcttcagttgagtttgatctattaagtcgtgcttagaacatcgatctctagcctgccttctagttgccgattagaatagcatcggagtttcagccgatcgtatgtgatttaactatatttattctatatgtttcattgatatgttaaatctgcactttatatcaagatattgccgtatctaaatatattaagcctttgtttgatatattatacctactttaatatcctgatatagagttgtatcggagtattagccgatacatgctagatctatctgatcggctatgctataaacatatatagtcttgttattaacatatattttgatctaagtgatttatactttctcggcatgatgaccgatctatcccaatcacttgatttaagtatacgtcgatataaggagtatatattgttaatatctacagccaatcgagtagatttagttcttccttatttattcatgactgccgatcggtacacagatgacatcggcccaaagataaatgatatgtcatcggcatttagccgatcggctatcatttatagatttaaccacggtttctttgcttctatttcttgttgattacaggatcaaatcaactggcacgctaatacatccgaaggcgagctttcgacctgcactggagttaagcagatctcccaggccacgtgttttctgtcaacagatggtacacatatttattaattctaatttagtacttacttatttaagagaataaaaaccaaagagtttattagcagtaaaaactgttacaacgtaaggtcatgataacatatcaaatagatcacaaacattttttactgacggaatacctgagtggattgcaagctaggaacactgcatggattaattgtattccctccgtcccaaaataaatcaacttatagagtttaaactttgtcccaaaataaatcaacttctacctttttcatccaccctagtgctttggtttcgtcttcgacttctttggatgttggtgcttcttcatcgaagtcttctgttcttgctttatttaatgccatgtccgatgataaactcgaacagttcgaggaggaggatttggttttgttatctaacaaattttctcgagctatgaaaaatgttaggaacaggaaaagaggagaaccgaattgttgttttgagtgtggagcacttgatcatcttcgctcacattgtcctaagcttgggagaggcaagaaggaagatgatgggagagtcaaagaggatgacgtgaataagaagaagaacacaaaggagaagaagaaacattgcatgcagtggttaatccaagaaatcataaaagcttttgatgaatcggaagatgaagatgagagcaaaggtaagcaaattgttgatatagcttttattgctcgtaatgcaaattctgatgttgatgaatctgatgatgataatgaagaaaagcttagttatgatcaattagaatatgctgcctacaaatttgctaagaaacttcaaacatgttctattgtgcttgatgagaaggatcatactattgagattcttaatgctgaaattgctagattaaaatctttgattcctaatgatgataattgtcaatcttgtgaagttttattttctgaaattaatgctttgcaagatgtcaattctgttaattgcaagaaattggaatctgagattgaaaaatctaaaaaattggagtcttcttttgctcttggatttgctttacatgctcatgttgttgatgaattgattttgacaaagaatattttgaaaaaatacaaagttgctttttgtacaagttctttgttcaatgtttcatgtgcaaaaagggctaaataaaatgagggtgttttgatttctcaagattgttcaaagtgtgttttgaatgagttgaagttgaaagatgctttagagcgtgttaaacacatggaagagattgttaaacaagataaggtgttttcttgctcaacttgtagaaaacaaaaaggtcttttggatgcttgcaaaaattgtgctattcttactcaggaggtttcttatttgaaaagttctttgcaaagattttctgatggtaaaaagaacctcaacatgattcttgatcaatgcaaggttagcatacataatcgtggtttaggttttgattcttatgcttatcatactagacatcctcctactattttgggtgttgctaggagagatgaaattttgattgaaactgagcctaagaacactatgtttaaatctgctggcatcatgtcttctttgaatgcatcttcttcgaaatcaaatgttgtgaatgcaaaaacttctattgatgcaaaaccatcaatttcaaaaccatctacttcacaaactagtcgtgagaagtacacttgttcttttttggaaaagacggacatttggttggtttttgttttagacttgcccataaacagaaaaaagaaagagaaatagcttttgcaaaacgacgttggcaaaaatcgggttttaattcgaggatcacggttagaccgacactgaccagtcggtcagaccggctagcggtcagaccgcagttgaaccggcggtcagaccggttgccaggcccagtcagaccgcaggtacagaggcggtcagacctgtttcagggcaattttgcgcgtaattcaaatcggacttttgtgaagcgaaaaggtaatttttcaggtaagtctgattctgattttgtcagtgcttttgtatcacaccctaaaaatcccaaatatataaattgttgtttaattggaattattagaaaagattttaaaagcctagaagaaagggtctaattataaataataaattccaatataaaagtggaccagataaaattttattaaatactttgcttaattctataattcctagattttttttctaggacttatttgagctaaggaagtatttttaataaatggaattgcatttaatgaataatttaaattgaaaaaggtttttaaaatcctcttttggctttgggccgaaagtcggcccaaaaccttctctctctctccccggcccaagccggcccagtccgcccgcagccgccgcgtgcgagcgccctcggacgctgacaggtggggcctgcctgtcaggtcgtcgtctacctccggccgcccgccgcccgagccctagcgctgcgccgccgccatctccttccaaatccggccgcccctttccgtttccgatgaaattaatagaggggaaatgatccccgggatcccctctatcttttctcttatggaatcgtcggctattttcgtttggaaatccgtggattcgatctcgaatctgattcgtctctctccccgaaccctagaccttccttcgccgtcgtcgtcgccatgggcctccgacgccgcctcctagccgctataaattgacccccaagcccgccgctacccgccgccaccctcgccttcgcctctcgtcgcccgtagagccctagccccgtgcagcctagcatcgccgtcgccgccgtcgctctagccgtgcgccgccgttgcttcggtcgtcgccatcgctcggggaggtcaccatcgtggtcgccaagtcgtcgcagtcctcgtccgcccctccgccgtcgctgtcgaccgccggaacaccgtcgccgtcgtcaagccgaagagcgccgccgcttcttcctcgtcgccgacgtcatccggtcaccgtccgtcaccggttaggtcatcggtgagttcgccgcgtcgcccgcatcatttcggtgctctccgttcgcgccgccgcgccgtcgttcgccggcgggcatgtgtgcccgagtcgtcgccggtgatgacgtcaccgctgacgtcatcgtcgtcgttccccgtggcccggtcatggatcgatggatcttggccgtccgttttggatggatcaatctcggtcgtccaatcttgtgaaccgccgccgcgcacccggtccaccgtaaaccgacccgctgacgcaataaatccctttttcctttcaaaaataattcattattgcgtcataatttaattaaaatccatataagtgttttaatccgatttaatctttaaaaattcataactaattcatcttagctcagatttagttggttcaagtctctaaatttttctaaaattgagatctacatgttaaaaatatccacatgtactgttcatgcttgtttatgtgatgttttggtgattttgctcttttttctttagattccgacgtttccggagagtctgagtttgcaggagaagattttgaagagttccaaggccagcaaggcaagtcacacagatcccaaacaacccttttagcatgttgatcccgtttaaagctattgtttctattcaactattgcatttattttcgaatgtcattgggtggaattaacctattgtttgttatagcccttttgttcttgattactttattacttgataccttgggttattataacttgactagttgagctttatatattggttcagctagatattagatatgattgcttagccatgcttagaaacattagcacactattgggataacttattactcactattatttaatgatggcttaatgatagctcatgatggctaatcatgattggttaattaattaatttgccaactaaaacctgataatggtgggttgtgagcacatggttttgatggtcgtgctcatgacaattaaggaccggttcacgagtttcggttgtgaaacattaaccgtgccaaccacaagccagcgtgggcaacggctttaccttttgtatagcatggttcattgcggggcaccaaactgagaagtggcggagataagcccacgggggtcgctggggagtccatgccttgttttataagggggtgattatgatccaggaacagtgcgctgtggcggattgtgttgtgagaggggtactgtcacagatcctttccgaggtaccgtggtggtattgaggcgcatggtgacatgtcatggggctgtgtcatgtgggtacagtggtacatctctagccagagtaaaactattcaaatagccgtgcccgcggttattggcgggtctaacaatgtctttcgtgattagtctcacaattctcatcataataaaagatgctataaccagtaataatttgattagctcctggtttggaatagttaattcctggtttggagatagaactgtgcagccgggatggttgttcagaatggttgggcctatgcaacagggtatgttgtatagcgttggattaatattgtttaattattacttaactgttttattaaattctgaaatgtttattaaatgctgtttatgcaaatgaaaccctactatgctatcctttgttatcctgtgcacttgcatatttgatgcgtgacttgctgagtatgtcatatactctccttgcaatcattcatcagaggaggagttctacagtgatgctgatggtgtggaggattaggtgtagccctggtcaagctgcctgtggagtggagtcgtctgcgccgtttatttttttttctgctgcttagatctttattgatcgagaggaactatctacctctgtaatgacattttattcgcttattaattagagtaataattatactctattatcaatttgttattgtgtgcctcggctgattcctggacgagggttcacacacatgtaagcgtttggaattttggatagaaattccgggcgtgacattttgtacctactggttctactggtcgtgtgactcagtgttggattccaaaatttcttatttctaaccccaacatggaggcctcgacatcttctcgttcgtatatattttggcagcatactccccatgagcgttcaattttaagatgacgattgcttttcaaggtaacatcaatttacatttggattgacatatattttgttctactttcttaattattagcttttcatatgctagtgtttgaggtagtagtttttgttaatactagtggatacatatcaattcatgagaactttggtgatatcattggcaattggatgtctttttcaaaatctttgatttcttcttgatttttgtttggggagaattggaggttaatttgagggggagtttgtactttttcatgcattcatgtttatttttatgcattgtttctaaatctgaaaataaataaaaataagaaaaagaagagctttgttttatacctttaatatattcttgtgcatgctagcaaaataattgaggtatatttgttgctattttagcttgtatgcattttagtctttatatggggcttagatattgcttttaagtgagatgatgcatgacactaattcttttacttgaattaagaaaatatgcaatattgatgctagcatatggtttgatttataaatgcttatgtatatgctttgtaattgctcattgtgaaaagagaataaaaatgtgaaaaaaatgactaccgaatccttggaaacagtctttacgacaaggacgtattcgatgtgagcaaaaaaagggtgccgaatccctggaaacagtcttgacgacagggacgtacccggaataaaagaaacaaatatgagcaaaaaggctcaagaaaaagtaaaaaaattatcttgattgttttgtgctaaagctaatttgagaaagagtgataaatgcaataggtatatatgtatagtgtttatttttcaacctatgtgcttgtgaatatattgcattataaatcatttgaaatcatgaattcttattgttgatttgagcttaatcgtaatatttttgattcatgtttatactatgaagcatgcttgttaactagttgatgaatttatctaacttatattgcaaaacatgatcttgaattgcttttggtacatttcaaagctctcgaaaaaaattgagaaaatataaaaaataaaaaatggttattccaagtgcaatcatgacatcattgcatttgtactttattgttattttttctcttttacattcttgatgaaatcattgtcaaagggggagaaatatacaaaatgcatacttcttgaaagggggagaattgaactttgtttcgattttaaaaaatagtcgattttgtgctttgattgcaaattgatgggagaaattctttcttttaaaaagggggagagattttctttttcattttgtgatttttgtttttatttttcaaaaacacaaatttgcattttggagatattgccaatgtgttcatcaaggggaagattgtgaaatcattgtcatgattaatatttgtgatgaacaattggctgtgcaaaatgatttaatcaacgaattggtttgaaaagacgtgtggatgttggtgtgagtgcgtgtgactaatgtgggtcaggttgtaatatctgtgtccagaaacggttgttttgtctgattgtgtgcaggtgacttgaggtcagccttggtcaatggtgaggaccgggactatgctcaggaaggagcagaggtctagtgcggtcgggataccatgtgagaaggtgactagagttatgattcttggaggtcaacttcggtcaacggtagggatcgggactaaactcagggaggagttgaggtccaaacggtcatggataccaggtgacgaagttgaatacgagatggcacacggtggatggataccgtgtgggagagatcttcgcaacgggcttcacgaggtgtgcgtgcaagcgtcggtgttcacgaggaggaacgagagaagatagagatgttcatgtacggtggagtacatggttgctacagtactcgatgtactgtagcgtgtagtttgcatgtacgtgatgtacatgtgtgcaggtagcatgcatgtgtgcatggtgtatgcatgccgtgacttggactgggaggagcagcagcggctcggttggatggcaggccgagaccgagctggcgaaggatcggtacgaaggagtccgaccccgagcaggaaatggcaggcgcacgggttggttgctgctgtgtgttttggaaattttggattgagtcccattagaaataggagttctacacctactttaattatgggttttttttataaatagagagagagagcgtgaggtttccggtatcgcttttcagagcgtggagttgatagtttagttagggtttcgagattagtcgagatttttgtaaggagtgctgttgttgcactttgtaaacacagagagaagaaataaagttgtcatctactttgagagttattcgatttgtgtttcatcggattcggcggtctaaccggtgacataccgacggttcaaccggcgacaagacggcggttagactggcggcatacgagcaatccgaccggcggcgacaggactacgtcgagatttccatcgatttgagggtaacttttatttccgctaaaagtttttgggtttttcgttttccctaccattcaccccccttctggtaggtttggttgcttgtgttcgatcctacaagcatgacacaaaaagatgatgggcttctaatggcccatgccgttgatcattaaatcagcagatgtcattaaagatcaatggtaatgatggaataattttctaaataaatcgtcagatctttctagttaacgtgagagctttctcaaagttcagggtccaagaagaaagttgatgatgatctccccccttattgacgaatcaagtcatggagaaagaaatcgatgaagctgttgctaccatgagtgaagaagaacaagccgataaaaaacatgcagcaaccgatcaagatgaagctatcaacattgatgaagacagtgaatctgatgaccaacatccattgcctccacgcaagcgtagagtaactcgcaagaaaccacaccaattgcctcagcaagattttctgatctcatcaatttcaactttccaaccagaactgcttagccgataacaatttttatacttgtgagcaatcctctgataagcaatcctgaattcttcgatgagcgaatcaataatcatgccactttttgttatcttgaaaccgtaggaaaacgtgtccattagcttgaacccctctccctccccaagctatggactgggcatctcctcgaagaagtccaaggaacactgagcatattggaggcccttcgatcaggacccctctaaaggggaaaagactagccaaagcgcaacctctagagaggactgagaagaagggcacaaagctgtgcattgtagagtcggatgaagatgaatatccttcacctggtgcaaagcctgcccaagagccgagcgccgatgcagcccaagattcgaaaagaactcaaacggcacccagactgaacagggcaatcccaaagtttagggcctcatctaggtaatcaaaacaaaacttggcttcctgacctatcaaattgttcaaatgctggtgaatgatgtcaatgatgactactcgtgattaatccttattgaagatgtcatttacataggattctatccatgtgacaactttttgcaggaaaccacaaggcattgatccttctagcaagcctaaacctttctgggaaaactagttggaaaccactagggaatcgactgctgatgaagagccctcgactggttgccagtcaggttcgaccggcga

SEQ ID NO: 29126 - DNA, 11864 bp, Oryza sativa
tcaagtgcaggtccttctgcagatagtgcggagaaagtaaaagggcctccccaaaagaagccgacaacaataacaggtaaaagacctcacgaaccgtatcttggtcaaattattctgcttgcccattgactaattccaagcgcaaatcctataatcattgaagatgaagagaagatcctaaggataaagtctgttgaatattctctaccatcggtgaagctctcctggcgtgatgctaacgggatcacacatggtgtcatcctcaacaagcagaaggaggaagatcgccattgttggtgaagagcctaaatgactccaccaggatgttgaatgtaagctttaatcttctttgtcttctgaaatagtccttgtatgaaaactcatagaaattcttatcctaatgaagagaatatggcgtcaatctcaagccatatccaaaaccctagaaaagcgggtggcgcacttggacactctggaagatgttcaaaaacaactaaaggatgccaaggatgcaactaaagctcgagaggcctagttgttgacagaaataaacaacttgagagatgccaacttggagcttcatggaacactcggaggtaagtgtaatgccctagaaaagaataatatcgtagaagatattttggaagtccatatgtatttggtgtttgaaaaatagaagaaaaaccttaggtatactctagttgggctagcttctggctagcccaaggcccagttgccctccgcattcccaaaaccctacgtaggggacctcctagggttttggggaaaggtgaagaaagaagaggtgtttttatgttgccgctgctcatcgtgacctaggtatgaaaccaacgatcttttccccctattttggttttcttttagggtctagatcaagtgttgtaagcgagtaagttaggatgaatcaatttattcctcaaccaggtttttgctaatctgcgcctacgcattactatctcggctaccttttcggccaacataataggatttcctacgaaaagtctatacaaaagttgtagataacgtgtagatctatcttctgatcaaatggcatgattttatctagagaggtatcaatttttgaagttggctgtctaaataatcatgcattttttgtagtcgagattcagagggattttagagggtcttaatgatggaatcagagaatcttgtatttacaaaaattgtagcatgttgtgatctacctcctatataaaaattgttagcatctatcttgtagtttaggcttcagtggctaggtttcttgtgaactgggggatccgcttgggagctatggttttagtgatgaatttttctgttttgttcttccatttgatgtaatggtgatgcaaacgattttatttgaattttaggtttgatatgtggaaatgggatgattagatttgaatttcgtttttgattcatggaaatgggcagttgaatgcatgtggtattcttttttgttgccaaaatccatctacactggcaatcgccttaactcgctacttgcaaaaattggatttccgcaaatgatcagttaaacctagctgcttgcaaaaacaattttcgctggcggctggattaggttgcccgccagtgaaaatggtttttccctagaggctggtggccggcattgaaaatagtgtagtttcaccggccattggttgatggcggcggtgctggccatcatagaaaacccaaactagccgtcaggaaaaatcaattctgcagtagttggatctggtagatgtggccctcggcgatgacggtggtggtgtcacgggccatagtcaaagaactcgtgcggggtgtggagtaacacatacatccattttcgtagtgagtaaaataaatctattcgaatagtcgtgctcacacttgtactactctttttatagataatggaattgaatttcggcttttgctttaagaaagctataatcacataatacaaaaatccgctcaacagagagcacttgtactactctttactagccttagaagttttaatcttgcttaaaataggttttgggaagaacatgtgaccagactcggtatgcaggaaggttcgaattggttaaaaggtgaattggacacgagggtaaactaaaccggataattaatgttgctttcagttaaaactgtcaagttataggtttatcaaatgatttaaaaaactagctttgtacaaataaccaagttatccttagatccctatgtgcactcatgcatcttgtagtggtggcttgttgagtactccatccgtcataaaatataaaatataagaatctagaattggatgaaacattttctagtactacaaatatgaacaggctacttgtctagattcatagtattagaaaatgttacatctagttctaagtttttatattttgagatgaatggagtactatgatactcactctttcctatttaactcttttagaggaaggtgttagagacaaccgtgaacgtgtcacatggaatatatgtaccatcttctgatttagtaactgcaacaagctaatataccggtcatcattatgttgtcatgttgcagctagcgcaagtattccctcttataggatcgaacacaagtaaccaagcctaccagaggggggtgaatgataggaaaaaccaaaaaaccaaaacttttagcggaaataaaagttaccctcaacgtagtcctgtcgccgccggtcggaccgctcgcacgccgccggtcggaccgtctccctgccgcctgaacccgaaaaaacacaaatcgaagaactctcaaagtagataacaactttattgcttctatttatgtttacaaagtgtaacaacagcactccttacaaaaatctcgactaaactcgaaaccctaactaaactatcaactcaattgctctcaaagcgataccaggaggcctcacgctccctctctatttataaaaaaaaaacccatactcaaagtaggtgtataactcctattcataataggactcaattccacgttaccaaaatcatacgagccagaatcctatccccatccatatcggactctgcatttgatctccagcccacgtaggcccctgtctccagctcggtctccagccaactgccaccgagccgctctctgctgcctgggccgactcggcttgccagccaaccgaagcctccagcccaaccaactagctgcacctgcgcatgtcctgcatgctacacaagcatacaccacgatacagtatacacacatatatgcatgctacagtatcatatgtactgtagcaccatatactcctcactaatttccttcaaccaatttccttcgcgaacaccgacgcttgcacgcacacctcgtgaagaccgttacgaagatctctcccccacgatgtccatccactgtatgccatctcgtatccaacttcctcactcggtatccttgaccgtctggacctcaactcctccctgagcctagtcccgatccccaccgttaaccgaagttgacctccaagaatcctgactctagtcacctgctcacatggtatcccgaccgcactagacctctgctccaccctgagcatagacccggttctcaccattgaccaaggctgacctcaagtcacctgcacacaatcagataaaacaaccgtttctgggcacagatatcacaacctgacccacattagtcacacgcactcacaccaacattcacacaaactctcaaaccaattctttgattaaatcatttgcatagccaattgttcatcataaatattaatcataacaatgatttcacacctttgctttcaatactcgtagttattattcacctttttaactttaaccattcgtcttttccacataaaaattatatgtatactgacatattatggatcaatcatttaaaaggtattaatgattagagttaaaacactaatggtcagcaatgacaagtactcccttcatagcacatcccagtactattaatgagacataaccctcctaattcatagtaaaagaatgtgcatccaattaaaattgcttatattttgggattatggacagatttctaaagaacagtactactccctccatcattcataaatttatattttggggctagccggcatggcaccaaggcgggggggcagggggggtggtagtcacgcggccgcgcatgcacgtatacaaagtttacgtaaacccaaaatatacacgtatacaaacttacgtacatacgtataaaaacccaaaatatacacgtatataaagtttatatacgcgtatataaagtttgaatacacgtatacaaagtttgtatatacaaagtttatatatgcgtatacaaagtttatatacgtatatataaaatttgtatgtatacagagttttataattacatattaaaaaagcgaaactaaaaagatacggaaagacgaaacataaaaaaaaaaggaaaacgtaaaccgcaaaaataaatacggaaagaaaaaacaaaaaagataccgagagcgccgggaagaaaaaaagaaagcgccaaaaaaaaaccgcgccatccgccgccctcctctccccacgcgacatctgtccagtcgcgcacacgggccggccagtcgcgaattagccttctcgccaaggctgacgctcttcatcctcctgctcatggaagttccatggcacgctcctagggagcgacatccagtgatggtaggggctgtacagatcgattgtcgacttcaccgttcgctagtcgcttcgcaaaaaacaagccatatccggctgtagagcccggcctactcacagacaacgccagcactcgccgccacgcccctcagcaccgggatccatgcatggcaccctcagcatccccgaccatgcatgtacgcgcaactgctgcatagattcaagatgaaggatgaggcacatctattctcctgagtcctgatgccggtgctcgtttccgggattgtcctcctagcctgagccgcctccatccctgtggccgctgccgtaggcctgccatcgaggcgagcgtttgggaaaacattgtaacttaattatcaatttgacaccggcgatgccgacgggtagagccggataccgatccgccaccaagtctcgcaacttaattatcaccgcctcacggcttggatctcgtcgcacgttgcctactgcggatcccgccgcgaacacgacgatcacgacggcgtggtggtgaggtgccggtagggcattctacggctgggtgctgggtggatggatccaaaaatttcgggaattggaggtttgaatggttatgggcttattgctggatacaaatacatatataggcggtacaaattgcaaaatgcaagtaaaaatattactactacggttaggggtggattgaagattggtcgtcggtgagttaaattttaactatgcattatggacctggtggggagcgtgggtgggtggggctgaaggctgtgtcaggtactgtttagaacgtagcgccttaaagtgctatattatagaagttaaggaaatggtaaaatgacatatgatgagcaaaaaatggtaggtgaggaaataaattaatacaaaaggttttagatgtgaaataaaatagtgtaaatgtggtggagtggataggtggataataagataccgtcttggaaccccaaacccctaatacgaatttaaagatcaaaatattttatattatattttaaaatgaacttaaagattaaaattttttatattatgtaatgggggaaatatactattatgatactactagtaaggtcaatatataatccaaaagtggtactacagtttacaatcccatccaccccaggtttttgtttggtttagagcaatattaattaattgaatccaatcaaatgacgtttgatgatcttttacgcacataagtagaattatttatgataaaacaactgaaggagttgctttcgattagagtgtgaatactcggtgagcacgccagcagacgagagaagtttaagcgtagatgttgttatttgggtgatccaaatcctcttgtgttcgttcccccatggtggcggagctaggctgcgctacgccgctagctgtgcaattcgttgcaaagcagccaagcaggtacggtcccttcgtttcaggcgcatgctattgctacttgtcttcatcatatatgttcgttgttcaattttgctatatatttgtcgataaattttaccccaaaaatttgacagatataattagaatacaatcgtagtgtaattacactgtaacttacatgtaattacactgtaactatagtgtaacttgtacgtaacttttaaaaatctcttcgtaacatgttatttcgataaaatggaggttgtgggaataaattctttcacatatgtgtgtgctatgatttgttttcttcctcaccaaaacaaatcttgtaatagatctaacgattcaaaattatgtgaaacttacatataagttacattgtagttacatgcaagtcacagtataattacatataagttacaatgtaattacactacgattgtactataattacatctgttaaatttttaggagaaaatttgtcgacaaatatataggtggtccctttgttgttacccgtgatttactctaaagttctaaatttctccgaatttgggatctacaagagcagtagatacttccagtagatgagggaagttcaagtgcggaccggcgggcgcagacggcatcccggcagtaggcacatccgcggttaggtggcagcacgcggcgccgccgccgccggtcgttcgcagccagtcggcagtgttcggccgctgcaagaccatttctaacaccaagcaggcaagcaattgtgtcctcagccctcacttctccgtgtcttgctatctactccctcctttaaaaaaagacaaaccctgatttccgtgtccaacgtttaaccgtccgtcttatttgaaaaattagaaaaaaaattaaaaagacaagtcacgcttaaaatattaatcatgttttatcatctaacaacaatgaaaatacgaattataaaaaaatttcatataagacgaacagtcaaagttggacacggaaatccagagtttgccttttttttttttaatggagggagtagtaatcttttcatgtccccaaggtgtttgatgaaatgtggcagcgagccatataacctatgcgctgctcagactagtgcgtgagacaggggggggggggggttgtggtgtgaggattttcctttttaaaataagttcaaagaatattggtaaatttcagtctaagtaaaaaataggtggcccattgtgcagttcacctaacattgaaaatttcaaaatatttatcatcaaatggctatttactaatattccgtttctaccatatatagacggattacatcaaggcataaagatcagcttccaaatcttactgagtgtattctagccaagaataagcatggcagaagccttggtttttgttgtccttcagaaaataggagctattttaggggggcaggtgctgaatgaaataagatcgcaatttggaaagaagtcacttatatttgaagtggagaacagtgtgatggaactcgcaagcgagtttagggtcatgcaggcttttatcaaccatgttggaatgtgttcacatcaaaatgcagcttatgaggcctggttggatgaagtaaagtcagttgggtttgatgctgaggacataattgaagagtatgcatatcttattgcgcaaacatcaaatgaaggcggcttgattaagagtgtattacatcgatccatcaatgcatggtgccatattgcgacacaactgaaacaaattgaagctcgtttacagaagctcacagccatgaaagatcgttatggtattttgatcagtgaacaaaaactgggaagtaatcccagtcatgatgatctcaaacttatgtcggattctttgtatttttactctcaagatgatattgtaggaaatgaagaagaacttgcgtggatcacacagcggctgatacaaggacggaaatcccgtacagtcatctccatttgtggcatgggaggtttagggaaaacaactcttgcccgagttatatacaaaaacaatgacattaaaaaacagtttgattgttgtgcatggatttcagtgtcacaaacttatcaagctgaagatttgttgagaagaatattataacagctcctaaacatggatgggaagacttttcatcacatatatgatatggatcgaattagtttggcagaaagattaagagatcacctgcagtgcaaaagttatctaattttcctagatgacatgtggagtcgagatgcttggatattcttaaatcatgcatttgctacaaataataaaggtggacgggtaatcatcacaactagaaatgaagatgttgcaatattggctgatgaggaccattgtattatgctaaagactctacaatggaaggaagcatggaatctcttttctagaaaagcctttcctagtcgaaaagaaaatcaatgccctgaaagtgtcgtacaatgggcggagaaaattgtggataaatgtaaagggttgccacttgcaatagttgctattgggagtctactttcccacaaaaagaaagaagagaatgaatggaaattgttttataaccaactgaactggcagctgatcaataacccggagttgaactttgtgatagctgttctgaatcttagctttgagtatctaccaagcaatctaaaatactgcttcctgtattgtggcctatttcctgaagactatctgattaaaagaaaacagataattagattttggatagctgaaggttttgttgaggaaactggagccaatattactatggaagaactagccgaagagtatctcaaggagcttgcccagcgttcacttcttcatgttgcagaaagaaatgtgtatggaagagcaaagtcattccaaatgcataatcttgtaagagatatggttgtcagtaaatgcaagacctacaagttttctgatcttgtggttgaccattgtgttacaaaacacaaatacaagacgcgtcgtatatcagtattagaagctgatcatgcctctgaagcacctacctatggagagaaggttcgctcatttatcctgttcgataagaaagtaccttactcttggttggaaactgcaagtagagattttagattgctaagggtgctgtccttgagaagagcaagcatccataaggtccctgatgttgtgagcaatttgttcaatttgcgctaccttgatttggcctatacaagagttaaggtgattccaagatcactgtgccgactgaacaaattacagatgttggacctttggttcactggcgttgtcgaactgcctcgagaaataaagctgctaacagagattcggtacatggttgctactgtcatgagtgaagataatcacagaattttcaactgcttcctgccagttcgatttccttgcgaagtttgtcatctcaaggatttacaggtactaggatacatagaggcaagcaaagatatgatttctaatctcagaaacttgaatcaactgcgcaaccttttcatgatgaaagtggagcataattatttaacagagctatgggcctctatcaaaaggatgccaaatcttgtcaggttggatataatctcgtgcgacagcgatgaagttttcaacatggagcacttggaccctcttccagaattggaaacattccatcttagagcaaagttacaagatggtgttcttcccaagatgtttcatggtcttgttaaaatcagagacctggagatggggtggtcagggttacaagtagatcccgtttgtaccttttcacatatgtcgaaccttactgaattgcgtctttacagggtttatgagggggtgcttttgagcttccaagctggtttgtttccaaaactcaagaaactctccttggctgatatggagaacctcacatggattgaaatggaggatggcaccatgcaaagcctaaattttattgcacttattggtttaagaaacttgaaggttgtgccagaaggatttcaatatctaatgtcactccaagagatgttccttcaggatatgccacaagagtttataaagagggcacaaagagaagaccgggtttacatccagcacatccctaagatacgaaaattttgacaaagcaaattcactcctatgattgtaacctttttaccttggccttgtgctggaatgtaattatagcaaagtgcacggttggttgcagctgtgtcaactaggtctccaaattctcaaaatgcaaatccaggtcctagaagttgttaaattgcattattctggtcacaaactacgacaaccctttgagatcttacatggtgctgatgtagaattggtaacgatgctagtcggtgtagaattggtaatgatgccacgtcagcaccacatgagatcctggataagttgtgttagcttgggactagaatgacacgatttaacatgttccgtgacctggattttcattttaatagtttgaggacctagatgacataacaacacaagtttaaagaccagctgcgcacttactccaattataatattttccatgtgataagagtgaaatacatcatatgattactatgaatagagaactcaacaagatgccgatatttgaatgtccaattatcgaagtgttcagcatatgagtacctaatcctgagagatttttacttttgttactagagggagtaaaattttttgtcgacttcttgagcatggttacgtggttatgcctatagacggtggaaatggtggccatcgagaaagcaacaggggagacggaattagttgacttttgtacaataagccttacttgatgtccagtagtaagtctgcgtgggtatgcctatagacggtggaaatggtggccatcgagaaagcaacaggggagacggaattagttgacttttgtacaataagcattacttgatgtccagtagtaagtctgtttaaacacatcaaatggggcaacaaacaatggtagtgagttcaaccgtacaatccgtggttgaatttgttatagagaatacttctaaggcccttcacactaaggcccttcacagtacgagtacgtggctcgtgggttcgctacgacacgtcggagccggacttccacgtcgttgtgggtcggttcccaacttggtagcgcaggtctttgtgaggtatcgtgtttctcacctgcgcagcaggcaaacggcgctggatcttggctattgtctgctatggagtagtactactgaacctggacccacttaaaacccatttgaaaggcaactagcactgtcagagctgtgacccaaaccttcactaggcctattcggcacacgaagttccaatagtgcatacaacgtgtcaagaagcaaaagcagaatcagagaagaagatgatatcaatgacatttcacaagtcagtcgttgtcaccaaaattccacattagggtgatcatgttagacaaaccaatttatgtaacagtttaaactccaatatacgtcggatatattgttcagttgtaaatttaagagaaatcaagcaaggaggtcggccatctctttggtgttggggttgtcggtgacatgggaccgggagtatcatgactagaggcttgaggcagacacgatcacccacgtggcctaaccccctcggggggggggcccgagggtgatgtggccgcccttctctttgtctccccgaggggtcggaccgctcccgtttcggccccgagggccgaggcgccccgaccccttgtgggttttacgccgcatgtatgggttagg

SEQ ID NO: 29127 - DNA, 15698 bp, Oryza sativa
tttggaacgagcgcgtcacgccgcatgtaacgcagtgcagcgcgctcgtttatccggtctgtgaccggtcacagaccggtcagattgcgggttaggtggcaacaggcgatctgacacacgcctcgccccatcccgttaggatgagagcctctaggcactcgtccctagccggagccagcgtgctagctcctggagatggcacgttggtcccggtcagatatataccaggcttcatcccaaccattgcaagaaagacattgtatgaagaagggcagacatgcagtttgctaagctgacgcgtggaggacaaaaatgactggtttgtcaccgatctgacactggtcatgtcatcggtagacaaccgcgttcccacgttgaacctgcttccggcggagtggaggtaggtatgggccgtcccatcagaaggtcattcggacagcagccattgcaagtctccgcccatttatgaagggatgacagggtgatccccgaggtcagacgagtgaggacgcgtggccacactaaaaaacaagcttccaagagaaggcgagccaagttttagtaaagataggatgggtccccacccaaaagaaaaagaggtagaagtggtgcatgtggtatccccttgagatataaaagtctcgtactccaccgccccctccacgccaaagtcctaagcggggggaggcgctcgagagggtcgaaagatccgcgacttcaccgaccgcgggcgatggagaagaacggcgagacggggagcgtcgcctcctcgtctacggcgatggcagcacgccccagggcgcgctccaggctgcaggcgcgctcctacgtcacccgcccgtcgtccccgatccggagtctccagcccagcgttggctggacgacgtggccaacttggtcatgacggcacggcagcgcctaggtgctggtgggcggtcctccgccactaagacctctggcgctgctaccaccggctccatgtcgtcaaggcggagggcgcggcgagcggcggccgttgctcgccattcggccgccactccctcgtcagcacctccgacccgggaagatcagcgtggggggccggatgcccaccgcggctccgaacgccggcgtaatggtcgacatgctccccatgtaacggagggcgcctcctcgtccggagtgtcacctcagcacggacgcggggatcagccctccgtgcccccggttggtggtgtcggctgtagagcctttgtggcgagccttcggaatgtccgttggcccccaaggttccggcccaccatcaccgaaaaatatgacgggagcgtcaaccccgccgagtttctccaggtctacacgaccgggatcgaggccgctgggggtgacgacagggtcatggcgaatttctttcccatggccctgaagggacaggcgcggggttggctaatgaatttgtcacccgcatcggtccactcttgggaagatttgtgccagcagttcaccatgaacttccaaggcacgtatccactcccaggtgaagaagcggacttgcacgcggtacagcgaagggatgatgagtcgcttcgctcgtacattcagcggttctgtcaagtccgcaacaccataccatgcatccctgcacacgcggtgatctacgcgttcagggggggcgtgcggcacaaccgcatgctcgaaaagatcgcctccaaggagccccagactaccgcggagctttttcagctcgtggaccgagtggctcgcaaggaggaggcctggacttggaacccctccggttccggagtggcagcttcggccgcccccggatccgctgctcggacagggcggcgtgacaggaggaagaagaagaggtcagtccattccgacgacgagggtcatgtcctcgccgtcgagggcgcttcgcgggcgacccgaaaggggaggcctgcgagcgacaaaaagaaggaggccggcgctcccagcagggagcgcccaaccggcaagtggtgcaccgtccacaacacctccctccacgacctcgtggactgccgcgcagccaaaagtttggctgagcggacgaggaagtgggaggaggagaggaggcaggagcgccgagaaggcaagtccccggcggttccctctggcaatcagcgaagtgaggccaagcagaaggcccccgccgaggacatcgatgacggcgatgatgacttaggtttccaggagcctggggccaccattgccactgtcgatgggggagcgtgtgctcacgtttctcgccagagcctcaaggccatgaagcgagagcttctggccacggcccctactcatgaggcgacgcgtcgggcgcggtggtcggagattgccctcacctttgaccagaccgaccacccaccgtgtgttgcccgggaaggacagatcgcgatggtggtttcccccaccgtttgcaacgtgaagttggggcgtgtcctcatagatggtggggcagccctcaacatcctttcccccgcagcctttgacgccatcaaggccccggggatggtgctccagccgtcccagccgattatcggtgtaacgccggggcacacttggccgttaggtcatatcgacttcccggtcaccttcggtggatccgccaacttccgcacggagcgggtgaacttcgatgtggcggacctcagtctgccctacaacgcggtcctagggaggcccgcgttggtgaagttcatggtggcggtccactacgcctacctccagatgaagatgccgggccccggtggccctatctctgtccatgacgacctcaaagtcgcgcttgcttgtatggagcagcgcgcggaccacctcgccgccgcgtccaagcccgagggtggtgacgagaggcttggcacctccgtccccgccgccccgaggcagcggatgatcacgtgcgacgaggtcccggtcaaggaggttgccctgggcgacggcccgtccaagaccacacggatcggtggtcttctggacggcaaataggaagacgcgctcgtctccttcctgcgggcaaacgctgacgtcttcgcatggagaccggcggatatgcccggggtccccagggaggtgattgagcaccgtctcgccgtgcgaccgggcgcaaggccagtccggcagaaagtgcggcggcaggccccggaacgtcaagccttcatccgtgaggaggtggcgagactactggaagccggatttatccgtgaggtcatccatccggagtggctggcgaacccggttgtcgttcccaaggcaaacggcaagcttcggatgtgcatcgactacaccgaccttaacaaggcatgtcctaaggacccttaccccctgcctcgcatagatcagattgtcgactccactgcggggtgcgaccttttgtgttttctagatgcatactctggttaccatcagattcgcatggctagggaggatgagaaaaaaactgcattcattacccccataggaacttattgttatacgacaatgcccttcgggttaaagaatgcaggtcctacttttcaacgtactactcgaatttctttgggtagccaaataggacgtaatgttgaggcttatgtcgatgacttggttgtgaagacacgcaaccaagaaactttactttcggatctggcggaaacttttgagagtctccgctccgcccgcataaaactgaaccccgataagtgcgtgttcggtgtacctgcgggcaagcttctcgggttcttggtctctgcccgaggcatcgaggccaaccccgagaagatacgagctatagagcggatgcgcccccccagcaagcttagggatgtgcaatgcgtcaccggttgcatggccgccctaagtcggttcatatcaaggctgggagagaaggcgctaccattatttaagctcctcaaacgctccgggccgtttacctggacggaggaagctgaacgtgccctcactcagttgaaggcgtatctcagctctcccccagttctggtcgccccggagccagatgaacccttgctactctacttagcggcgaccccgcaggtagttagtgcggcgttggttgtggagcgcgatgaggacaaccctcattccgcatatccccaccctgtgccaactcaacccgggagagagcagggaggagaggcccccgagccgaacggtggcccaaggcccccgacgaccggagttggccctctgcccgcttgtcaaacggtgccgggtgcccccaacccccaggatggcccgagggccactgtgggaaggccgcacctatcgccctctgaccccgaggttaaccctgtgccgacccgacccaggagagagcagggaggagaggcccccgagccaaacggtggcccaaggcccccgacgaccggagctggccctctgcccgcttgtccgacgacgccaggcctccccgacacccaggacggccccgaagccactgtgggaaggccgcgcctgtcgtcctccgaccccgaggtcatcggcacagaagacgagtgcaccccgcatggcctcttggacgaagagtgccccagggatgcggcccctggcgaagaggatcggccccgccgaaaggtgcagcggcccgtctactttgttagtgaggccctccgggacgccaagacccgataccctcaggcccagaaaatgctttacgctattctgatggcttcgaggaaactgcgtcattatttccaggcgcatcgggtcacggtggttacgtcttaccccctcggccaaatcctgcataatcgagagggtacaggacgggtggtgaaatgggcaatcgaactttctgagttcgatttgcactttgaaccacgccacgctatcaagagccaggccctcgccgactttgtggcagagtggaccccggctctcgaacccgtctcagaccccgaggccagctcgagcccctcgcagccgcctcacaccacccactgggtgatgcagttcgacggctccctgtctcttcagggcgctggtgcgggggtcacgttgacctcgccgagcggagacatcctcagatacctggtccgtctcgactttcgggcgaccaatattatggcagagtacgagggactccttgcgggactcagggtggcagctggactggggatccgccgcctcctggtgttaggcgactcccagctggtcgttaaccaggtctgtaaggagtaccggtgctctgacccgcagatggatgcttatgtacgccaagtgcggcgtatggagcgccatttcgacgggatagagcttcggcacgtgcccaaacgggataacacgattgccgacgaactctcacggctcgcttcctcacgagcccagaccccaccgggcgcctttgaagaaaggcttgcccagccgtcggcgcgacccgaccccctaggggagacggacgcgcctgaccggcccccgaggcccgtcggagtccaggcctcgggacccgaggggagcgttcccagctcccttagattgattgcttggatcgctgagatccaagcatacctcacagataagactctacccgaggaccgcgaagggagtgaacgcgtccaacgcatctccaaacgctacgtgctggtagaagggaccctctatcggcgcgcggctaatggaatcctcctgaagtgcattcctcgggaacaaggcgtcgagcttcttgccgatatccatgaaggcgaatgcggagcccacttcgcctcacgcaccttggttggcaaagcctttcgccagggtttctattggccgacagctctcaatgatgtggtcgacctggtccggcgatgcagagcgtgtcaattccacgccaagcaaatccatcagccggcccaggccctgcagatcataccactttcatggccatttgctgtctgggggctcgatatcctgggaccgtttaggcgggccccgggcgggtttgagtatctgtatgtcgcgatcgacaagttcactaagtggcccgaggcttatccggttatcaagatcgataaacactccgcacttaaattcatcaagggcatcacagcccggtttggggtgccgaaccgtattattacggataatggcacccaattcactagtgagcttttcggtgactactgcgaagacatgggcatcaagctctgcttcgcctcccccgcccaccccagaagcaatggccaagtggagcgcgccaatgcggaaatcctcagaggccttaaaaccaagaccttcaacatcctcaagaagcacggcgattcgtagatcgaggagttgccagctgtgctctgggcgaaccgaaccacaccaagccgagctaccggggaaacgcctttcttcctcgtctacggcgcggaggcggttctcccatccgagctcaccctgaggtcacctcgggccaccatgtactgcgaggctgatcaagatcagcttcgcagagatgacctcaactacttgcaagagcgaaggcggcgcgcggccctccgagccgcgcgctaccagcaaagcctgcggcgcttccatcagcgccacgtccgggcccgatcactctgcgtcgacgacctcgtcctatgccgcgtccaaacgcgtgctggattgagcaagctctcacccatgtgggagggtccgtatcgagtgatcggcgtcccccagccgggctccgttcggctggccactgtcacgaccggaaataacccaacgggcattccttacgtgcgtgcattaatccttgtcccaggaggcaaggtacaccaaaagttgatacaaatcagagtttaacaagccgaagcgtaaatagttaacttattacatgggcagcgaaggcccagcacacacaaagacaaacgaaaaacagcggaagactagggcgacgaccacaggcgcttgacggcaggcacgagctagacaccaaagccttcatcttcatggagctcctcttctgggcttgggaaaaattgagcaagactgagtacaaccaccgtactcaacaagacacacccacaaatgcagaataaatgcaagggagtacaagggaattataatataaagggttagggttgcagtaaacagcatttaaagacatttagttgctcaaagctattttgtaaacccgatcctagaactatacaatgttattaatcaaggtcgtgaacccacacgaacctgccttaacccaaggcctatgatgattcagaccgaactggcaacccgaccctgggtcccagctcgtcccaagccaacccaggccaaccattccacattttagttgttaagaaggttttaagaattaaaacactaacttgggtacattgctcggcttgcccataaccgagggctcggctattcgaatagattatactctgatcagaggtgtacatctttacccacaagacacatcttcctcacgtgtaaccacgtgccacataccaccacggtatacagacgaaagacgtgacatagtttccaacccatcctagccatagacaagagtaccgacccaatcccgcctacggccggaacccccgggacaggcaggcaagactgagcccccagcagcagggcaccaaccctctgccatgacatctcgactaccgggccgcagctcgtgtagccttcatttgccctggagaatgtccatcgatccccgacttcatccatctccaatccgtgtacttttgtttatgactagactgagccacaaactaagccttacccactagacatgtggaagtacggtagtgctttgcaacagaggcccgaagaccggtccttatatggccgaggtgctaccatcaaaaccatgcaccccgagcccagcctaaaaccatttttggggattttgaatagagggggaggtgtgaaaccaattccacaataaaccaacaattccagggtgtccaggtgatgagaatatcccaaagtctagagttgtaaaaccacctaatgttgtctaatttaattgcgaagcatctacctaaatttaaactagggataccacgagtagagtgtccactagttgaggttttgtttagtctagggtgaacaaggtaataataataacaataacaataataatatggtcataacaaaggtaaataggcatggctaaataaaacagtgataacgcgggaatttaaataaagcgataatgcaataatttaaatcaacataattttacaaactgggattcaatatgctcaaggatgatgtgacttgccttgctcgctttcccaaccgacggcttcgacttccacgaagagcggatcttccgaagctgcagcgtctacacgaccaacggaaaagaaaaggcttttactctaataaactccacataacagcagaaacaaagcacaaaaatgggttcttgacttcttaaggaaaaattagagacttgaacggtccaattccgagttcaaatggccaagttatggccatttgaagtttatatgctctttaaatggatatttgcgaatttcttcatttaaattttaattaaaaaacgggtttattgcgtcagccgagggagagggcgcgtggaccgggtccacgggagtggggcccacgcgtcagcctctcggtccacggtggaccgggagcacgcggctggcggcggccggcgccgtgggtcccacgcgtcagccgcacccgcgggcgcgggcggctgatggccgggcccacttggcagccgcgagggcgcgcccgaaggcggcctcgccggcacggccgacgggaggcggcacgcccgcgccccgatggtcaccgccggcgaccaccggcgcggtggagcggcgcccgagagagcggagaggagaaggaagcgaaagggcggtcttcggctcaccccgggtcgacggcgacgacgggaacggcggccgaagcggaggaaggcggcggcgcggctcgggacgacgaggacgacggcgctccggcggtcggcgagcgaaatggaggagcggccgaggtcgacggggacgcggcgaagccgaaggaggtgacgccgagacgggaggatgtccggagcgacgacggcggcgaaccgaagctcggcggcgacggcggagagaagatgcgacggcgcgagcgcgattccgacggggagagcgagtggcgaacggcggaaacggaggagagaggcacggggaacgtttatatagggttgggagtgagggaaggcggccggaggagatggaaaccggcgcggaggatccggccgccattgattgcgccggcgaggtttgcgggattgaatccggacgaatccgagggagagagagaggggaaagagagggaaacgggagagggaatcgcggggaataattcccccctcattatggcgcgcggggacggcgggatgcggcggattcggcggcggcggcggcgctagggcacgggcgagcggcgggagcggcgggaggaaggcgatgacaggtgggccctacccgtcagcgagggcggcgggcgggcccgcctgtcagcggcgcgcgcgcgggggaggccgatgggccgcgggggagaggagagagagggagggagagttgggccgagccggcccaagagaggaaggggggaaaagaagacttcttttagggtttttcttttttataaaccttttcaactttgtttatttcttttcaattattatttgtgctctgaaaattccactaaaatttatttacgcattttaggcttttaggaaatatacaaaaatcctccaagccttatttgacttttaaatttgcacattttaattgttggaggctttcacatgaattttaattattctcggcacaatttcgaggatgtattttagagtcgttttgggacgtgacaaacctaccccccttaaacggaatctcgaccccgagattcggaagaactggcgaagagatctggatgggctgccttcagctcgtcttcacgctcccaagtagcttcttcctcggcgtggttgctccactggaccttgcaaaaacggattacccggttcctggtcctgcgctccatggtgtccaggattttcactggcctctccacgtaggtcaaatcttcgcgaacttcaatttgctctgagtcggcctgctcggatggcactcgaaggcatttcttgagttgcgacacatggaacacatcatgcacgttgcccaaggaggcgggcagctccaactggtaagcgacttctccgcgtcgagcaaggatacggaaaggacccacataccgaggtgcgagcttccctttcgtctgaaacctgtgtacacctcgcaatggcgtgacccgaaggtatacaaaatcatccactgcgaattccaggtcacggcgacggttatctgcataacttttctgccgggactgtgccacctttagattatcccgaatgattctgactttagcttcagcttctctcaggatatcagtcccgaacacttggctttctcctacttgatcccacaagagtggtgtccggcacttgcgcccatacaacgcttcataaggtgccatttgtatgctggcttgatagctgttattgtaagagaactcagcataggggagactcttatcccaggtcttcccgaaatctaggacacatgcgcggagcatatcttctaggatctggttcagacgctcggtctgtccatctgtctgcgggtgataggcggtgctgaagtttaatcgagtacccagctcttcttggagcttcttccaaaagtgagaggtgaattggcttcccctatcagatacgattttcttgggaacgccatggagactcacgatcctagcgaagtagagttcggctagcttgttccctccataggtggtcttcacaggaataaaacgagctaccttggttaatcgatccacaactacccatatagaatcatatccgccttgggttttgggagtccggtgatgaaatccatcccaatttcatcccatttccattcgggtacttggagaggttggagaagtccggccggtcgttggtgctctgccttgacacgctggcacacgtcacacagggccacaaactctgcaatttcccgcttcatgctaacccaccagtatttctccttcaagtctaagtacatctttgtactgcccgggtgaatggaataaggactttcgtgagcttcctgaagtatcagctgtttaagttctctgttatctggaacgcatacccgctttccgttccatagggttccgtgttcatcctctgtgaaaccagcggctttaccctgtttcatattcttgaggagtccatgcatgtccggatcattcttctgagcctcgcggatttgatcgagcaaggtggacttggcttccaacgcggccaaaaatccacgaccaactatgtttaggttcagggcttccatctgttggttaagttcgggtggaatgccacggacgttaagagtgttgcaatggctctttcgacttagagcgtcggcaaccacgttggccttaccaggatgatagtgaattcccacatcatagtccttgatgagttctaaccatctcctttgccgaaggttcagatccgactgggtgaagatgtatttcaaactcttatggtcggtatagatttcacagcgattcccaatgagatagtgccgccagatttttagagcatgaactactgcggctaactccaagtcatgtgtagggtagttgccttcatgaggtcgtaagaaactgcggacttgagtaactgtcttgggttgcttccaatcggtgacggcggtcactgtttcgggatccacagcaactcctttagcagatatcacgtgccctaagaatttgacttcggacaaccagaactcacacttgctaagcttggcatacaattgatgttcccgcaactttcccaacaccagacggagatggtgttgatggtcttcctctgattgtgagtatatcagaatgtcatcaatgaaaaccacaacaaacttatccaagtattccatgaatactttgttcatcaagttcatgaagaaggcaggcgcattggtcaaaccgaacgacatcaccgtgaattcatacagcccgtatcgcgtggtgaatgcggtcttcggaatatcttcttcacgaatacgtaattggtgatatccggaacgaagatcaatcttggagaatacagtggcacctttaagttgatcgaatagatcatcgatccggggaagagggtacttgttttttatggtgacttcattgagagctctgtagtcgacgcacatcctcttcgtcttgtctttcttctctacaaaaatcacaggagcaccccatggggaaatactcggacgtatataccccttttctttcaattcttccaactgtttctttacttcggctagttcatttgctgccatacggtagggtcgcttgtgcagaggagtggttcctggagcaagatctattcggaactcaatctctcgcttgggcggcataccaggtagttcttccggaaacacttctccgaactccctgacgatggggatttctgacagtcctatctgatgaagttctgaacttctgacagaggttgggggtgcaaagaaaacaaccggttgtgccggtcctcggtacagagtgacagtgcgtctcgcgcaatccactactccttggaattgtgccaaccaattcatcccaagaatcacatccaagttcttggtgtctaacagaatcagatccgagggaaaaggaatcccctgaatttctatagggacggcagggctataatactttgctgtcataacccctccaggggtggtgatgagcagagggtttctaagcctttctacccccaactgatttctccccacgaatggcacagatataaacgagtgggaagctccagagtcgaacaaaattgtagcagggatggaatgaacgaggaacgtaccaacgatgacgtctggagttgtcagcacgtcctcggccgtcacgtgattcacacgaccccgaatgacgtccttaccaccgttgttggggcggggaggcgcttggccttgctgacgccttggcttcgggcatttatccgcaaagggcccgggctcgaagcagttgaagcacagacgctgcggaccttgagcatccctgcggccttgaacaggctgcacagttggcgtaggaggacggggcgcacgagtcccttgctgattctgctgctgctgcagctgtgggacgcgcaccacgaattgaggtcgaggcgcggggcgaggttgctgctgctgttgttgttgctgctgcgaggaggatccccctggatagggattggtgtagcggaccctttggttagcaccctgctgattgcggaaattcgccaagcgacgcttgtgcgactccagttccttgtgcttggcttccaagcggatgctcttgtccaccagtcgttggaagtccggatagtccccagagactagacggacggacagctcggggtccattcctgccaagaacttttcttgcttctcctcatcttcccgcacatcctccggagcgtaacgggccaggttattgaactcatgcaaatactccatcacggagcggttgccttgcttcaactctcggaattcccttttcttaagggccacgactccagcgggcacatgggttcttcggaaagcggcggtgaagcgagcccaagtaatcggctgtccctctggctgcgtagcctggaagtggtcccaccagagagatgcgggcccctgcagctgatgggcggcgaagacgactttctcctcatcgctgcactgcaccgtgtctagctttttccccacggcatgcaaccaatccaacgcatccacggggttgttggaactggagaaggtaggtgggcggatgcggaggaactcggcgagtttagagtgttgtgggggtggtggtggagcattctgttgtggcgggttttggaggtggtggaggaaagcattcatcatgttggcttgctgggcgaggatttgggtgagaatggcgttggtgtctggtggtggtggtggaggcggaggaggaggtggaggtgggttgccctggtggttgtggttgctgccttcaggttggttgccatcaccggtaacagcatttctcctagtcgtcaccatctgaaaaccccacacagaacccgcaaacagagagagagctaacaattaaaactaaccacccacgactaccataattcttgaatttattactgctattaaattggttcattaatgttcaagttgcttaggcgaataaaataaggcaggctccgacacagttatgccacacaccggcataaccatgccccacacgactcaacaagaagacaaacgagaaagaacacacgcgcaagcctactaactgctcgtctactgctgcgacgggccagggcggaaggtgagcaacagcgcaccctccgtgctaccaacgccggaggcttccccctcctggggaaccacgggcgcaggctcggcacgaggggtctcgacgaagcaagtccacgccagggactgacgaacaagctcgggcctggaggtgctcttgcgggcggtgatcttctggctgcggcagacgcggcgacgcttggggcggcagatctctccctgggcgatcttgagctggtgcagctgcgcctccactgcgtcgaggtccttcttgagctgcaggttctcctgacgcagctccaggatcttcagattgttctcgaccatcccgcgacgtaccatctggtggaagtcgatacgagccgcgtcgtacgcctccaccatgcgcgccaggtgcacgatggtagcgtcatcctccgagctagcatcccggaaggtggcgtagtcgcgggctcctccgcgacgagggtggtagcggtagggcgagtgctgcaactcgtccgggtagcgctggtgaagagtgccgatggcgaggagagcggcgctctggcaagcggcggggaaggagtctccacccgcggtgactgtcagcgaagtccgctcgggagagccagagaggatcacggcggtgacctcccaaccagcgtggggctccgcgtcctcaccctcctgctccgggagcggcctggcctggtagtccaccccatggggataccctaagaccacgcacatgccccgtagctccaagacgaagccagtcatgtccaaaccacgacgggtgacgctgccggccatctacaaacaaaaacaaaaaagaaaagcaacattttaaaggtcagattttgatggtaagtgaagcagcaagacagagagagactagacagttttcacaaataacaaaggatttttatttttgaaaatattgctaaggcttgggatctacggctcgtcctagggtcaagggtggctctgataccaacttgtcacgaccggaaataacccaacgggcattccttacgtgcgtgcattaatccttgtcctaggaggcaaggtacaccaaaagttgatacaaatcagagtttaacaagcggaagcgtaaatagttaacttattacatgggcagcgaaggcccagcacacacaaagacaaacgaaaaacagcggaagactagggcgacgaccacaggcgcttgacggcaggcacgagctaacaccaaagccttcatcttcatggagctcctcttctgggcttgggaaaaattgagcaagactgagtacaaccaccgtactcaacaagacacacccacaaatgcagaataaatgcaagggagtacaagggaattataatataaagggttagggttgc

SEQ ID NO: 29128 - DNA, 23141 bp, Oryza sativa
attatgggaataaatcctagcctttacttcaaaggaagctagagccacttattacaaaattctctcaagagagcaaaacaatatggcaacatcaagcaaatccaaaaacaatccgacaatatcaagcaaaaccaacacataaggagtaaacaattatttaaatctatttgtaaatcttcatccttagttggcgaaaatcttcatgacgtaacttctcctgacacaagaaccatcctggtatgcaaccatgtaaggagcacggagtactaaacattacttcctccgtttcacaatgtaagtcattttagcatttcccatgttcatattgatattaatgaatctagatagatatatatgtctagattcattaacatcaatataaatgtgggaaatgctagaatgacttacattgtgaaacggagggagtagaacatatgaaaaattccgagaatgaagcacccactactgggtcatcatcaccaatctctccattcccgatacaaccaaaaccgctcggacagagcagccacagagcacccaaaatcctccaatttcagcggaaggatcgcatcaaatccatgtgagggggaggctgtcccgtagcagctctttgatgtcatgggtgacaaaggcactgcggatgcgatggtggcgtaacctgttgtggcctctcaggagggctctagcctccggggagcgccgcccaagcgtcgaagcacgctcgccaacctcctctgtgcccgagtgcatcgactactaccttgcgcctgctgtggtgatgtgtcacgtgtggtccgtgctgcggttggccgtggctgccgccgccggagccatgagctccaactcttggtggcaggtcttcgtgcttgggtacagcgccgtcgagatagatggaggagagagggggaagacgaaaccacttctcaaagcactgaaggagttgatttacaccggttctcaaagatggggggaggagttaaacccgattttgtggttggggattgcaattcgatcacgagcaaaacatcaggaacgtaaaatagaattactagaaaataccccacgcgttgctgcatgaatatatggtgaaaataatgataacgatttttataaatgcagttttatagagtggtatataatttctactgcaccaagcacgaatggttacactaccggaggaatgatctttgcatggtcgcctgatttccacaatagtcccggttctaataaaaaccgagactaaaaattgtttttagtcccggttataaaaattttgatctttagtcctggtttatgccctgtcagttagtctcggttggtagtatcaactaggactaaagattatcactttagtccaggttggtagtaacaaccgggagtaataatcatttagatctttagtcccagttggtactacaaaccgggactaaaaatctatctttagtcctagttggtaagtccaaccgggagtaaatatttctctcctatctctgatcggttaagtcccagaagaaatatttagagataagatcgtctctctccaactcctctcagatatcacccctctccaactccctcagatccgatccaagcctcctcgtcccctcccctctcctcctcctccttctccccttcctcctcctcccctcccatccgggggccgacaggcggccggcagggccaagcccagcggcagcgggcaggcggcgggcagccgtggtgagcggaggcagccggctttgttttctttttttttatataatctgtgattcattgggatgtataatttcgtgattcattgtacatttgtatggatttgagatgtataatatgtgatgtatttgatttgttttgtaatttttttaggatttgtgatgtatttgatttgtgtgtatgagtaactttaagttttgtgatttgtgatgtggatttgggatgttactttgatttggggatttggggtttgatttggggatgtgcatgccactcgattagggagaaaataaaaaagaaaaaaaaaaggggacatctggactgcacgctaccctctctttagtcccggttggtaacaacaaccagaactaaagatccctctctttagtcccggttatttcaaccgggactaaagatgggcatctttagtccggattgctactctcggttggaaacccaggactaaagggggttaccaaccgggagtaaaaaagtttctccaccagtgttaatttttcagcaatatgcttttgattggttggattacaaatatgatcgtcgttaaataacaaatgaaaataaaatttctgaaggtagttatagtctgaaaatacattcaattagcatatgaaattggaagactgttttgagataaatctttagacataaggtgggcagcacaaagaaaatcatggcgagttgggtgaccattagtgaggtactcacggtttatatgacgttgtttcttcaatcatgtagaccatcagcgtgtcaagtctggtatgcttttgtttcgaacaaaataaagtctgtttttctttcaaacagaacattacaaaatgctctaaaagtattaataccgtgctagtgaagtccttttgaagatgaatagtattgcattacgtgttagagaacataacatcttctgatatggtccttggaattacaatcggttgcgagttactcagcttcttggactgttactcgggatatcatcagatccgactaaaagaatccgactgcttgaagacctcgtttattacgcccttaggggccaactgctacatcaccatgccctttggattgaaaaatgtaggagcgacctatcaacgcataattcaaagatgtttttcaactcagatcggtcgcaatgttgaagcttatgttgatgatgtagtcgtcaagatcaagcagaaggatggcctgattgcggatttagaagaaacattttcaagcattcgtgctttcaagatgaaactaaacctggaaaagtgcatcttcggagtaccgtcggggaaattgctcggatttatggtatctcaaagaggtatacaggccaacccggagaaaatcaacgccatcctcaacatgaaaccgccaagctcccaaaaagacatccaaaagcagactggttgcatggcggcgctcagccggttcgtttcacgactcggcaagcgagggatgcctttcttcaagctgctgaagaagactaacaatttcccgtgggggcccgaagcacagaaagcctttgaagacttcaagaaactcctcaccacttcaccagttttggcctcgccacatccgcaagagccgctactgttatatgtgtcggcgacctcccaggttgtgagtgcggtcctggttgtcgagcgtgaagaggaaggccatgttcaaaaagtccaacgtccaatttatttcgttagcgaggttttagccgactccaagacaagatatcctcaggttcaaaagttactatatggtgtcctaattaccgtcaggaaattatctcactactttcaaagtcacccggtcacggtagtcacatcgtttccacacggggatatacttcacaatcgcgaagcaaatggacggatcgcgaagtgggcctggactattggactatgcattttgatgggtcgaagaggctcacaggcactggagctggggtcatcttgatttccccgactggagaaagattgagctacgtattgtggatacatttttctgcgtcccataatgtggcggaatacgaggcgctactccatggattaaggattacaatctctttaggcattcgccgattaatcgtccgtggagactctcagttggttgttaatcaagtcatgaaagagtggtcatgtctagatgataatatgaccgcttatcgacaagaggtacgcaagctggaagataaattcgatggactcgagctcacccatgtccttcgacataaaaatgaggcagctcatagactggccaattttggttcaaaatgggaagcagccccttctgatgtgttcgttgagcatctttatgaaccaaccgtgcccagaaaagaagcaattgaagccatggatactcaaggcgtaagcatgattgaagccgactggagagaacccctcataaaatttttgaccaaacaagaactccctcaagacaaaaatgaaggcgagcggatttccaggcgcagcagactttacattattcatgaagctgaactgtataagaaaagtccatcaggaatactgcagcgctgtgtatctttggaggaagggagacaattgttgaaggatatacattctggtatttgtggtaatcatgctgctgcacggaccattgtcggcaaagcttaccggcaaggttttttctcgcctacagctgtgttcgatgcggacaagattgtgcggacatgcgaaggttgtcaattttttaccagacaaactcatttggcagcccaagagttgcaaaaccatcccgttgtcctagccgtttacggtctaggggcttgacatggtcggcccatttaaaagggcagtcggtggttacacgcatctctttgtggctatcgacaaattctccaagtggattgaggctaaaccggtcattacgatcacagcagataaagctagagattttttcatcaacattgtgcatcggtttggggtacctaatcggatcatcactgataatggcactcaattcactggcggagcatttaaagacttctgtgaagacttcagcattaaaatttgttacgcctccgtggcacaccctatgagtaacggacaagtcgagcgtgctaacggtatgatactgcaagggatcaaagcatgagtttttgaccgactacgcccctatgctgtcaagtgggtagatcagctgccgtccgtactttggtctttacgcactactcctagtcgggctaccggccagtcgccgttctttttggtttatggcgcagaagcaatgttgccgagtgaagtggaatttgaatcactacgatttcggaacttcaatgcggagggctatgaagagggccgagtagacgacatcaaccgactagaagaagcccgagaagcagctttaattcagtcgactcgatatttgcaagggttgcgccgttatcataatcggaatgttcgatcgcgagcctttttagtcggtgacctggttctgcggaaaattcaaacaacacaggatcggcataaattatctcccttatgggaaggaccgttcataattgctgaagtcactcggccgggttcttatcgactcaagcgcgaagacggtactctcatcaacaattcttggaatattgaacaccttcgtcgattttatgcttaggcatttcatttgtatctttcctctttgactgctaacttcaagttttttcttgaagtttttagtcagggggctactataataataatggagtgtgatttttatcaattcaatttgcttacttgatgtatcattgccctgtttgatttcttggcttagtcaatgaggactgaaagttttttaacaacttttgcgggttttaggctcaacaaggtttgacaaaaaacttttaagaaatcaggaactaagttaagatattaagcacagcataaattcatcagtattgtacaaattgtgcctccatcatcattaatcgtcaaagtcattggtacattaatcagtatcagttttttcatcatcagacttatcagacccagtcggccgaaggtcgacatcttagaatctctcaactacatcagcagcaattttgtcagccgctttctgcgcatcactgatgaggtcaagagcagcttcttcgctcgtcctatctgcaaagccatcaatggcatcaatatcaactcttggataaagggatttggtcatcaccaacgccagacttgctcccatacttccagcttctttgatgttcttgaaatatgtatccggagcaactctcagcttgtcgaaaatttcagaagcatcaagtgcactcaggccgttgttattaaaaaacatcgcttgaacaattggggcagcagcgttagcaacctcatcccgggctccttcaagttttttgatcttgccaaccaggacatcgaattgagcttgagatttgatcttgcggtctgcatcaacagattcacattaataagtcagcatatggaggataatggcttttgaggtattgattgttgataccttcaacttcctttaaagccaggtctctttgttttgccagttctgccttgtcattttccagaatttgaatctgcttttccaacggagatatcttggcagcttgcactacattgattacggttaatcaagattgcaaagataacagtatgagtcagttgagcagagtttgtgcgtaccttttgatgagccactcagttcaaaatttgattcctggagattagcaatccgatccctcagatcatgttcattcttcctggcaagttctttcgcttcgtgcagttgattcctggtggcttcgagggtcccgagatgagggactaacctctctaaggttaccgttttggcttcgttcctaagatgaatcctctgcaagacagtttaaatagcgcatgaattaaatggcaaacaagatggttgacatcaggtaccagagggcttacatttacaatacgggttgcctgaccaagtgcctttttcagtaggcataactcttcatcctctttttgcttatttatcacgatcccttgaggctgcatgttgtcatcccaccacttgaccagaatcggaaggcgtgaatcctcagctgcttgtatccggaggatctcttcttcatcaccaattattggccctagtgtatccatgaacgaagatgaagcagccaaataaagtctgttggatcaaaatgatttcagatggcatgtctacctgtgatgattcccggtcggggacgagtggactttggtgccttcacaggagatctggtttctgattaattgtcagcatccttcccgagaggactgttcgtttgagcttcaatctcgggaatcttttggcttggccctgcatccgactggtttccagtcgggggctcctggttagcaccgacttcagcttcggccgactggttcccagtcgggggctcgttgctaggttctacattgtcggttgccggttgtttgtcactcggacgatcttctgcagttggcccggtttcttttgaagggtttgcctctatgtcagccagctcggggtccttttcggaaggatctatgtcagacggcttcctacgagtttgagttatgctgttagtattatttcaacagtgggtaagctgcaagacaaggaagatggccaaatggtttgtacctggaagactttctgatttttggcaaaggacgactggaggttttcttcttcggattagttggctttggggattttccggtcgctcctttttctccgagccttccggtatcatcgccttcctcgtcgcttagaaccagcttcctcttgcgagcatctgactggccgactggatcggaagcacttggtcgagcgttagatcgaatttttggtcctccactcgcctgaccagtttgctggcgaggtgatcggcgttgagcaattggaggatccgatttcatcaaagcaaattcctgggcatgatatttcaaactttcaattagcttaacagagggtaaaagcatacttttgaggaaggttgaaatgtttgagtgcataccggtggaggagggttgaatgcgttgaatggcacaacgggcagcagatgtgaatagctgacaacaatagcgtttgagaagatcttgtacattctttctttcatgaccttaaagtcgagagaatctggattttcccgatttggatcatgcttgccatcaaactcaaaagctgtgcgggacctctctttgattggagctaatcgacttttgatgaagtgccgagtgatctgttctccctgcaaaccttgttccttcagttttagcatgcgttccatcaattccattgcctgagcagcttcatctcccataggcaatgagttccatgtgtcctggtaaaccggaggaagacagcagtactcggggagtgcgggctcaggattttgaacatagaaccagtttgcatgccagcctttctttgaggttttgaagggcatggagaaatatttttggctcaaggttcctctgagttggaaaccagctcccccaacaacgcatggtttgcttttgtttggctggggcttgaggaagaagatgcggcggaacaaggcgaaatgaggcctaatgcccagaaaagcttcgcaggcatggataaaattggcaatatgcactatagagtttggattcaagtgatgcaagctaatcccgtagaagttcagaatcccccggaagaatctagaggttgaaagagaaaatccgccatagaagaaatgagcgaataccacgatttcgtgtgtgtcgggggtcgggaatgcttcgcagaacgccggtcgccacccgataatctccttcgctgggagaacgccgtgcgccaccatctccttcaggttatcttctgtcacatcggagggcgcccactgactctcgaagctttctctttcttctgccatgaatgtgaactggatggtttgatttggtccgagatatggctggagaggaatgggaatcggagtggtggacgcggggagaaatttcgtgaagtttttgagggttggagcagattgataaaccctagcttcgtcggtgcggttctgtactgtagcacggaatggggaatggcgagagtctcggtggggaagacgaaacgacgtttggacttcggtgtctttagggtatcgggagtactaatgggcctgggcctgtacagtacttcagcccaattatgttttcagcgtggcccgttgtgatccttaggaacttaggcgctttttgctttggcaatatgtgctcacaatgatgcggtccgatgctgttaaaatcctttttaacgcgattcaataattctttggaattattatgattcacatgagaaggtgcccgacagaaaggtgttataccatttttgtaagcttttttaggctacaaaagatgttgggttaatttgagatgactggtttattagtagtcattctcctagcatgttatatgcttattttgattatggtaagggttatagcctaagctaatgaacttcttaattaccatgatctttatcatatttggtagatcattttaagagtttcttactcggattcctaccaaatatatctatttttggaccttttgagtgtttatcattcggcccttttcatattttttatccttgatatattcaagtgagaagcagtcggctgggtattttattgagtaccatgcatgcttcgaaataaaatcacccggtccttgactatatgtttagttttttaactaatcacatagtcgggggctacacctaattaggtgcatctactcgatgcaccatgttttattttcgcccttcacagtcttttagcactcggcaagccgaagcaagttgaattgaagcactcggattattgttttttgtttcgagaagactattttggtcaactgtgaaggtctcggaggctactgtggagattatggttaccccatatctacatggcggttacattccagctggatatatggtaccaaatatagatagaatatctttatgaggactcgggttagattctaaacttgtatgacaagaaaatacccgggatcctagtcggttatgattgtattttatctgtaatcccatgttccgttaggatatggactgtattttgtaatacggatcccttcccctatataaggaggggtccgggttcctctcaggacgattctttttctcccaatcatacaatcaataacacactcggcggaatcatctccggacaggagtagggtattacttcttgaataagaaggtctgaacctgtataaaattccttgtctccaaacccatccactttcctagcttgatagccaccccttttattattgccgaaatcttgtttcgacaccatgccagagtggatggtcagagcatggtttaagtactgaatggttgtttgatggaatgctaaacagtaggcaatgcacgcactaacacgtgtataagctgaatttgaaatagaagtgaccagtgacgtagcctagggctcaacttgtataatttacgtaattacctttatcttccatgttttaattttaaggttttaaaatgtaaattttaatggatatttaggtttaggagtagggcagcagccctagctgccctacccttccgccactggaagtaaccaatttacagaaaactgatttttcactactccctccgtcccatttcaagtacaactatagttttttacgcccaactttcatcgtccatcttatttgaatattttttgaaaaaatttaaaaacataagtcacgagtaaagtaatatttatgttttattatctcataacaataaaaaatactaattataaaaaaaatttcaaataagacggatgatcaaagttaagtacgaaaatttatagttgcacttaaaatgggatgggtgagtatgtaataccggcagcttggtctaaaagattctaaaaatagaaaggagcatgaatacttatctctgatgaaggccgatatatgtttcatctaaaatttcgccaagcatgtaacaaccaatctctcaatacttgtacgccagacagaaaacttgcatcggtaaggttgaaacaaataaatttgcagatcaaagtacctgcgtagaaataataataattttatcaggccactcagctactaacataagagcataaacaaactaaataagcatatataaaaaaaatggcatcagctgacaggtgaaattaaagcagaattaataacattagagtcagagcaagagggaggaggggtgatgccgaagtagatgagcattgatagtttggtacaaaagaatcggagaatctgagtctgaaaatggggaaattcaatactagattatattcacagtgaattattcaccaataatgcgttatccattggacccgatgtggcggatgtgcttcctatcggtagcaatcaacagaaaggggatgggggaggcggggaggggaagcggcgggagaggggagaagctaacggtgctggtcgtgcttcccgggagctggaggtgcgcctctccatcaccgggaggaagagccgagggtgggggatctggcgaggggagccggagagacacgttgcggggagaagcagcagccattctgccgtggcctcgtggggaggtgagggaggtggaagcgtattttgcattgatgctacggtgtctattgggcttttggattttgggccctcctgggtgcatgtgtccaaccatcttggatcagatccttttttatgatcggacggctgttattttattggtgttgtggctcaaccacaatgcagagaattgatattaactatactaaagctatgttctttccctcattttctatataaaagttattttaaaaaatcatattaatctattttttaaaaaaaattagttaatacttaattaatcatgcaataatacgagcttcgttttacgtgtcgggctagatatgggcccagagcttagaggtgaaaccatccatccgaaatgaatgaatattgtctcaggcgacacctaggcgtcctttttctcctcgttggattccctctcctctccgtctgtggtggccattggtctagaggatggtcgggtttatctcatagtcaggtaaatcccgttgttggtcctctcttttttctttgttgtgcagatcgaaggaggtggtggcgtattcctcctccgtctccatcttagagttctccggcgatggaagcacttgctactccttgcttttggcatatgcggtccggttgatgttcaccgggttagtcccacgcgccatactacttttcggtgtctgcaacttaaagttctccaatttcttttgagaagaggttgcgccggccgttcacttcttttcggtaaccactcacataagggcggtgttcttctccttgggtttcggtgtcagatttgtaaggggcagctgtgatttgtttctttggccaaggtagcttcaaccaccatagtagaggcctcaactggattcgctccttggctatcttttgccatgttttcctcttcaccgtcgccgttagcacaggccaaatcgccgctcccgtggaagaagcagacaaaggacccaattgcttttgccccgttcttttcaagttcttttctacaaattttcgatgtatgctcaatttggccgttactgaggggcctttctacaaattggatgttcttcccgttgttgtgttttatcatgtgccttttgtatctaaacttttataataaactagataaattgtctgtgcgttgtaatgggtgaacactattttaattttgttattgttatacggtttaattaaggtgaaattcactgtgagaatttgcttggatatattgtttttcttaaaattcatgagctgcaattagtagtccgattatctcaagttagcctgtatgtttttttaaagagatttcttatacgactacttctgtattttaaaaaacgaacaaacttaaaatccgactcaaatacatatatgtatttaaaatcgaacgaacttaaaaaccgactcatacacggatgatataccaaagtaccagaaaaacatctcaaattcttataaagtaaagatatgtatcaaagtaccagaaaaacatctcaaatttttataccagtaacacatgcatgaccttaaaaaaaagaaatgaatgaacattctccaacctttgccacagcagagacgccgtctccaagcgaaatactcctactccgtcgacttatcaacggtctagatcgccttaagattcgtgcgaagaagagaaaaaagaacaccttatccctccctaccctcttcctctgccaccaccactcgaggagcctcctcggtgtctcccgatccgccgccgccgccttctccggcgatccggcagccgcatcctgaacgctcgccttcccgttgcccccgccgcctcgccgcggcgccctcaccgccgcccaggcctgacctccaaacccgggaagccaccctctcctccatccatggcgtccgccgccgccacctcgtcgtcggcgtcccttcgcctcctcaccaagccccccaagcccctcctctccaagccccacctcctcaccctctgcgccccggtctccttccagcgcctcgtcgccaggtccagcgcgtcgccgaccccgtccccctccgccgccgccgccgccgccgccgcctcgggctccggggtcgatccggcgcagcttcccccggcgctgcgcgacatcgtggcgctcttccagtccgtgccggacccgcgcacacggtacaagcagctcctcgcctacgccgcgcggctgccgcccatggacccggcgctcaagaccgacgccaaccgcgtccggggatgcgtctcccaggtctgggtccacgctgcgccggaggagggcggcgcgccgggcagggtcagcttccaggccgactccgacgcgcagctcaccaagggcctcgccgcgctgctcgtgctcggcctctccggcgcgccggcgcgggatgtcgccatggtgcccgtcgagttcatcgagctgcttgggatcaggcagagcctctcgccgtccaggaacagcggcctgctcaacatgctcagcctcatgaagcgcaaggccctggaggttgccaccggtgaggtaaccactgaggaaattggcagccaagaagtggtccaagaggtcgctgaacggcctgctgcgaaggagaaggaacccgagtttgcggctttcggtgcgcgagaagaagagggttcagaggtgcatagcccacaggaggaacaattggaggaaatgccagctgatgtgatggaagggaatggtggtttggggggtgggaggcaggagaggataaaggagagccttgagcgcgggctttcgccggtgcagctccagatcgaggacatatcgcacctccataagggtcatgctggggtgtcaggaagcaatggcgagacgcattttaatgttcgggtggtctcagaggcgtttcaggggaagagcctgctcaagaggcacagggctgtgtatgatcttctgcaagatgagctcaagaatgggttgcatgcgctctccattgatgcaaagacaccatcagaagtctaggtatctgcacgactgcatatacagttaacagagacgccatagatgcatttttggtcatgttatctttgtaaggtttagttttggatacatactgtagattttgaaagatcaaagcttctcagttctgataattttgtctttttactgcaataattagtgccttaatattatggcagagatacacatgaattttgtcatgccagaataagaaggaacgacttgttttattgagttaatatgtatggctcactgatcaatcttgcatgttctattagcaaaaaacagaaagtgattaggctgttactaccttccagcaaactcaactaatctaccctattaatgctggtcccagctgagaaatcatcatgcatgtgtcattgtttagagtatgaattcgatgcacataggtcataggtcatagcatctcaatgttacaaaatgggcttgaattcttcatgtagatttcaaatgcatgactggttgcttgctttttttattaaatgaagtgtcattaaaagttctctattcatgaaattctgttgggcacatattcactgcacaccttactgttttgatgtttttctttgcaatctggagattaaagcaggaatttctaccacaaaaaagtatagttttgcatactgaatctacatatttacagcatatatggccattagttttcactgtatgagttttgaatatttgaatgccaggagctgacaggatacaatgtagatatattggagttcacagctacctggaatgcttaattccttatgtaatatatagttttctgtatgctgcaaattctatgttgtgcataagttaaaccatgttggaatgcttgtatggaaacagttctatgcaaagcttggatgtctccactgataatgttctctcaaatatcctttgtttacagtaaattttgtattcaaattttaaagttttctcattctccattgtcaatatttttttattggtgcatgtgttagagaacaaatttaatttatttgctaaatatagtatcattcgtccttatctgtgaggttcaaagtcacttatttataccgcaacaataaaatacgcctaaccatttatactgtccaacaagtgaggaggctggagtcgtacagtcatgccccgtaatctagtgcaaggaataattcttgaagtttctactctaataatttgtcttttattactccagattatgacaaacttttctatcatctatgttccactgttaacatgatcaaattatttgctgagataaaacttcacaagtttggttggagcagcatagcctgtacttgcagttgcactaggtagtaaacattaataagagtaacttagacatactgatgataaatgttcataaggttgtgaggtacatatatcgcactctgactagctgatggatcccattataaccatcgctggttacttgatattgtagcctgtcaacataaattagcgtatcagtcaggcttctcttgcttacggctagtttgcagtttcttatttcaattgcagtccctcttggtgtgatggatgaaagtctgattattctgtttcaatgttggaagcaagattttgacgcagtctttatctgttggaatggttgtaagcatagaaattatctgtttgattgaggggattttattagcaatagtactacggtgtaccaaaccgaaaccaggaggggctttagagttcatctcataatttgattctacgttgaggtttaggtatttattgattttattcatttgctgcaatcctggttgcttgttgtcagtttggccttacctgatgccttgggtttctccattgtactgctactatttcttcctgaatgcataggcagggctcctgccattgtttctacttcatgtaatattaacgggatgtttgtagtccatgcaagatttagtggaatatcgtatgtacaagtacaatagacagtatgggtgttacattacaactccactgcttacatccttgttcaatgctggctgtctggctgtgtagatgttactctgttagagcttaatatgatatatagtctatcagggcttacgtcgcatttgtggttgttcctaaagatagcttgctgtgcacatatttgattacctgacaaatttgaagctggaagtaactttcaacctgtggaacatgaatacaacttgcagtagccaagctggattatgaagaaatgaacttgttcagctctgaatcaatacctggttgcagataactgaagcaaaaagctgaaaacctggattaaatcctcaaatgcaaaatggataactggtggtgagagtttgttgctaaccttcattttaatctgtgctaaccttcattttggtggtgggagtttgttgcgcctgtttggggagcttctagctactgcagctgaatcagaagctctcccaaacagtctagcttttggtccagattctgataaactgtaattgtagaatctagaaaatggactagaagccggaagctgggaaacccagcttttccagattctcagaagctggttaccaaccagctgcttctcagaatcttaagctccccaaacatgccgataatccatattgtccgttgtactcctccttcggtcccaaaatacaagaaaataccttatattttgaggccattttgggacgaaggaaatacttgatattccatttactacggtggtatggctgtccattattttagtcatttttttacaaaatcgacaacaatatttttgagaaaaaccccatccgaggcgaaaaaaagcagggctactgtagcgaatacgaaaacaaacaaactacatggcccaagttatatagtttttttttgcgctctggaggtctatagagaatagatattccacttctattcttgtgatgacctccattcttgcgggattgcgcgcaggtgcactgggaggtccctttggatattcccgcccctttcaaaccatccaagacgatcacccctgacggagcgtgaggctcctcaccgggagaccgcgcaggcccctctttgtcggttcggccggggacgctaggtgaagttctaagctctcagtctgtggaacgttcgcgagcaaagagacacgcaagacacaggcgatgtagacaggttcgggccgctgagaagcgtaataccctactcctgtgttctggtggatctgtgtatgaagaagctacaaagagccggagagcaagagagcttccactctcgaaaccctcttcctcctttttttcctctcgtggatctttccaagttccgggggatctcctcctccgggccccctcctaagtgggcagggtcctccttttatatctcaaggggataccacatgcaccaattctacctctttttcttttgggtggggacccatcctatctttactaaaacttggctcgccttctcttggaagcttgtttttgagtgtggccacgcgtcctcactcgtctgacctcggggatcaccctgtcatcccttcataaatgggcggagacttgcaatggctgctgtccgaatgaccttctgatgggacggcccatacctacctccactccgccggaagcaggttcaacgtgggaacgcggttgtctaccgatgacatgaccagtgtcagatcggtgacaaaccagtcatttttgtcctccacgcgtcagcttagcaaactgcatgtctgcccttcttcatacaatgtctttcttgcaatggttgggatgaagcctggtatatatctgaccgggaccaacgtgccatctccaggagctagcacgctggctccggctagggacgagtgcctagaggctctcatcctgacgggatggggcgaggcgtgtgtcagatcgcctgttgtcacctaacccgcaatctgaccggtctgtgaccggtcacagaccggataaacgagcgcgctgcactgcgttacatgcggcgtgacgcgctcgtccaaaacgcaataaatgcggttaggtgagccccgctgtgctcacctaacccatacacgcggcgtaaaacccacaaggggtcggggcgcctcggccctcggggccgaaacgggagcggtccgacccctcggggagacaaagagaagggcggccacatcaatctcgggcccccctccccgagggggttaggccacgtgggtgatcgtgtctgcctcaagcctctagtcatgatactcccggtcccatgtcaccgacagtagcccccggcgttatgccagggcgatcgcccccctcgagggaaacggtcgggcatgacgccactcctatggcctggtgacaggtggggccggtttctactgttgggcagaaacccagcggtcgcaaatcacgtacatcggcaatggtaactcgactgtcagtaatgagcggtctcttcaagactgccacattacttgagtagcacacgaatcgggacgagccggttcgttttgcctggagatatggtgatggcgcttcggtcggcgagcgtaattaacgcgcgcacgatatgttccatctcgactgccacagccgcatatccacctcatgcgccgcaaacgggcgaatgggattagtggaagcgtgggcgcgagaaacgagggggcgagatagtgggcgcgagaagcgaggagccgggcacagcgtttggcaagggtataaagacgccgaggaagagatttgcttccttcctctcgccattattccccttgtcttcgccgcttgcgccctaactccttctttcccgtgcccttccctcaccacacgcgctcgctctcaaacatatcttcttccggcgtcatggcacggggctccgttccgcttgacggtagcgtgctgccgccttcccgcatcgtgagcgagaggcaggccgggctgccgcgccgcttcatgccggaatctgccaccggccaggaggtggtcgcgctgggtgagggacgcccggcgccacactacccggggcggtccgttttcttcctccctttcgcaatggcagggctggttccgccattttcttctttcttcatggatgttctggagttttacgatctccagatggcgcacctcacccccaacgcggtaatgacattggccatcttcgcgcacctgtgcgagatgttcatcggggtgcgcccatctctccggctgttccggtggttcttcaccgttcagccggtgtcgccgccgtcgatagtcggtggctgctacttccagccgcgggggccggtgttgaaccgctacattccctgcgtcctccgcaagaagtgggatgactggaagagcgactggttctacacccccctcgccgacgaagcgcgcctctgacttccgagccagcccccggtgcaggcctccagctggcgggtgccggtagatctgggagacggctacgacgctgtcctcgaccgcctggcgggcttgcgatcccaggggctcacaggggccatggtgtacggtgactaccttcgtcgccggatcgcgccactccagcggcgcgcccggggcgcctgggagtacaccgggtccgaggactgtatgaggacccaccggggggtcaaatgggactgggtccctgaagacttcaaggtaatgatccaacgggtgctgaatctcagctccgtggaggcatccctcatcccccaaggagtcctccccctctgcagcgatccagatcgcgtcaacatcctgaccatcatgatgacggtcggggcctcagaggagcgagcttctcgaggccatgacggcgcgggcgggagtcgcaggggcgaacaatctactccaggagggggtcgtgcttccgggccccgtgacgagggctcgggggacagccgccctgccgacgcccgagggaagaggaagcaagagggtacctcctccccatctcctccccgagggggcggggcagcgcgtgtcagcagcaggcgcccggagggggccgcgccgacgccgcagcccgagggggagcggaagaagaagcggctccgcaagatggggtggacagaaccatcccggggaaaccttatttcccctccaaggtggtcgtttaaccgaccccctcacaggttcgtcccacgcccattgtggctgtattcattctcccaacgcgagtttttactcacccatcttgtttgttttctggtctttcttctgcttcagcgagatctcgtcgcgtccctcccgtcattccaagtccggccaatctgaggccgaggatacggcgaccgcggaggcccggaggcgggaatctgaccggcgagaagccgcggatcgtcttcgggaaaccgaggaggccgcccgggctcgccaggctgacgaagccgctcgggaggaggccagactccgccaggccgaggcgacgacaacctccgaggcaacccgcgaaactgaccggcaagaagccgcgaatcgccttcgggaagccgaggaagctgcccaggtggccgtccgaactcgccaggctgaagaagccgctcgggaggaggccagacttcgccaggccgaggcggcgacgacttccgcggcagctcgcgacgaggccgcgggcgcatcgcttgggcccactccctcgggcgacacttaggacaagccaggtccgggggacgtccccgagtccggcacgtccatcggcgggccaagccgcgcggcatcctcaccgaggcggttctcccccatgccttccgttgccccgctgagcgcagagccccttctgcaagccttggccgtcgcaaacaccacggtgttggacgggttaagtgcccagatggaggccttgcaagcagagcgggtggagctcgacgccgcatgggcgcgtgtcgaagaggggcgtcgctcggtggaggccatggtggaggtgggccgcaaggcacaccgccggcatgcctcagagctcgaggcccgtaagaaggtgctggaggagatcgccagggaggtggaggaggaacgggaggctgccctcatcgccaccaccgtgatgaacgaggtgcaggacaacctccgccttcaacacgggaactgggaggcggagctagggaagaagctcgacgccgcccggggggtccttgacgctgccgctgcccgagaacggcgggtggcggagagcgaggcggcgtcccggcagcgtgaagaaaccctcgaggcccgtgccatggcgctggaagagcgttcctgcgtcatggtgaaggatctggcggaccgcgaggccgccgttgccatttgggaggtcacactggcggcgcacgaagccgcctgtgccgaagaggagtccgcactccgcctccgcgaagatgcgctcaccgagcgggagcgagccctcgaggaggccgaggccgcggcgcaaaggttggcggagagcgcgtccctccgtgaggctgcgctagaggaccaagcgcgccgcaatctggaaggtacccgcgccaagagggccgcactgaaccagcgggccgctgaactcgaggcgcaggcaaaggagctggatgcaagggcgcgtagcggtggggcggttacgggcgacagcgacttagccgcccgcctcgcagctgccgaacacaccatcgcggatctgcagggcgcgctgaattcgtccatgggggaggtcgaggcccttcgcctgacaggcgagatagggcctagcatgcttcgcgacgtcgtgtcccgtctggaccgcgccaggcggcaggcgggcctctggggtgggcggactgtgaagtacgccgccaaccaggggggcctcgcccagcgcctctcggagatggccgggactctccagcggctccctgaggagctcgagaggacgattaagtcatcctcgagggacctcgcccgaggagcggtggagctcgttctagcgagttatcaggccagggatcccgacttctccccttggacggcgctggacgagttccctcccgggatcgaggacggcgcgcgcgcgcaggtccgggacgccgccgaccatatcgtccacagcttcgagggttcggcccctcggctcgcgttcacccccaactccgacgaggagggcgataacggcggtgtgggcgacagtggcgacgaggctggcgacccgggtgcatcggagtgagcccccaggcccccgccaatctttaaatagttttttcttcttttctttcttctgaggccttcgggcctctttcttgtatagattaacttaatctgcaatcaaaataaagaaatttctgtgtcaatttcattttgctgtgtgtatgaaaacgaggatgatctgtgccatggtccttttgcgtcttagcttgaacaagggctcgtgcccaggtcctagtcctcaaatggctcgggtcggggctagtgcctggggagatccacgtgtcgagactggccaggccgggagcgtggtgaccaagggttatgggtgacccgattgtgggtttttgccgattcccccccggagttcaccacgtcccggggcacggctcggttctgggcccctttttggcgattttagccggcccgagcccccgagggcaggattgagcacgagtgacctatttcaagtcaagattcttcaaaaggaaacaacagcacagacacagcctttaagaaatcgaaaatgcttttattgaaatacagatagaaaagagataagaatatgcatgtgtggtagcccccggccaaccctgcacgcccaaggggggtgcggggttggcccgagcccaaaacctgacacccgaaccccattaggggtagaagcgacgaaggtgttcgatgttccacgggttaggcagctctgtgccgtcacccgtggctgtcacgtcccaaaacgactctaaaatacatcctcgaaattgtgccgagaataattaaaattcatgtgaaagcctccaaca

SEQ ID NO: 29129 - DNA, 13839 bp, Oryza sativa
ctcccccctccctcccagatctggccagaggagggtggggggaggtcggcggctcccggcgcgggccggcgattttttttggttcgtttcttctattttcgcaggtgggccgttgccccgactgcgaagatggatgattttcgcagtcgttgtggtgcaggcggacctctctcccgcctgcaaaaatgctttttctagtagtctgacccaaaagaaaaggtactgcaaaaatggtggagaccgtctcatggtcatagggtgctcaatcgggggaagtattagtgcaatcatgataagttgctgtaaaatcaaagttcgtttgtttattattttgtgatgaacaattggcatataagattattggttttgatatttttggagattatcggcgaagtggttttggagatgattagttttagattgtgaacatgatcaattctgtcagattggaccgagaaggacaagttggcagtgataagttcaaacttttcaagataatggaaacgttttaaatccttgaaaagtgcaattatatctatgaaattagatagacacacaaacacgatttataacagatattatattcacacaaatgttctacatgtgtcgccccgtgctttttaatatggcaaaaacatacttcagtaaaaatcgcatgagttgtgactgttttactcccctaaaacaatgaaggatttttactgcagttgttgtgcagtttttatttgggcataaaattagctacccacactctagaacttagataataaatagcatatatatagcaggttggtagatgattagtatctgattagagaattatggatagtgggtgctattgcaggtgctaagttctaatagtggtttttagaaaaaacaaccacaaatttagattgtacattaatactaatataaagtttcacgtaaaatctagaatttagactgcatacttatttactccttcattttataatataaaataattatgaaataacagataaatatataagataaataagacaccatacgtgaagaacattgttttagcattccagcggtccaataaagtcaacagcatactgctacaaagaaaccagattacttctgacagccacaaaccgtcgggaaaatctattatcacgtcaggaaaatatatcctgacatgttaccgtcagggaaatcccgtcgggattggcttgtcagcgaaattttaatttacctgacggatcctcgtcaggataattaatcctgacgtgggtggccatcacaactaatttttctgacgttatgtgtgccatcaagaaaataaaaataatgatgacgtggattcaacccatcagccatatcatggttttgttttgacagttacaccacgtcagaaaattaaagctggaggtccagcggctacacccccagcaatgctcatgatacaaagcacgcacataaatgctccaaacgtcaggatcaatatttcataagaacacaagtatcaatggtcatacatgtatcaagtgttaatatttcattatatcattgatatgcaaataccaagctcaggtttagtattacaatataacacaagtttagtattacaacataatgcacaaaccatcaacatctagaatttacttgacactaagactacaagtttctagagatgctccggccattgcttatttaccacttgagattatcatgcatcctttaattcttttcggagatgggtaataacaccagcactgctccttgagacacaacaatgcaaccttgctgcctatctacaagtccgatttcattatacattttttgaattgaacaatgtctatcaaaacaagggatgcaagaaagtacatagattcaaagcatggagacaaattggcatccatcggttcagtaatatctagaaaaattaccgacagaacataaaagcagctatttcaacctcagcagcccaaattgacatgataatttcaatagaatttaggcatatgaattattatcaattcattcattataaagacctttgccataagtcaaaccactctacatcaactcaaaacttgcctcagtgtttaaaatcaagattaaaaatgtcagttgttattttagataaatgcctatgatgtctgttgtactaatacccactaatcaagttatggagagaaaggtggctgctaatatcctaggtaagaataaacagaagagcacaagttgtactacaattagcaccgcataaccaagttccacaaaagaaatagatagtcttaatgcaaatgatccaaaataatattcattgatttgttagtgatatgccctagaggcaatcatagagatgattgtatcacatactatgtttacatatttatccgacattgttccttgaattagataactccttattggttaatgaatatgtgattctttcattaaactctttatgttgtttgttactatttctaaaggattcctgatcaaatatcatatgtggaacaaatatgtttatatgatcagcacatgtattaattgatgatcatgtctcatggatcatggtatagagataccaaattaataatgtggacacatgttggtgaacatgttgttggatagacccaacatgagacactacaaaagccatatgtgttgtgtcatcagtgatctcatttagtgttggtgttgaatccttagacctgagattatcatggttctcaacatgtgtagcatcttacttagggactgctaaacgctactccgtaaatgggtagctataaaagtagttttcgggtatgctatgaaacatgtagtggaatatgaataatcaagatgggattttaccctcctatggaaagatatctctgggcccctcgatgtcgcagattatggatgtgcatggcccatgccgaaggtgattgaggagtcaatcacaagttatataatctatcaacaggttcgagtgaatgattgagctattaaaggatggcacatatctagccttgagcttaatcgatatcgtgaggcaaaggggttcatacaagtatacactagaggttcagccgatatgatctttatgtatacccggtgggtcaatacgttctgctaggagccgctgttgacgcgtggaccgaaaaggaattttcgggttacagccgagtatgtatgaacctacagggtcgcacgcttaatgggccggaataaggggattggatagagatccaatatgagcttaattcggatagggatccgaataggagtcctacgggccttggaggcccgagtgatagatcctatatattcgtgaggggtgtgaccggcgaaggcaattgcatcacgtgagaaaccctagccgtcacctccctccccgagcaaaaccctagccgcgcccgggtgctagcatatctgcgcgtggcgttccgtccctgtacgtgttgataccggtagaggcgccgctggtttgcggtgctgatcggcttggtagtacggcgaggagaattcacgatgaggtgaaggtcgagccggtgcgatcgactacttcctctacatcgacgcgcgctacttcgctagagttccttcgacttctcagcatctttttctgctgcgcagcgtgtcgagtggtaacgatttatgatctaatacttgcatggttcctggtttacgcgatagaaaattttgatttatgctattgtagcctacgcgtatcccaacatgattatgatcattcatgatttaatttaatcaagtctgagtacatatttctattacccaacttaagttgtggtaaccattcttatcactatagaatcaatatgggcaactgcactaagaaaacaacaagacacattggtatatcatcaaacatgcgtaacagctaccattgtattgcttgtaacacaatagtggacagtaaaatcatcgacaattcagcttacgaaagattttctctggaaggacaggaagaggtggacaccaaaaagcctgcgatactgtggagattaatcctgcacaatcatgtaaaggtgtaactgacactaaaagtgcagcaattttcaaccataaaaattgtgaaatcattgtctgcagctgcaaataaattgagccctctgagaattttctggaaaaacctaagtttagaaaatttgctgaaactagcctttgaatggtagaagagaacgggcattggttttctttacaaatcgcgtgaaaatatgataagcttcagatgtattcaaatctgccatcataattctctggagaagatattagccaccattttcattttatatatctaaaaggcatagagaggaaaatatagccagagcaaataaagctacttcacatctcaggaagagacaaatcttctacagtcctatagcaaagcaactaattaaattaggcaaatagcagagtatacaaacaaaggcctaataaaagtactgaaaaattagcccatttggaagcaatcacatatattgactttgctgcaactatatgaacaaaagataagctgctgatagaacgtcaaacaaatcaccactagattattttcaacacaatctgctacagaacaacaaaaaataaaaatgggggcgctaggagtagtaagtttacctcatattagtattccctagccttttacccatccttattagcgtcatgcctatgcatctcctgttctcgaaaagcatccactggaaggaatataataacaaaacaaagtcaagctagggagggtatagcaagaaataacaaaggggtttattcacagctcacattagaactttgctgttgtagatctaacagttaaatttaccaacagatctagggtgcatcaacagatcaacttgcactgaaaaaagaaaaaacaagaacatagaactcaccagattcaaagaaaaatgacagtaaaagagagtaacttaccccaggtagttcttggttttgatggagtagattcagcctcgaacaggaaaaggccgcaggagatgctcgagcttggcagagactgcaacttcagatctgaacggagagggagacatgaagtccaccgttggaacgggattcagattaggtgacacagtgtatgcatgtcacaaagtgacatatagtcgatctcagccctctaaaacaaatccaatgactccattgcttgggcccgcctgcatgtccaaaataatccccaatccatccattcccgtgggagacggcgccccaatccatttcgcgcgcttcgcatcgccctcgttcggctgccgccatgagccaactgggaggtgcaccgttgccatgaccggagaggcgccaggccaccgggctcgccgcgagtggggaggggaccgggcgaccgccgcgcgaggcacctgagctcgcctcgcccgcgtccggccattgccgcgagccagctaggaggctcgtcgccgccatgaccggagaggcgccaggctgctgggctcctcgcgagtggggaggggaccaagtgaccacgcccaaggtcgaggctggggccctgtcgtgccaccacgggcggaggcgcgtggaggcggccggccgctaggcctgacgtgtgcttcaacaatacgatatcattagtgattttacccagcttgtgacaccaccaagttgtgatgatgatattctctgtgatcaagatctgtactaatctttgcaagatggttacatggcttttggacaggatggttaggtagcttttgtacatgatggtttgattgcttttggacaggaatgattaaatgccttttcgacaggactaactatagtattttgtggtctctgtttagtattttggacagggccgacggtaatattttgtggccaaattgtacaagtgaacatggcctacccttagaatagttgttctgtatgctccaaataattgtttaaatgacatgtatgatccaaaacttatctcacaacattaccaacttctatatggttgttttcaagtttttgtgttttttgaatgctccaagtttaaagtttctacatattgcaattattttcatctctccatccatcaattatggggatatatatgctgtcaaattttttagaaaataatatcacataaactctgcatgcttcttccaagacaaagatcatggccaaacatatattagctcatgtgcagttgatgtacaacgtaaatactcatgtttgattgggagattaaggtgaaatcataagcaaagagaaatatgcgggtaaatgaagctttataacttctgcaagtccaggaataggatggcatgatgacatgatgtaacacatgaactgaaacactttgagatcagaaaacacaagagttcagttgtagtttcaggtttaacaagagaacataagcaatgtatgcgtttccatctgaatggaatgcaatgctacagaagttaaatagtactagtacaaaatctgatttgtctaggactgactacatggcatcagctaatgtactcttttgagggtacattattgctaacagaactgatcaaaacaacggtggaatcctcttgagacagcaccatgtccatttcattctgtagaactaattaacaggaagattgcaagtatgtatacatctcaatgtgctccgccaaagccaggatcttgagatgcttctttttcctgagttcgtagggaacaggacgacttcaggcaggggggccgcccgcctccaccagcgcgctgtaaggcctggcgaccggccgactccatgggaccctggtcgtggtggcagggcagggcggcctggcggctctccggccgtggcggcacagcagggccccggccccggcctcgcgaagcggtcgcccggtcccctccccattcgcggcgagcccggtagcctagcgcctctccggtcacggcggcggcaagcctcccagctggctcgcggcgacggccggatgcgggcaaggcgagtgcggtcgcctcgcgcagcggtcgcctggtccctttcccacttgcggtgagcccagcggcttggcgcctctccggtcacggcggcaacgcacctcccagctggctcgcggcagtggctgaacaaggacggtgcgaagcgcgcgggatggattgggagcgccgtctccctctgggatggatggattggggattattttggacctacagatagggcccaagcaaccaagtcgttggattagttttggagggctgagatccaccctatgccaccttgtgacatgcctttactatgtcacccagtctaaatctgttggaacgggtgccctagttggtgggggagcaggaggatgccggaggtagtgttggaggatagctggagcctgaagattgcaggggagagcacttatgtgctgtgtggtatgggatattttaccctatgttatttgctttggccattcccagtgtcctgactggtgaaagcacgtcaaagaaacttgttgcccgcgtgttcggtgaaatttttggcgcggcagcaaaactattggtgcggtcacattttttttggcacgattttaattcaacatgctagaatcctcgcgggaatccaaattttttcaattgacggcaaataacgtcagcaaaattggtgttgtcgtcacggtgcaaagagcacgtcaggaaaattcaattcttatgacagctatacacgcacgtcacaaaagttcttgtacttctgatagttcaatatatacacgttaggaaaattttaggccgtcagggcttgttgagtttcgggtagtaagcggtcgcaaagtgctattgtgtccgctatcttaggtccgctagcttgtagtggtagcggtagacattcgctactgctatgaacactgtttattgccttggtctaagtataacttggtgctttactttttcttaaatttctgtaggccaaacacaaagaaagatagatcatcaggacaggaactattagctcagtatgaaccagactgtagctagtagatcaaccattaattgcaactcatttgatttcccccctcacagaaaactcattttggtacattttaacgggaaatttaactatttgccatttttacgtttgacaattaaccaaatgcccttcttagatttgcagttaagaatttgccactggagagagaagcttttgtaattttttgccactttaatttctgcactgtgcagcgccacatatacatgccagcatggagcaggcacgcgaaatgactaatctacccctgttagcaattggctgtaatataagctgaatcaggaataatatttggacaaaattgctttcgcaaaatcagttgcataggtatggatgctgttcacttttatgaggttactgtatgaaagaccgagtacatccacatcagataacaaatcaatatttgaaggaatagatccgctgagatggttataaaaaattttaaaaacgatacttaggctaagttcttttgttcactttcacaactaatctctctcgttttttatgtgtacgttttttaaaccactggtggagaaaccgtttgtagtcccggttggtaacacctatttagtcccggttgtccaaccgggactatgaatccgggactaaagatagctatctttagtcccgggtgaaataatcgggactaaagatcgatctttagtctcggttcgtgttaccaaccgggactaaagaacacgaactgggactaaagatcgatcagccacgtggccgatcaaaccatctttagtcccggtttatgttaccaaccgggactaaagatcggtgcaccatttttttttgcatggccctgtttgctgcatggttgattatatatatatatatatatgttacaatacatatatatgcataatatataggcatatatatatatgtgtgtgtatgtataaatcatatattatatacacacacatatatataatttaaagcacttaacattttatgtgcatatatatatgttaccaaaatatatattaacacaaaagtaaatgtgtacatatataaatatatatatatatatacatgcatatatagtacaattcatttgctcggtagccgctatagctacgacttcgacttcgacgccggcgttatgtcagaagaggaaggaccgacgttatgaattgtcgaacagtcgtagtagaattcaccgtcgagattaaggacttcttcgttgatgaatcccatcagttgttcttgaacagctatgataaaatccttttgtgggagattatccctcatgtgaatacgctatcattcgaaaaataatgacgtatcaatatatgaaattaataaacaaattaacaaatcgatacgcaatgaacttttgaatggtttatgtatacgtacatcgagctctcgtgttgtgcatatttggtttgataggcagtgggcatactcgcatacgtagtagccgcataagttagttctctggtcctgctatgcacactacatgagaaacgatgagagatttaatatactctttatattaactgtaattagagattcaattcaatataattttggatcatgcatgtactcactggaaaatgaaacctccgttcaagtttttctttccaagtcctgcggaccaattgatggaaccgatcccaagccctacatatgcagttgcaagctatgattaattaaatattacctgagatcaacataatagcaatagattccccacgactttggaatagatggcattatattacctgtctatcagtttgaagaccttgtcaaaaatcttctcctctttattcattgagtcgtacacagtgactctgcatgcatccaagtcgaagaataacaggaccaagtggaatctggaatatgcgcgcgcgtgagatgagatatatatgatcgaaaatgcacatgctatatgtatgggaatgaaatttgttcgaacgacaataaaaactcactctgtgttgtacggcagtagtatgtatgtcttgaaatgctgctgcgttaggagatggacgagattgtcctctgtgtctttctcgtacttgtcgaccatttcggtgttgattctctgagggtcgatgaacccagtgtcgtagaccctccgccgtcgggccctttgaatctccattctacaacgatgaaaggaaaatattattgcttacatatatgccaggagctaattattgaacgaaacaaatcgaactcaaagatactcacaaaatccatgcgctcagaagagagacgtcgagggcgtccaactggtacagatcgaagaaatccttgaaatggatccagagaacatcgtctccttgcaagaagtcggggtttctgatcctcgctctgaacatctctctaccgttggcgctcatttccatgtaccgttcatggaatttgtacatctgtgtcggtagggactccacctgttcaggtttgacaagcggtttaccgagttcaaacttgtttgccacttccgcctccgggattggtgcgcctcgaaccaactgatccaaagttagaccggtgtctgcaatgaaatccgttatgccaaaatcttcgccggtcaccaacggctcgacctcttggtttggttgttctccaagctgagggactggtttggacttcttgtgctaggctctctgaagtgttcggtcatagtccgatatctgtaacgccttcttgtttgttgtggacattcccttgaagaagttcttcacgctcgggtcagtaggtatcttcttttcaggactccgaggcttgagttgcctcttcacctctcctgccacataagcatcaagctcctcttgactgcaatcgtatggtggctccttgtttttggtggcgtcaaccttcgccttcttcgttgcccttgtgcgggcaggcggtggagcttggcaagaccttgtcttgggaggtgcaggcggacacggtggaggcggaggagccggaggagatggtgcagcggcaggtggcggaggagccggaggtgatggtgcaggaggacgtggtggaggaacctgaggagatggtgcaggaggagatggcggagccggaggagatggtgcacgaaatgcctcttgtcacccaggaaggatgatgtaccgcttgcgccatagtatgatggcgtggcttgtgtctcgtagatgcatctcaccgtcccctcctgggtagtccaactcgaggtcctcgtacgcggcttccaccagctcaacttcaaccctcgagtatcctgctggaatcggcctgtagtggtaagtcccggaagggtctgttgggatggccattcccgacgccaccttcacgtgatgagaggttatctattagtaatcaacctaagcagcaacttgcggaatgtacaagtcaaaaatcatcaaactacgagcataccttgattgataagttcttgaagggaatatgcaactcacatggtgtccgctgcgtgacctcatcaacggggcaggtggtttcatcctgggtttgcatggcgtccatgctctgtgatccgacctgccccattgaggcgcagctgctacgattgcctgatgggctgaccattgcaggatgaatgtacggctggggatcctaggaccgatgtgcggccatacgttcatccaccttccttgccacctcctcttgcatgctgagctcgtagctcgataccctgtactcaagatcagcaatcttcgcctcggtatctctcttactcctcatccgactcctgtacgtgtggatgtcctccttaaatccaatcttccagggaatcacgcctttccctcgtgttcgtcctggatgctcgggagtctgtagggcgagtgacagctcatccttctctctgtcgggtcggaatgtgccctgagaagtggctaccactacgtccgttagtcgactggaagcctcgcgtatctaatcgctgaagacaagggagccatcaactgggttaagcattccaccgtgagcatagtaccagaacttcgatcgatctagccaattagcggtggccggttcgatacccctctcaagcaagctagcctccatctcctcccacttcggcctcgcgacgctatatccgcctgaccccaagggtggtgatggtacttcttcttggcggcattttctttgtttttggccatcatcgcttgcccttgttgccccgtcttgtaagcaacgaactcgtcccaatgatcccttagctttgggaatacgtcgaagttcggtgttagtcccttcaggatgtatttcttgtagagatctcccttgaagctctggaactgttctgccattttcttcagagtccactatttcactatgttatccatacccgcgggtagcgtgaacgtctcgagcattgtggtccacaacatatctttctctgagttcgggacaaagctgtcatcatacccgcgtgcccttgttctgcgccagtaaaccatgctgacaggcatgttgtccctcacaacccaaccgctgtggtgtacaaaattcttggctgcttctgctggggcactaggtcggccgtcttcgtccacctcagttatgatgtgccaaccctctatcttcttcgcgtcacctcgttgtccgcgtgcccttttctgtccagcagagggctgacttccactagcctcctccgcatcgttcccctccttgttcccctccgcatccctctccacgttcccctcctcgttcaagtactggtttggatcatcgttcccctcttcttcattccagtactggctgcttccctctgtgattgtatcgtatagtatctgttcctcatcgcgatcagccatctatgcatacaaaaaatatttgttaagtatgtaggatgtatttgctaaccgtaatattaaaactctgctaatattaaaattgtaatagtcatatatgctaagtctaataatcttatattaaatgactactaatctcatattaaaattgtaataatcatatatatatatgctaagtctaacaatcttataataaatctctaacgatcttatatttaatctctaataatcttatattaaaattgtaataatcatatatgctaagtctaataatcttatattaaatgactactaatctcatattaaaattgtaataatcatatatatatatgctaagtctaacaatcttatattaaatctctaacgatcttatatttaatctctaataatcttatattaaaattgtaatagtcatatatgctaagtgtaacaatctcatattaaatcgctactaatcttatattaaatcaataataatcttatattaaaagtgtaataatcatgtatgctaagtgtaacaatcttatattaaatatctaacaatcacttatttacatcacttgcctgcgcgaatttcttcgatggctagctaccaattcggcttgagggacgatgccgacgtcttctctgcaacattaccaggaaaatgtattagactaaacggaccaagttacatatataatcatatatgtattactagtaaatcgtattagtataaatgcgtttgttctcacaattttagtacaaatgcattcacgttcgtaagcgtttcgtgcacgttcgttcacgtttcgtaatcgtatcgttcacgttcgttcccgttcgttaacgtttcgttacgttcgtccgcgttcgttaacgtttcgtgcacgttcgttcgcgttcgttaacgtttcgttcacgttcgttcgcgttcgttaacgtttcgttgcgttctttcgcgttcattaacgtttcgttcgcgttcgttaatgtttcgttcacgcccgttcgcgttcgttaacgtttcgtgcacgttcgttcgcgttcgttaacgtttcgttaggttcgttcgtgttcgttaacgtttcgttacgttcgttcgcgttcgttaacgtttttttcacgttt

SEQ ID NO: 29130 - DNA, 6437 bp, Oryza sativa
aagtgttggtggaaaagaaaagggcgcactggcaatatatatacccgtggatctttagtctcggttgttgtgatcaactgggagtaaagatatctttactcccggttgttctcaccaactgggactaaagatcttttcccgctatttccaaattctttttaaacccggttagggttaggaaccaagagtaaagataatagcagttgtcttgaatttcattccatatgtgtttctaaattagtaaataatgcattgcaattatttaaagtcgaacaattaatgataaaaccttcgaaaaattattgttatatgtagtagaatacgtggataatatataataagcacatgaatgatttaaaattgttaaaaattctaattaacatatgtaaatagcacatgcatgatttaaaattaatacaaaatctaatatcatatataactagcatatcatgatattaaattgttaaaaattgtaattaacatatgtaaataccacatgcatgatttaaaacctttagaaattctaataatcatatatatgtagcatatggattatttcaatttgattaaaattctaataatcatacataattaacaaaatatctaataatcatatataactagcatatggatgatttcaatttgataaaaattctaataatcatacatatttaacatatgccatacaacaattgatttgtatagatatttggtacatccaacatagtttacatcgtgtacggaacaattacggcaatacatcggcggtgacggttgaccggacgtactttctcctcactattgttccttccttgtgatcgctacgtgagtaaggggtgtcttcatttgataggaggatgctagggtcaatcgtcactgtgaaagggggttgcccatcaaactgatcgtaatcctcgtcagtcttgtcctctactccgacgatttttctttttcctgggagaaccacgtggtgcttctgctcgtcaggccctttgcccttttttcctttgctagacatgtccttgacgtaaaaaacttgggttacatcattgacaaggacaaaaggttcgtccgagtatccaaccttgttaaggtcaactgttgtcatcccactgtcattaatcgttacacctccaccagttaacctaacccattggcactggaacagagggaccttgagaggtccatagtcaagttcccatatgtcctcgatggcaccgtaatacgtgccagttgtaccatcatgtcctatggcatcgatacgaacagcactgttttggtttgtgctcttcatgtcttgggccctcgtgtagaatgtgtacctattaatttcatatccctggaatgtcgcgatcgagccagatggtcccctcgccaagaaggctagttgttggttaatcgtctcgttacccatgagatattgtcgcagccacgtggagaaagtatcaatgtgatgccttgtaatccatgcatcggacttaccgatgtttctggcgcgaactagagccaagtgctcctcgatgtaggaagccaccaatgaagattgttgcagaaccgtgaaatgggctttacggaataaattgttgtctaccgtcattattgctttccttcctagagtcccctttccccgtagtctcccttcatggcgtgattcaggtaccccgattgggcgaagggcttcgataaattctacgcagaattcaatgacttcctctgttccataccccttggcgatgcttgcctctggacgagcacggttacgaacatacttcttcagaatgcccatgtacctctcgaaaggaaacatgttgtgtaggtacacaggaccgagaataccgatctcattgacaaggtgacaaagtagatgcgtcattatattgaaaaatgaatgtggaaatatcaactcaaagctgacaagacattgcaccacatcattctgcagggcttctaatctatcaggatcgatgaccttttgcaaaattacgttcatgaaagcacatagctttgttattgttgcccggacattgtctgggaggatacctcttattacaactggtagcagctgtgtcatcaacacgtgacagtcatgagactttagatttgtgaacttcttctccttcgtgcttattattcgctttatattcgtggagtatccagacggtaccttgatgctctccaagcatttaaacatactttccttctctgccttgctaaaagtgtagctggctggactcaagtaatggcttcctttctcctttggttccgggtgaaggtcaccgtgttgttccatatgcttcagatcattacatgcttccagtgtatctttcgactttccatataaacctaggaagccaagaaggtttacgcaaagattcttagtgagttgcatcacgtcgattgcgtggcggacgtccaagaattcccaatagggtaactcccaaaatatagagttctttttccacatcgccgcgtgaccatcttcgctctctataggctggctgccaggcccctttccaaacactactttaagatctttaaccatagcaaacattgttttcccgctgcgatgtttaggcttcatacggtggtccgccttatgttcaaagtgcttgcctttcttccgtaccgggtggtttgctgcaaggaatcgacgatgacccatgtacacaaccttcctacagtgcttaagatacgtactttctgtttcatccatacagtgagtgctagccttgtaccccttgttggactgcccggataggttgctaagtgcaggccaatcgttgatggttacgaacagcagcgctcgtaggttaaactcctcctgtttgtcctcatcccacatggggacaccttcctttttccacaacagtttaagatcttcgaccagtggtcttaggtacacatcgatgtcgttaccaggttgcttggggccttgaattataatcggcatcattatgtacttcctcttcatgcatagccacggggggaggttgtagatacacatcgtaacgggccaagtgctatggccgctgctcatctctccaaaaggattcatgccattcgtacttaaaccaaaccgtatgtttcgtgcgtcctttccaaagtctttaaattttctgtcgatgtttcgccactgcgaaccatcggcggggtgtctcagcatcccgtcctgttgacgctcttcagcatgccattgcatcattctagcgttccccttgttcctgaacaaacgccttagccgtggtattatagggaaataccacatcaccttagcaggaattctcttcttcgttagctgcccgtcaacttctcctggatcatctcgtctaaacttttatcgtagcgctttgcaaacagggcatgcttctaggttctcgtactcctcaccgcgatataggatacaatcattcggacatgcgtgaatcttctgaacttccagtcctagagggcagactatcttcttagcctcgtacgttgtctcgggcaacttgtttccctccggaagaatgttcttgacgagtttcaataaatcgccaaatgccttgtcactaacaccattttttgccttccattacaagaactccagagtggtatccaactttttgtgcccctgctcgcaacctgggtacaacgacgttctgtggccctctaacatcttgtccaatttatgggccccattttcactttcgcaatcctccttggcgtcctgcaacatctgaccaagatcatccgcaacgttgttaccatcagcatccctttcctcctcgcccgtttgatttccttcaaatccagcgtactgagtaaagtccggaatattgtcgtcttccacttcatcttcttccattttaacaccttgctctccgtgggatgtccaacaattatagcttggcatgaaccccgactcaaacaagtggaaatgaatagttctggatgcagaatactccttctgattcttacacttattgcatggacaacaaataaaacccttttgcctgttagctttggccactctcaaaaaataatgcacgccgtcaataaactctttggaccaccggtcagcgtacatccattgccgatccatctacatgacatgaaaaaaaatcatacacacataattattcgtacaataatgatagtcatacaataattataaaataattacaaactctttcaacagtcacacaataatgacatcattattcatacaaatattatgaaatattacaccatataaattatatatttactatttataaagttttaaactaatattaatatgttgtacttattttaatttttcattatactttgttttctattattcaagattaactttcactatattttccttctcaacttttttataaaaccttctttagcaaataaactaaatttctatctattctttcttctccacacaaattttctctctcatcaactaacaacaaaattttggagacaaaaaagtgtgcaaaacatagctccaaatgtaatatgaaaaaaaaacattggaggatgaagttgctaaccttttaggcacctccgatttgtatataatcaacacaataaattcactagaaattttggcatgacctcccctttttttgaagaaattttgaagcttgctcgggctggaggaggaagaagacatatatataggggtgggactttagtcccggttggtgttatgaaccggggctaaagatcgccgggatctttagtcccggttggtgttactaaccgggactaaagttacgatatttagtcccggttggagttattaaccggaactaaagatcccggggggcctgacaggccctgacaacatttgaaccgggactaaagatcatctttagtcccggtttttgttgcaaccgagactattgtacgaaagatggtttctccaccagtgaactgctaaacagtattacattttggctagtattgttgggatggtgccacctagtgtgagctcgattaaggtgtacaatagcatggtttggaaacatttatctcttcacgtaaaattgagcaaagaattagtgcatgactaatttagtttgagctttaaaaaataaaaaatagattaatatatgtttataaagtaacttaattttaattaaaaagttactaaagaaatgtgtgcgaaaaaaatcagggagtagaagttagaaaaaagagatccaaatgcagcctaaaaaaaattaatgaattgactgtaacaatggtgccattgatgttgttggcttataaatttaaaataggaagaatgagcatgttgccgagtatctttccggtgaatgaattataactaagattccatgcgttcaggctttagcaactgagaaacatactactagctagcaggggtagattggtcttttttcacattggtccatgttggcatgcacatgtggcacttcacagtgtaaaaagtggcaaaaaattacaaaaccttctctctacaatggcaaattcttaagtacaatcctaagaagggtatatggcaaattcttaagtacaatcctaagaagggtatctggttaattgacaaatgtaaaagtggcaaatagttaaattcccccattttaactgccaccaaagaccgagggcaacaactaaaatgaaatgcaacgattggccatatggcaaattaacttgatcccctgcctataactcaatgaaagaatggatcaactttctggcataaactaataagaatttaatcgccacatctaccaaatttgtcacgctacatgttcccctctatatatatatatatatatatatatatatatatatatatatatatatatatatatatgtccaattcgttccgtctgaaatatctttcaccatttaattttccttcctagctcgaacaagaaattcgccctctaataagcaatctcgctagtgaactatgaatgatcggcatcaggcattgatacatcatactgaactgaaacagttctgtgtatctgtttgctttcccaagattatcaaggagctgccggaaggctggaagctaccagcagttggaaaacccagccaaaaggagatggatcaacactgtgatgggacataaatcaataagactgtcagtgattttcttcatcacaacaaactatcaggaactacctgcaaacatatattgcttgttggagaactattttagggctcattttcttgaattttttttatttataattttttttattaaaagttttacaaaaataatttttaaaaatcgccctcccagagggcggcgaaaatgacgtggcagacggccgttcgctctcgggcgacggccgtcaacgaaatttgcaggcggcccccttgccgcccttcgcgagggcgattttgtactgtgcggggggccgcctgcaaatgggcggcgagggggggcatggaattttgcaggcggcccccttgcc

SEQ ID NO: 29131 - DNA, 50515 bp, Oryza sativa
gtgggggagggcgatttttgccccccccccccccctataaagcccagtccctcctctgtgaaatttcattatattcactaaaaatccaaaaaaaaacgaaagagagagaggggagggcagcaaaaggggagcggcgaagccctgctggttcgctcacttcatcacaggtatgctcccatacatcttttgcatttgtactaatatgttatgtttgagtatatatgttgcgttttagttttagttccatatattttagcacatctgtagcacacagcacatatgtgtagatccagagcatagaatataatagtatgaattgagacatagacagtagtgttaattgtaatattgtagagaatgtaacttagggcgtagtacagaaatgcgaggttaacgcagttattgttttcatcaggcacaatgtcaagtaaggtcacatttcagatagttcacggtgaaggaaatattagatttggtccagatggtgttgatctgtcagattttgtaatgacatctaagggcatcgataggcctgcggagagaacatttcagtcaatttatagttggttgttgagaggatttagaatagaccaagaagtctacacaatgtcagtatctgttgtagtgagtcgtgcaatagaaggttatttttgggaactaatgccgatggacagcactgctgcttggagacggtatgtgaaaatggcttttgaacggtcatggcccctcgttatatttgtgtcggtacaagagaaagatacaaatgtttcaatgcaaaccgaagatgtggagggtcctagcaatgaaggggatgttgttggaccatcgatggaaaatgaggaaaatcaaccaagggaggagcaggccatgggcatggcggatgagggggagagagtcggtataattgttgatgaaatggagaggaaagattcggataatgagcaagcggaggacgacgcatcatccgatgaggaaggtgatgtaatggccactgattgggcaaatgaggacttctctggacttgttatatcagagggtgatcatgtaccctgggagtataaggagaacgagataattgagggtgcaaggtatgctcataaggatgagatgaaggaggcggtgaagcattgggcagtttccttgcagagagagtttagggtggtcaagtcaacaaattatgtgtatgaagtgaggtgcatgaaggaagattgtccgtggcgtgtccatgcatataagggtaaatggaatgattattggaaagttagcattgtgaccgagcacaagtgctacttacaaggggtggagaagtatcaccgaaacatcacttcagcttttgtggcaagtgagatgtacagcagtgttgttggtaacattggctttgaaccaaaatcaattattaggcacatcgagaacaaattcaagtacaccataagctatgcaaaggcctggagagccaaacaaaagatcattgagatgaggtatggcacatttgaagcttcttatgataatttgcctcgtttgttagccaccattgcccagaggaataataatacttactatgacctacatacatttacatcggttgatgatcgaacaaagagtgtgctgcaaagagcctttttctcattgggtgcttgcatcaatgcttttgtgcattgtcgacctgttctatgcatagatggaacttttatgacaagtgaataccgaggtcagatattgacagcaattgggtgtgatgggaacaaccaggttctacctatggcttttgcatttgtagagagtgagaacactgaaagctggtactggttcctagagagagtgcacattgcagtggtgcgtatgaggcccaacgtttgccttatacatgatcgtcatgcgggtatgttgcgggctattgactacttgcagaacggttgggatgagaagggacttccagctaagtggcctgatgttcggagtcggtggtgcatgcgtcacatgggtgcaaatttctacaagcaattcaagaacaagcatcttatggagctctttaagaggctctgtgcacagaaccaagagaagaaatttaatgagttgtgggacaagttggatgagttgactacgaagcaaacagatgagcaatctcgcagaccacaagttgaaggtgacgagcctcccatacctcttggtgcattacatgatgacccaccaacaatgagaaggaggtcagggtcgtccatcagaaatttcactcagtggattgagaatgagcctaaggagaagtggtctctattgttcgacaccgatggatctcggtatggcataatgacaaccaatttggcagaggtgtacaactgggtaatgcgaggtgttcgggtacttccattggttgctattgttgaattcatccttcacggcacgcaagcctactttagggatcgatacaagaaaattggtccgtccatggccgataacaacatagtgtttggcaacgtagtgacaaagtacatggaagataaaatcaaaaaggcacggagacatagagttgttgctcaaggcacacaagtgcatcggtatgaaataatgtttgttgataggagcaggcgtggtatctatcgcaagcaagccgtgcaggaatgtgtcttgaaggcggatggtggatgtacctgcagttgtatgaagccgaagcttcatcaccttccttgctcacacgttcttgctgctgccggtgattgtggcatatctcccaatgtgtacgtctcaaattatttcaggaaagaagcaatctttcatacatggagtgaggagatatatgggttcgggatctcaggatcttacacaacgctgagtgcccaagttttttatattccagatccatctaagttaagggtgaaaaagggtcgacgccaaactagacgcatcagaaatgatatggatgagtcagaatgtcacatcctgattttcgtttcaggatttataaattatttaataaattaataatagaatttatattaaatgttcattaatttacaagtgaagttaaatgtgggaaataaaatttcctaaatataaagcatggatggatttaatttttattaaattctccatggttaattatactctctggaattttctcggatttttcggagctcaattcctaattttaatcatacaaagagcatttcagtaattacccacatattaaattaatcattaaatggtctaattataattttgttaagtactttgagtgtccaagtattttcaagatttttcttggaattatttgagcataggaagtatttttaacaattcaaagatcatttcagtgattaatttaattggaaaagtatttaaaattcaccttttccttttcgggccgaattaggaaaagtcctctcactctcggcccagtctcctctcagcctgcagcccttttcctctctttcccgaagtctgctttttgtccctcctttaatcagtctttggaagtagaagcccagcagaaagtctactatccctccctggcactgttcatcttccagctctggacagagccgagccgcccgtgctgtgccctgtgccgccgcctcttccttccaaatctcgcctccccgttgctcctttttccaatttagttgaggggaaatattcctcttatcctcctctatctttacccccaaaaatcggagcaaatcgttgagtatcttatccgaatcaaactcgttttcgagtttatctccaaaaccgagtttttgatttcccggatcgatttcttgcgggaggagtccgatctcttcaatccaaggctataaataggaccccctagtcctcctctttcgtttgccccctctcccgtggtctcccgtgcctcgtagcgccgccgccacgtgctccaccccgacgtcgtcgccggccgagctccatccgcgtcgtgccgtcgcctccgtcgtcgccgccggtcgctgtcaccgccgtaaggtgcgcgggagggtggagaagcccggccgctctctccccgctgtcgccggtcaccggagccccgtcgccgccgtcgaccgaagccgtgccgccgctagacctcgtcgccggccgtcgtcgttcgtcgtttggttcgagggtgagtaccgttgggttcgtctcgtcgtcctctacgtgtacatgtcctccaaagtcgcagccgaccatccaatctccggcgaggtcgccatcttggtccggccattgatgaggtcatcatgatgtcatcatcgtttttctttttcctgtttttctaatagattaaatcttcggaaattcataactaaatcatcgtaactcggttttgagtggttcaagttgctaaattcatctaaaatcatgatctacatgtttgtttactttatatgtactgtttatttggtttctattagtctttttcttcgttttgcgtgttagcttgtcgtttccgtcgttgcgaaggttcgtgagtgcgtcggaagtgatcaagaaggttaattgaagatcgattattgcaaggcaagtcacacagatcctaaacacaatcctttgagcatgttgatcctatatttaaattctctatttatttcaactgtgcatttattttcgaatgtcaccgggtggtgtgaacttattcctttgttatggccaatttgcattgattactttattccttgataccttgggttattataacttgactagttgggctttatatattggttcagctagatattagttatgattgcttagccatgcttagaaacattagcacactattaggataacttatgactcactattatttaaggatggcttaatgatagttcacgatggtcaatcgtgattggttaattaattacttgccaactaaaacttgataatggtgggttgtgagcacatggttttgagagtcgtgctcatgacaattaaggaccggttcgcgagctactgttgtgaaacatttatcgtgccaaccacaagccagcgtgggcaacggctttatcttttgtgtagcgtgattcattatagtgcgccagactgagaagtggcgagaagtccacgggggtcactggggagtccatgcctctggtttttgagggggtgattatgatccaggaaaggtgcgctgtaatggattatgttgtgcaaggggtattgtcacaactcctttccgaggtaccgtggtggtattgaggcacatggtgacatgatgtggggttgtgtcttgtgggtacagtggtacacctctggccagagtaaaactattcgaatagccgtgcccgcggttatgggcgggttgagcaatgtttttcgtgattagtctcacacctctcacaataattatggatgttatacctggtaataatttgcttagctcctggtttggagttagatctgtacagccgggtatggttgttcaggatggttgggcctgtgcagcatgggtgtgctgttcagtgttgattaaaatttttaattaattactctactgttttactactcttaactatttgctaaatgctgctttcgcaaatgagcctatattatgccatcctttggtatccttgtgcacttgcatatttgctgtgtggcttgttgagtatgtcatatgctcattcttgcaataatcatcaaacctcagttgaagataaaggatccagaaggagaagacgtttggcttataccccagttgagctgcctgtgggagtggagctgaagccgtcgctagaccgttaattccgctgctgttttcttttcttttgtaagtatgtaacgtcattattaagatggatttgtatattaaattgtcagtttgtgtacctcggctgattcctggacgaggattttatgcacaaattagttcggaaattactagtgaatttccgggcgtgacacagaagcaggtgggaggactttacgctgcagcaagtgtgatctgcgcggccatacttacaagaaatgcccgaagaatgcagaagttccaagcagcgcagatgctagtccatctggacaggcaagtgatggtaggcgaccacctggtgaaggaacaacaagcaggcgcgcaaggccaaggcgtcgtcgcgcagcaggcgattccatggtgtaacaatgctttcgatttagaaaataaaatgatgttgtgatgtaatgagtgttcggactaaatacttctatcgtgtaatttcaattcaatgttgttgtaatgagtacctcagactattgttgtattagtagtattgcgaactattcggtgttgtatcataatgttatcgtgatgagtgttcggactaaacacttttgtttgtttgtactcttgtttaatatgtgttagtaattcgcttatgaacatttattacttatgttgaactaattatttatatgtttctgatcaacctatttgatgcaggtatggcgtacgacacaccggcgctgttgaaccgtgggattgacaggaaccaccgctcgttcctgtcagcagtcgagggtgcacagctcggcaccttccgtccacgcacgtcgcgcgagtggttgcgtgtcgacccccatcacgttccttggtacgcgtatgttcacatttcaactcaactttgctttgtgttgtacttatgtttgaagtttgctctatacaggttgcgtgcggcaggccttctaccactttgtaggcttgttgaggcggcggcggacgaccgtgacccagcgaagcggtgggatgcagaccggtcactccttgccgctcttgtagaccgctggagacctgagacgcacacgttccaccttccctgtggggagatggctccgacactgcaggacgtgtcgtacctgctcgggctaccgctggcgggagcaccagttggtcccgtggacggtgtttttgggtggaaggaggatatcactgcgcgcttcgagcaggtgatgcgccttccacacctaggaccggccaacacccttcctccgtactctacagtcgggcctagcaaggcttggttgctccagttcactgtaagtaaataagttgttattatcatacatgcttatttgcgaccggatgagttttttgtactaacatttcattcttaattgtaggcggaccgtctgcaacctgacgctgatgattactcggtccgacgctcccttgaggcgtacctgttgtggttgttcgggtgggtgatgttcactagaacccacgggcacgctgtggacttccggctggtccactacgcacggtccatcgcggatgctcagccacaggacgtgccgcagtggagctggggttctgccgtgctagcagccacgtaccgtgccctctgtgaggcgtgcacgaagactgacgcgggagcgatcatcgctggctgccctatgttgcttcagctttgggcagccgagaggtttgccatagggcgaccagtggtggacagcgcaccctacggggttggtcgcagcgcgcagtggccagaggacggtcccacgatggggacttactggtgtcgatgtgggttagtgcaacttcgctgcgttataagtttaacagtcctcttcttttttttttcttcacataacatgtctaattccaatcatgtttattgcagcgtcgttacgctcacgtccaggtgagacgtggttacccggacttcgtgttcgagtttgaccgtctccagccgagcgacgtcatctgggagccgtacacagaagaggccgtcgctgcgagagcaccgctaggactttcgtccttgtgcacacgcgaccaggcttactggctcaccatcctgccgatggtgttcgacattttcgttgagcctcactgcccgcagcgtgtgatgagacagttcggacttaggcaggtgtttccgggcaacgtgcagccgaccgtcctccctgccgaccactcgtgagttcggattgttcatttctaaatttttatgataattacatcatcgagccatataatttacctctcttcacaggttgactcgacggggacagctagcaggcgcactttgggctccacgtgtacagcagtacgttgacgactgggtgttagctacagaggaggtgatcaacgagctcttcccacacacggaggagaactaccgtgactaccttcgctggtaccttcctcgcactcgtgcgcatgtgaccttcactccagacgcaccagagccgcacgttgccgctgtcacagacgcgtatcccacgcaccgtgaccgagactacttcgtggcggtacgtccaatttgtattacttccaacaattatttcatttatcttgcataatataggacaactactgaattttttatttccatcttgcataggctgatgccgcacgggatatcagtgccgatatcaccgcagtccaggtgaggttgaacagaggtttgcacttgactgacgttaagcagagggtgaccttcgcccggatgcaggagaagatgcgtgcggtcatgcgcgtcttctcctgtcgcagcgccgtggacgtcgtacctccagctggtccggtacacccacggcctcgcgcgcctaccgtcggagcaggacctcatttgccttcgagcgcccctagcttcggagcagtgcgacctacagcaccggtttcgcacggtacagttcagcccagatattagttcatttttgtttcagcttttgcacgaatatgtcaccatgttttaactgcacgtttcctcatcgcaggacctcgtctgccttcgagcgcgttcgcaggcacgaccggcgcttccgcgagctccgcaggggcgttcgccacctcttcgggcgcgttcgccagctcttcctctcacggagcgtcgatccctcgcccacacggtactttactttttattactactgttaaatacttgtacgaaactgatggtccttgtccagcaggatatgcagccgggatcttcggtactggggcctcttcgtctcacgccggtaggactggtcctactagccagttctacgacgacgacttgcacggtgcagaccaccaggacgtactaggctcctctcagcttggaggagctccaaaggcgcacactcaggagcagccagaggtcacacctgtacaggcaggacgggttggccgtgccatacccccggaccgactcacgtactcccaggggcacattagggcgcagggtaggagggacaggggtaagaggcctcgtcagtagtgttctacctcttcagtccttatgtgaccgtttcttttggcttacaaacttgtaaagcagtactacttttgctattactactgcagtactacttgtgtttgtctcgtctacgtagttcttttcattcatatggtgcttgaacaacttatgctcacaacaacacactttcggcgcttcacggtagtgccatatccagtagcgcgcacagtccacaacagcacacatgaaaagcggcagctcgagttatcactatcaactttcggcgctgcctgttgacataatgtgaatcacgcccacgcgtgatcgtcttgtcacatctaatgaataatgtatctcattgagttcacatatattgcagtgaaaacgacgctatataattaacaatctgaaggcaacctcttcatatcttctttcccactagcacaccacacacgaaaatggaagcctatttattggtaatacgtaatctagatttgagattatgtataacattcttcactacaattttacattttggcagcaaaccaaatatgatcaaatgcaattttaccttactaaatatttggtagtgccaaaacttgcttatattttggcactaacaaaatatttgtacggtaacaatccaaatatgccctaaaaaataataaaattgtattttaccagtcttggatattttaatcttgtatagttttcaacataaaaatgataactattgatatttatacaaaaatatagagcacagtataaaatcgccctcccccagggcggcaagggggccgcctgcaaaattccatgccccctcgccgcccatttgcaggcggccccccacacagtacaaaatcgccctagcggagggcggcaaggggcccgcctgcaaaattccatgccccccctcgccgcccatttgcaggcggccccctgcacagtataaaatcaccctagcggagggcggcaagggggccgcctgcaaatttcgttgacggtcgtcgcccgagagcgaacggccgtctgccacgtcattttcgccgccctctgggaggtcccagagggcggtaggcgactacttccgtcaattttcaaaatggaaaattatttttgtaaaacttttaataaaaaaaattataaataaaaaaaattccattttcttgggtaagattgaactagaagaagtaatcagtgaaccaaacaacctttaagaccattttagtattgtgttagcctagtattaaacatatgtttagcgctgatattcaaagacctcaagatatatgaagcaactagttgaatgtgggtgcgttgcaacagaatgtggtaagaatcgtcaaaaaccaaaaaacatatgcatgtttgggtttctcttgtgttacaacttacaaggcttctttttggattttttgaagtttggcctaattagcctaattagccttctcatacactagtgtatgtgtaattagcctaattaaatcctcatacgctatgagaagtttaattaggcttctcatagtgtatgtttgaagggttaaatcctcaaaccttactagctaagcatttcggtacagttcagtacatcgacgtgaatgaaaagacttcaaggaaaatcaccacactttctcagtacacattatatattgcaaaaatcatttttacaggcggtagatccacacccctgtgaaaatattttcagtgaaaaaaaaaaagccgccggccttcccctcccctcgatggctctcctcctccatccgccgccaatgcccgaggggagtgccgtctccgcccccctcttctgtccatatctgggaggagcagcgagctagcgacgcggccgaccgtagtcgtcgtcgtcatcgcgcggtagggccgttgtcgtcgcgcggtagtcatcatcattgtggccggcagcgcaggagagtagagctgagggacatgagagagtgccaccgctgacccctccgcccgtgccgccgctgacgcccctcccctccgccagatttgggagctgacgggaggggaggggaagcgatgcggccggctgtagtcgtcgtcgtcgtcgcgtggccagcgccctccacccgagcagctgccgacgatcccctccgtccgtgccgtcgctgccgcccatcccctccaccggatctgagaggggagggagccggaaatgagagagagaagggtgaggaaaatgagtggttgtggagaggataaggatgggatagggcttagattttttctgtaggcattatttttgctggcggaccacataagattccgcctgcaaaaatcatattttttagatgggcttagatttttgggtaatttggaaccatgccattataattttacaaagtatgagatataccatcggtatctcaatgacatgtaggacccacatgagtcaatgacatgtgggccaggatggcatatctcaaattttgcaaaattataatggcatggtttcaattttccctagattttttctgtacgcattatttttgcaggcggaccacataagattcgcctgcaaaaatcatattttttagacggagcacttaagaggaggtttgccactgaaaataaatgtattttcacaggcggatttaacacggatctgtatagtggtccgcctgaaaaaaatgatgttcgcaggtggacggcgagcttcaccccggtttatatttttgtaggcggttatttagctccaaaagtgatacccgcctgagaaaaaaaatcattacgtctacgaaaatgttttttttagtattgtgtgcatggatgcgttgttgtaatttggataacccaaccttctctttggaaaacagcaaatcttctatctatctatctatctatcttctatctatctatctattatctatcttctattattatatactaaaagttcattagacttcctacaaacgctcttaagttgccacgtgagattcctataaacgttcctaagccgccacgtggcactctaataaattagaaaaaaaataatttaaactgatgggccaattagatttatctcataaaaaaatatccttcctcaattactaccgtacgtaagttctcatctccttctcatttctttccttttttatgtatggtagttaagatttttcttttattacttaataattaatttcttcacttttatctcacgagaatggctgtggactcttgattgcatgtcccatgcctaaatatataaatgattaatgattagatgcatgcttttataaataacaaatctatttttaactaacaatttagaaaaaggataatagttacatagcaaaataatcataattctaaaaagttactccctctatttcatattataagtccttttaacttttttcttaattaaaattatttaggtttgaccaaatatatataaaaaatttaacaacatctatcacacaaaattgttttgttagatataacattcaatatatatccataatatgacttttttttgtaaaattttattatatttttctagagtgaattgcaccttgagccacctttgattaccattgttacaatttggactaggctaaagccaaacttttcactttgaatttggactcccttattcttcctccaactctcttccccctctctccccttcaatctgtaaagtcttccaaagaattaaagggtagtttgcattttcaatcatcgactacctagtgcttgtggcttaatttcaaggacagcggagggtgcacaacaagtattcctactggtagcaactagcataaaaagaagctggccggcaatgacaggcagttgctgctactttctgaactgacaataagaactaagtcaagtagcagatagccacgctcaagctcatgctcgacctccgctagtgctacatgttatgctgcacgcctgcgctaaatttccacgtgtcgctcgagcttcaacaagttttgcagcgctcaagctccgacttcatagtgccacgtgcatttgagctcgaaatcaacttcggcgggtggctaccctgtgaagagttttgcttcttgccctttcatgcactacacctgatcgagaaagagaccttgagctgtacagagaaaagagaggaagaaagggagctggaggaagaagaagagagtctaaattgaaaccttgtgtaaacatacccggtccaaagtaaaaagtttactttttcactggtccaagttacaacacaggtaagaaaaaatagcccaagatgcaatttactcatttttcaacttggtcaaatgtaaaaaattgactagaaaaagtcaaaatgacttataatatgaaacggaggtagtatatccatttttgtttagtttatttgaacagctatttcataattagacagctaaataatttaaaatcaatattaccaatattttactataaaaataaaatatgttatttgaactgccacctattctttacatgataacccaaataacatccgatttttaatttatttacactgttgattatattgctcatattttactatgtaaaatttaaaatacgtaatttgaacatagaccaagaagcaaagaacactgaaacattaaaaaagtgacaacatgtattatgtattatgtattatgttatcttaatcattctacataataaaaattagaaaaatataaagtcaccatgtatgaccttttagagccaagttaaactaccaagtatcacattttaaaaattagtaaaacttataaattcagagaaaaaataaaacatctacccaacggtttttgcttagatcgatgaactattaatattattttcaactatcaaatctacttttagaaaaaaaaatctatcaaatcagtgacatgtcacatcttgaaaaaaaaacttgcaaatcttaggaaattaacatatgataatctgcttttacttaaattacttagaaaaaatacaaaaaaaaagccgctccatatgcgcccatcactacacacccactccttcccctctctggctcaagctctacgcttttcattcctctcacgttcctatttaactaaaagataaataatctataattataagtttcacgtctgatttctaatctgactattgctctgtttataatcaaaccaacgatataagatccatatgcctatatatagtttgctatataacaaatacgacattttaacataatcagcctattacttacaggtatctcaaatgcagcctacggtacatgcccgcgtgaatgcgcgggctaccttcctagttaataattaacagatcaagcaagaaatccagaaataatgcaatagctttcacatgcatgcatctgtgtgagatccggggaaaataggtgattaatccggaaaatacaaaggaaattttttttattatataccgttttttcccaaatcgccccctccaccaattctactacctatactactagttctatggtataattgattatggtgcgttacatcagatgaaatggatggtccagaagctaaggtataccttagaaaaaaatatatccgtgaaggaagccactaaattgaactgcaataattgcccctcgtaacttcaatcgatctcgggatacatcgttagcaaataaaagaaccggtcgagtttgagggaaaataaggtttatttgatttatgctcatatctactattgctcactcgttgtatatatcgttctaaggtctacagggttctcccctatatcaacgtccaatcaattctgtgccagattatctcttccattgtccaacttagcttgataaaacaattcgtcaagatgtaaacaaaagtgaactatttgaagtaggaatgattagcatcaggtattgatacaactggtcaacctcaaacagatgcccatgtatgtttatttcctcaactgtatatcccaatcagagacgaagcttctatatagttgccggggtctaatgacccgataaaagtttctaaacaccacagcaatcacgaattatcatcagaagagagtaatacatggtgcaatgagctaccctagtggttttctcctgtaggacgcccctgatcccaatcagtgtgggaagcaccagcaacgggagaacatgtgatctaagggaagacgaatcaacattgtaatgggaaacagatcaatgcgtatccatgttttgtttttgtgtcctcgttttcttagtcgaattcagtagggaataatgacagatttagctgtacacatttgatctgctaaagcatagcaggtaggggaactattttgggacatatttgtgttagggaaatagatacacgacaagacatgagtttttacatgcaaaaccttttcgagaaaatacaagggacacgtaccggcaatgatcaatattgagatgttagttgtaatgaaggaaacgacaataagctaactatcagatatttcccatgtagtttacaagaagatatataaaggaaaaatctagaagtaggagttctaatatagaaagaccagaagttctaggaaactataatcaaatacattgcacgatgaaattcggatcatatattttattctttggaagatcacataagtgattacacgagtgttgtatctacacaagaggttacctatttttctgtcttgtgttccaaattaaagcttcttttcggagctttggcccattagtacagatccttccatctgtggcagcctctaacatgtctaaaaatagcgggccgtcacaaggaagtcatctcaatcgggccgaaaatgtgtccgattgagatatggtcgcacagacatgttagatgggcataaaactcaggcctgtcacagatgacacctatcacacctatcagtgacgggtcgtagtttaggcccgattgagataacattccatatctcaaacggatctcaagttagagcccgacactgatgaccatcatccgtgaagggcatcaacttgaggcccgattgagataacaattaggcccatcacagatgactcatcagtgacggactcgtactaatgcccgattgagatgacttaatctctatcgggcattaactaaagcccatcaccgatgagtattttttctatctttatatgaaatgtttatatttgtaaattgacctgtagcaaaataattaactgaagtataacaattctttttatgagtcaaaataattttatgggtagcaaatgatttcaaatgaaaaaattgtcaacaacaaaattgtataacttatcaagatttacaacttttagtttggccatttttctatataacttttttttgaatagtttgaatttaaatttaaaaatatgacaaattcaaacaacatattttcaaatactaaatgatttcaaatggaaaaattttcaacaacaaagttgtataacttatcaagatttacaacttttagttttgtcatttttctatataacattttttgaacagattgaatttgaatttgaaaatatgaaaacttcaaacaacattttcaaataataaatgatttcaactaaaaaagtcatcaacaacaaagttgtatatatcatcaagatctataacttttattttggtcatttttctatataacattttttttgaacagtttgaatttgaatttgaaaatatgacaacttcaaacaatattttcaaatactaaatgatttcaactgaaaaagtcatcaacaaaaaaattgtataactcatcaagatctacaacttttatttttttcttttcttcatctgacaaagtgttagtaacattgttcacaaaatttacatatcaatgttactatcactttgtcagatgaagaaatgaccaaaataaaagtttcagatcgtgatgagttattcaactttgttgttgataactttttcagttgaaatcatttagtatttgaaaatgttgcttgaagttatcatattttcaaatttaaattcaaacttttcaaaaaaagttatatagaaaaatgaccaaaataaaagttatagatctttatgagttatacaattttattgttgatgactttttcagttgaagtcgttcaccaacaaaaaattctatttggatttctcaaactttgaatttcaaatttcaaattgttcaaatagagtgagatggagaaatgagcaaaataaaaattttgcatctcaatgtgttctataactttggttttggtgacttttctatttgaaatcatttattaatcccaatttttgttcgaagttgtcaaattttgaaaattcaaaatttgaattgttcaaattaacttatttgtacaaaggaccgatacaatagttgtagatctcgatgatttgtacaattttgttgttgatctcgatgagttatagaattttgttgtttgtgatttttgcattagatacacaaaaatcggcttaaaattaaatttaaagttctcataaattgcaaataaaaaataccacataaattgaatataaacatttcatatggaaaatggaaaaatattcatcggtgacgggcattatttaattcccgatagagataggtcatctcagtcgggcattagtatagagcccgtcaccgattactcatctgtgacgggctttatttttgacagatctcaatgagttctacacctttgtttttgacagatttttcatatgagttcatttagtatcataaaattcaattcgaaattcatttttgcctagaagtctgatttgcctcatcttcatgataatacttgctaaatatatattttatccaattaactcgattttgctgttgaaatatgtaaatagatgtgaaatatgtgatcaaaatggatgttatgcgaatgtggttgtgttaaatctattgatggttgtgtatgtgaatgaatgtatatgaatagaggatgttggggtgtgacatcctggctagggcttaataggattaatacaagttacaacttcttttccggaagccgatctctaaagaactttgatgttaagcatgcttgggttggagcaattttgggatgggtgattgatcgggtgcactcaagtgaggacaaaaaagactagcccagcctgatagaggcgggacgtcatggctagcaaaggcttgagactagccaaaaaataatttttttattatactcatctgtggcggtgttgatgcgaaaatacgatgcctagaagatctacttaacttcagtgcaggtccaaaaatcttgcttttaggttcgtgagcgtgccagttgatttgatcctacaatcaacaagaaacaaagacaagaaaatagcggttaaatccataaatgatagccgatcagccagccgccgatgacatatcatttatctttaagccaatgtcatatttgaatcgatcggcagtcatgcataagtaagaaagaactaaacctattcgatcggctgtagatattaacgacatacaatccttatgtcgatatatacttaaatcaagtgattgggatagatcggtcgccatgccgagacagtataaatcacttagatcgatatatatattaacaatgagattataaacgcttacagtatagccgatcagatagatctagcatgtatcggctaatactccgacactactctatattaagatattaaagcaagtaaaatataccaaacagaagcctaatatactttgttgtaataagatcttaacataaagggcagatctagcatatcaattaagcaaatgaaacataaggctaaatcaggtaagatcggctaaaaccccgataccaccctaatcggcaaccaaaagcaggctagagattgagattctaagtacgacttaatagatcaaacttaactgatgcagcattaagtatgaaaagaaggacaatatctagacaatcaagctgttggatgtttcatagagtggtggacaccctatataatctaagtcaacgttggtatttaacctgatcggctgccttctagcgtcagatgttagccgattgaaggttaaataacaatattgccagagattatataggatatatgataactcgacaacttacgtaaacaaaattagagtatcataatgatggaagcactaatcccgagaacgcaagccgccataacaagttttacctctagttgaagattgaaaccgatgcagctcaacccgaaagcaataactcgtcgaaagaaaacgaaagtaaaagggtggcgatgcgccgagattgtatttgaacgtgtgttgttgtattacattcggctcgggatctatttatacccgagattacaaaatatgtccatatcggacacgactcttatctttaacaaactctaagataccataagtctttgcggcagacttttgcccaaacttatctctaaggaaattacatgaaatatcctaattaatagatacaattgccttttcaggactcaatccatgcaaggcaatcctcatcaagcacattaactcaacccgacaatgtgtaccgagtcatattgtcggaatcggcttaatcggccaaccttgtccgactcgaactcttcgaatcctgatcgcagccgattcggactttagccgattctcgctctgtttctagaacgatctccatcttggattccacttcgattctatcttcatctccgatacttgaattaccaaatttggttgttaacagacgggcattaacttagtgtccgattgagatgagggtcatctttgacgggttatagttactgcctatcacagataagggtcatctgtgacgggctatagtttaggcccgattaagatgtgtgtcatccgtgacatgctctagtttaggccagattgaggttagtagtcatctgtgatggacgctagttgtgacccgattaagattggtcatccgtgacgggctatagtttgactggtcatcagggtcaaagctatcagtgatgggctttaattaaggcccgactgagatagcttcacccgtgacggccgtttgccccgattgagataacttttcacatctgtgacttctaagctgtgacggatgccgtacccgattgtaatgggggttgccgtccgattgagatagtggttaccgttctagtggccgtttggtgctcgagaacctatgaaattaagcccatgcaaataaaggaaaatttagttaaacttttcatagtgtaactgtggactgttaataaatcatcaaaccttcctacccgtttagtacatgttcagtaccgctacgtcaatcaatgacttcaatgaaaacagctcggctgcaataatatagctgtattatagcatcgcactttttcgctctatatattagtatgttttgttcactcatctttctaaatcattcattattttatctatagctgtattatagcatcacccatcagattagtattttgagctgctctaacatgaagacttcagagtaaccctgttgaagtcttatttcagaagatcttcaaagaaagaaacgaccatatattacatatttagtacagattcgacaatcatgaccccagacgacctaaagtatattaaagcagctcctcgatcaagcagcacaactctatctaagtttggaaggcatcaggaatcgttgatgggcgagagaaatggaagctgttatgcctgcatatacagcccttattgcgcacacaagcagacgcacggccattaatgggtaccctaccaccggtcagcctttgatggcttgtgccgacgagaagccacggctaagcgatgacctaaataatataatatgattacatagttattgtcatatagatagcacaacagcctgattaatatgtacccttcagaggtgtaggaattatgctataataggctatgacaagatacaaaaccctaaattacaaaaatctgacaaaacaaatacaaaacaaatagaagataggctatgatctaaataatatgattttatagttattatcatgtagagagcgcattagcctgattaatatataccaaaattatcaaaatctgatagaaacaaaacgaaaagtacaaaactaaaaaaaagtatacaaagaaagtattagctaagaaaactaattaatgtttagtagctgactaaactacaaaagtaacaaatcatgtttaatacctaacaaaactaaaaaaatttagaaaaccaaaactacgaaaataaaaaaaaatctacaaactaagttatgtttagtagatgaaagaactacacaaactaattaagttatgttcactagaaatattaatctctatacaaaatgaagaagccagaagaggacctggtcagagtgcaggctaaaagctgcgtccacaaaacgaaagcacaatacgttcgaatttcagtggaacaataagaagactgagtgatatatcaaggggaaattttgctacaggacactttgatttcgtggttttagcggtaagacaccgctcgaactcacttttggggaaaaacactccataaacatagtaatttgccagtggacaccacgccgattaaaatactaatttctggttgaagagaagagacaaatcgcgtgaaagttataaaatgcccttgggcccacatgtcatatcttccatctctcttcaaccgggagcgccggcagtcgtgcggcggcaacagtggcggagtgtagcactgggtgcaccgggagtcgtgcagcggcggcgatgctgatgacgaccacgacaacgcgcgacgatggcggttgcggcaactgcggtgtggcggtgactgcgccttcgctgcgtggggcggcagtggcggagggtgaggacgacgacgaggaggcggcggcggaaggtctcaagatcaagatcctggcgcacggtggcgacggcggtggctttgacggcggcagtggcatggcggtggtgctacgtgcaggtgacagctgcgtcggcatggtgacggcgaatgcggcagcggcaatgacgacggcacgaagacagacagcggtggtggccggccggacgagatcgagagagtttggagagggaggagaggtcgcgatggggatccgccgcgcatccaggaaggcgcggtgctcgggacggggtgcagctgctgctgcggctcccgctgctgatgtactcgatcttgccataagagagcaagtggtgggcgagctacgggcgggaggatgtgccatcggcaagcgacctgatgcggatgtgggtgcggttcaagaaggcgccgcagggcggcggtgaccggcatcgctggaagaagatagagagagaagagaagagagataggagagctgacatgtgggcccatgggcgtttttgacattttacgtgatttctctctcctcctcaacctgaaattattattctaatcggcgtggtgtccattggcaaattaccatgtttatagagtattttcccctaaaagtgagttcggccagtatcctacggctaaaagcatgaagtcgaagtgtcctgtaacaaaatttgccatatatcagagatgttgcagtcaccgatctctgaaaaaagtgcgcacacactggcagtggcggatggaaaggcatcaaacaccaacgacgatgatgtagcaaaaatggacgagattgttccacaacctcaacctccacaaataagccgcacgctccaccctcttgataacgaagccaagcccaagggttccgccatccgctggagaagagggcatcacgacaacggcgccgataagaatagatccaaatcaatcctctcttctctgcgtgtgtgagaaaaatggggattaaattttgaacagcatgagtaccgatggaaacgaaggcatatgcagcgtggaccgtgcagttatcactcttgggctcatgattcaacccggtcggctatccggcccgacaaccctccaacatgaatcttggaaaatattccaattaacataaattccgcaaatgaaacaaaaatattactactacaaaaaacatgttagttgctggatttcccaagcaagcagcacctttgagtctcctaaaaggtgttgcttaggaactgacacctttatggttcccgggttgggaaaaaaaaagggctcgatgcacctagcgcatccatccctcttcacccccaaaatcaatccacaacgaactatcgatcatagtcatcatcacaacaacaagaacaacatcatcacaacaacaacaacaacaacaacaatcaattggcctctgccggatccacccgcgggatccgccgccacaaccggatccgccacaggagaagcttagggtggagggggaggggtagaggactaccggaaccgctcgtcagaaatgccaccgccggctgccacatccatcggatccgcccgcaggagcatcgatgccaccgccgccatcacaggagaatcttgggggcggaggaaggggagggggtggagggccgctagatccgcctgttggaaatgccaccactgtcgcctatgcctgatgcgcccgtgggagcctcgatgccactgccgccaccgagggagaagcttgggggtagggggggggcggagagggggtagaggaccgctggacccgcttgtcagaaacaccactgccatcgcctccattggatctgcccgcgggagccaccgacaccaccgctgccaccagttctgccacggaagaaggttaggggcggagggggagggggagggggtataggaccatcggatccggcccgcaggagtcgctgacgccatcgcctctgccagatctgccgccgttgagggaggcgagaggggaagggggcagggatgagagagaaagaaagagagagacagtgggggagagcgagtaagagaaagtgagagagagagagaggcggttatatgggtgggtttaaggataaggattggcatcgattgacttagcttggtttttagctatcagttttttaaaattcggcatctataatatattatgggctcctttggatgcacggggagaaaacccctgggaaaaaaccccatacagggattttccctgtaccataggggaagcacttcccgctaggggagatttccctgctatcattaggaagcagctcacgggactgggggatgattagggtttttaagttttgagcctactctaccaaagaatggctagttggagcacacacaacaagataaaaaaatgtctaaataaacataaccgagcacaaaaatagaataattcagttaaaaatgcatgaaaaaaaaatctgaaaaatcatatgaactccaagtagagcaataaattctaggtaaaatagagaacattatagatacaagcatcagcttaattcatgagatgatcaaattgaggtaccatctacagtatttagccaagtattatatgaacatccaagaaatatcactttcagcaaatacaagatgtaattcatacaattatcatttacaaatattttggaagtgttttcctcctgcattcatgagcatcaactatctccatcgctgctccaaattgagaacaaggctgaatatacgagggcaaggcctgttgcctacatccaagaattaaaaacacaaagtaagggtgcaacctgtagtgttggtagaaaaaaaagtattcaaatacttcttgtatagaaaatgcagactagagtatagctttgtgtgggacaatccttgtttatgccaatccagagattcaaattgaatcatggcaagatgaagagtgcaagaggacaattatcattatggacatgacaaggaaaagaagtgcatctcatatatataccccctatgtgagtcctcattgggtaaacttttgcaacattttcagctgaactgcagtgctgttgagctgctgtttaggtgcaaactgatcagacagattaaagcctcatgctactacagtttgagatgcaaattaatgtgcaatgcttcagacggaccgtggccatctccagctaactctgtctcttagttttatgcccccaagcaagcacacaaacattgtcattagtgtagatagttatggttagcacttagcagtactaattaggagtagtagttgttgttttaattaattagtacttaggtcagtttgttttgccagtgagttcctatcaaaaatcagatttttaccatttatttagtctcacatgcatgctaaattaatcactaattatacagttccctgatagagactacaataatggatcagaattaagctaagctagtaccatcaagaatagagaagaattaaaccagatgaactgaatacaaagagttgcaacatttacatctgctgaaattgaatcaagtatacatgtagcagagctatcaaattaaatcgtagggccatcaaacatacctatgcagcaatttggctcctcagaaaaaaaatagtagtagcattagctggtctaatggatgagcgatatagtgttcagctttgaagggttgttgtcagtttaataatgaatttcatgaagatatcagaacatatactattgctaaacataaaatgttcctaataactccagcaaaaaatgattctctgtccagtaaaaaaaagattctttgttagatctaaatatattcatttcacagaatcatggtaaaactagagctagagatgagaaaagggaaacaaaacggagcagagaaaaaaaaactaaatagtaatcttgagtgaagaagttaaggtttacataccagtgcaggctaaagtacaataaccctttgcaaattgcgcattaaatttaaattaaattatggcaagagaggaagtacaaggaggcatacttgacgattcttgtacttgatctgtcgaagcagtggacgcgcgtcttcccttcttaatcaacgttgtttaatttacctcgtagcttgtgttaaagcatatgaacctgcacaattgtaaattgtcatcacacatgcgcgataacctactgtccatcttgactgtaagctctaagcactgacgactaatgctatcctgtttttgacatgtactaatcatggacagattcccaaaataagaataatatgttgattgttaaaacatgcaatgatgagacctgggctctactgatgcaatgttaagacattactaatcagtttttgcatgcaaatttcacactccagaagaaagcaaagcattggtttctcctgtggttcgttagatcaactcttttctgagcctggacatgtctaccaaaaaacaagaacttaacaagtctttgcaaagatcattcacacaagattcaccgtggtttctctcattagttccacattcacacaagatgcaaaaattaaatttccaatcaaaccaaactgaaccataaacaatcacagcacagatttgggatcaaggacacgaaccagtcgaactgagtcacggtgctagcgatgcttagtgacggccactggagaaccgctcttggttgctgtcgaggttgacttgggggatggggcactggcgcactgccactggagagagtgcgtcgtgttgcttcaggtgggagcaagattgacggtggccgttctagagaagctgttgggggaagatgagaagagaggattgagccactgagccaagatctgaggggaaaccctagaggagaagaagagcaaaaaccctaggaggaggaggaggagaggtgtggaaagagaagaaggcttaccctggtacggtggcagcgctggtggtgtctcgccggaggaggaggcgcggcggcgcccaacattggtcgcgcgcgagagaagagactctgtgcgagagagaagtggcggcggatcgcgcaaggaaaatttcccgacctctggaggtcggggttctttccctagggtttccccgcggattgggcggggaaatccttgcctcgtgagcttccatatggacaggaaaaaagcccgtggaaattttcaccgtgggcctttctcccaagggaatgggctgggatcccccgggatcccgggctgccaaaggtggcctataggtatttatattttaattaatcggtacctataatacattataggtgtctgttttttaagaaaactagcagccagttttttctttaaattggcacctatagttcctaaaaggtgccggttatatatttttccatttcactggaataggaaaaggtctataggtaccggttttaattattctggtacctctagtgccgcatcctttgtgattttctgtagtagtgttcagcaggctgttctatagcaaattccaaaaaaaatattataatctcatcttaattatttcaaggatagatagaactgttttcactttgtatcactgccgatttaatttactccgaccttagccagagaactgtgtgaactggcagtcatgcaccttttcatataggttttgtttaagtagtaagggacttatattcggatcaaaaaaatatgacattccactttattgccagcaacagggtttgcattttcgatttcggccaatttttcggttggaccgaaatttcgtgaatttcggcactttgcggaccgaaatttttttgatattttaaatggatttgatacctttgaccaaatttcggtcgttatgttgatttccaggtgggggccgaaatgtcgaaccgaaattgtaatcactgccagcaacagcgatgaataaattaaattaaactgcagtaatattcaaaacattattttccatagctacgcagacgcataaagagaacaagagattaaatgcgcagaattataaataatctcgtcgacgtacgtatatgtagcacagccagctataggctatatatgctatccgatcttggggacctgagcgacggtggcggagttgttgacgaagacgcggacgcgcttggggtcgacctcggtggtgacgacggatccgacgcgcagcacgacgacgtgaacgtccggccggtcgttgaggatgatgtgcttcgccgcctccgccggcagccccacaacctccggccacgacgacttgtcgctgctcattctcgcacaacgacgaccctagctagctacctgcctggagatcgagggacacaatgcaataatgcaatcagttgttgtgcccaattaacctgctcttaggctatagccgtgctggtccggatcatatatatatatatatctataggatgacaactaattgactggttttgtagagagagagacacacactactgaagaaacgatcttttggatcggtgtgccaaattttacaattaatagagagaggcgtggggcaaggcggccaaccggccatatatatgtgtaccatgaccaggtccgggccgttacatctgcaggcaccggccgccctaacttggccatcgatcattacaaataaatttcatatatagaaatgaaggcgtttggcattgcatgcttgtatctttttctttagcggtgacgacgttgatacgtatgccaaacggatcacatgcacatcatgcattcatttaagttggaatactctagttagcccaaatccattatatattaaaagtccattaaacttcttacaaacgttcctaagccgctgttgacggtcgttatcgatcagtttcgaccgtcaatattaccaaaatagaggagaactagtaataattgcattgcatatatatgttagaataataatattccactagtattaggtatactaacctttgcagagattgaccgtaaagtggaggagaatcgacatcaacacaaacgataaatcaatcaggcgatgtcgagaatcagacttatgtatgaatgggccaagaactcagaattgtcacgacaaactgggtcaaaattcacaagtctacataaaggaggaatagaggaggccgccagccgaaaggtgggctggttgggctggcccctggttcggccgaaccagggggttcggccgaatctcccgtggcaccggtggatgcagggtttggatggacggctaggattgatccccaatgacggttcgagggtaataccgaccattccaaccgtcataaccgtcattacctgcctataaaaggagctcatcttctcacttcacacacacacctcaagcaaagctctctcatattctctcaagtttagtttagtagaatagaattagtgtagaaatcaggcgttcggaagccttcagaagagttcgggtacatctctagtagttttccttttctcttttgtaagctttgtacttttattagaatattcttctatatacatttatggtattgaaatacttttcgagtatataaatgccaactttacattatgttcatgttatactgaatatgttgctagcttatctgggagatgcttagatgcgggtataatgtttgcttatgcaattactctatgtcatgacgatgatattggagtagtatttggtagtttagacgtggtgtctagattacgatatatcattatctggagttatatgctgcggatgagaggtgggccgccgatggtgacagctcagtatgggtattcctccgcgcgtgtatataatcctaagttaattccctggggagggtattcctccgtatttagccccggttgtatggtcatgacgggctgtcgtaagaagctcggcagtcaggagtggcttttcgaagtaccatgagagcatcggatagaaggtattagctagtatatcagatatctagaatgtatgtatattatgtatactagaagtataggaatagatttcctttttttattctttctacttagcttagatattatatcatgagaatgagtagctactgcttgtgtgtcactctacccctggattatcttaatccctgcttaggatatgatcatcacaagtaacaaataaattattagtcaagttctctctacatgatcttcccacgggataaaataaatacgatacccttggaatactatcgggtgaaatgctacaatggtatatccgtgcgcttgcggataaactctgtaaccataatataccaggagtatttctgcgttattgctgggaattatatttctagtaatgtcgttaagaaatattaacaagcatttctggcgccgttaccggggaagattcataatagagattacctgaactaatactttatatttacctctatataatcagtttcctttccaagctaaccttggttgttttcacttctgttctaaaaaaagggtagtgcatgactggtttcaacttgccgaaaaacttcaatgaaaatccagaagctttctttcggagcgtcaggccgtgagtcgttgctccacagaaaactctaccgacagagaaaccagccataccagcgccaccaactttcaagaccatggctgacaagacccttcgcgagttcattgatccctctgctgacaatgtggccattgggtcgcagatcaacatgggagacgtggatttcgacttgaagtccagccttatcacgatggcgcaggctagcccattctgtggcaagcctaacgaggatgccaatgctcatctgcagcagttcctagagatctgtagcacatacaccatcaagggcatcagtccagacgccgtcaggctgaggctatttccgttctccctcctcgggagagcgaagcagtggttctacgccaatcgtgctgctgtcaacacctgggacaaatgctctacggtattcctctcgaagttcttcccgatgggcaaaacaaatgcccttcgtggatggatttccagttttcagcagacgagggacgagtctattcccggagcatgggaacgtcttcaggagtacgtggccgcctgtcctcatcatgggatggacgactagctgatcctgcaaaacttttacaatggactcatgcccatgtcccgcaatcacctggacgcggcaaccggaggagctttcttctctaaaatggttcgaggagcggttgacttaatagagaatatggtctccaatatgggttggagcgaggaacgactccagacccatcagcgaggcatgcacaccgtcaaggagatagaactacttgctaccaagcttgacctcctcaggaaacacttggatgacgacaagaaacgaccacaagtaaccgttaaggccttggactcacacgttacatacgaggtatgcagcaacatgggtcattctgggaatgactgcccagaaactcgtgaggaggcgatgtacatgggcaacaacaacaacgggcatcatccacaaggaggtcaggggtggaaccagccacgcccagattattatggaggtaacaacaatggtaacttctctaaccaacccttcttgaaggatctcgtttctgcgcacaccaaaactactgatgctttaagcaaaaagctagctgctaatgacaagatcctagagaacataaatgcttagttagatggctttgcctccgctttccaaaaccagctgagattccataaaatgatagaaacccaactagatcagttagcttccttagtccctgcaaatgaaactaggaggattctagggcaacccgactcctccgtagaaaatgtcaaggcgatcacgacgaggggaggtaagtccactcgtgattcgccatatcctaaccctgcaggaactaatgggatagccaaagaagcgccatctaatgactcagctgacaaagaggttcagccagaaaagaccgtgccgcagatatactgcgacacacgattgctgccatttcctcaacggagtaggaaaccgttagcggatgagcagcttgctcgttttgttgaagtaatccagaagatccacatcaatgtgccattgttggatgctatgcaagtaccaacatatgcccgttatctcaaggatatactcaacaacaagagactgctcccaacaacggaagtggttaaactgacggagcaatgcaacgacgtcatactccacaagctcccggaaaagaagaaggatccaaggtgtcctacaatcacctgttcgatcagggcacatcagtttgaccgggccttgtgcgatcttggagccagtgttagcgtcatgccaaaggacgtctttgacaagctcaacttcacggtgttggcatccacaccgatgcgcctacaactggctaattcgtcagtccgttacccggcagggatagcggaggaggtgccatttaagatacgggacttcttcatcccgtttgacttcgtggtgttggatatggatacaggaaaagagacgccactcattctggggcgttcgttccttagcaccacgggagccaacattgacgtgggaacgggaagtatccttttccatattaacgggaaggaagagaagtttgagtttcaatcaagtacgggccaaacccgtagaatatacaagtggtcgaagtggagccacccaagatggatagcctggtgaaatttatgcagaactttctggagaaggaaacaacgatgcccaggaacggttattggaagacaccggtaaaaccaagtacactggccaaaaagtcagagcagtcgactcacaagaagccgtcttccgcatctaaaccaaagaaggtatggaaggaaaagctaaagatgcccactccatcacctctagagtcggctggaaaattcgtgcactaaactaaaaggaggtacagtcctgcacgtcggacttaaaatgacgtgaccttcgccaacaggtaaaatggtatgtatccgcatatttgttttcaccaatttgaatttttgcatcaacacatgtttgaatttcaaaattacatttaggatttttgaattttgaggaaattcttcaaatgaatttttcagagcaaaccaaaataaaattttcaacgaaaattcacaatgccacgaccgcgctgaccgttggaatccaacggccaaaagtggggccggttgggcataccaggggtttggctgaacccactggtgggttcggccgaaccagccaggcaacgactatttgccatttttggtagggtaacatctagtggtcccacatgtcatttttaaccgttgtgggtaccctataaaaaccagtcggccaagagagggaaatccaccccatttcagcaagctttgatagtttccctcaaattcaaatactagttgcatacatacaagtgctttgctgaaactaatcggcaggtgaaactcttgtcatttctaaaccctgccgagttaatccgttcttgctccattgtgcagaatgaggaggcgattgtctcgtctgttcaaggggtccggctcttcatcaagtcatcatgacgagtctagcactcattcatcagctgatgtctcgatggaagacgccgaagctccgcgacgactcctgaacgataccgacctcgacctcgtcggtgatcgggaaagacaagcctactacatgctgagtgactaggaatatgctcacacgcgagaatactctccagagctgctgaaaaagataggtatggatgttgaatttcgtgctatttagaaagttgtttgatggcagagatttcctgtggtagataaacctggttctcgtttgcttactttgcaaattctgtgcactttgaaagaaatagaagatggaatttattttcgcttcttccataaggagtatacacttacatggaaaggcttaagtacacttcttggttttcacgattcctgtaaaatcgatctctagaaaggaatttctgggttcgagaaaaaataggtttcgggaagatatttctggtgctccaatttgcaagaaacctaggacgaatgacattcataatcctacactttggctcatgcacaaatggattgctataactttgtttcctagaggtgatcttagacccattaggggggatgaattgattatcatgtttaccatggtttgaaagatcaaaattgctcatgtgaaatgtatgataagacaatgattagagaatataagattttcttctcctgttgactgcacttctctaattactcggatagcaaaagggctcggggttgttaacaaccaaattgcttttatgtcagccgctcgtccgtgtattgatgagacttatctagtgcaagggcatattctgaaacatggagtagatggatctttgttatactttttctccagttgtacaaatgaaatcccgttgccaaatgcgaggaatcatttgtacaactgccatgaactaaccattcccctgcagaccatagaagaatctcgtgtaggtggagcaaacagggagacgcgcaacatgacaaggaacgaacaggaaagttcaccatcctcaacacccgtgcagatgtatgaggcaggttgggaaccaactggggatgcacccggatggacccaagctccatgtcacaacatcagagtctcaagatgggcaagtgccagtgaggaccgatggcatgcgtctcatgacatacattcgggggacaaccaacctcccagatcaagtggtgtgcctccatctcgaagtgaatagcgctcgagatcctctcgttgggacttgggtgaaattactaggagaatggatacccttgatatgcagacgggggagatccagtacaacctcatggaacatgtagcacaaacgcaagaatggcaacaatctgctgatgctcagttcgccagcatcaacgacatgatgcagcaacagcatgatgaccttcaagcatagttccgcttccaggggttcaatccttatcaaggaccctgagcgaaagccaagcttggggggagacatttcttcccccactaaggtaacttgtatcacattgcatatttccctttccaaattgcatatttgctttccaattgcatcttataaactgaaaacaacataaaaatttgcaaaatagaaaataccaaaaagataggataggtttgagtcatgctaggtaagacaagctagttctctttgttgaaatgatgaatagttgctctgttttatatctcttatatatgggttcataggtaagtgctctctcaaagattaaatataagtagccaacaattatctgggaacctgaggtaaatgagctgcacttgctaatctgagtctaagttattgcaagatacgagatagtaaataagagttactatgatcctaatcctagtttgacttaaatttgaaagttcctcatttgatataaattcctaccggagccaaaaatgtactatcatggttaaaccttatacattttggttactcgccattccattgaactttgtcaaactcttgtgacttgtatagatactcctcatgcactatgatcaatatcatacacccacatatatgcacatgctaaactcctaccaagtattaacattatattaacattggacttgggagcagtatattgatacaccctggccaaggccattcacacataatgtgattattgcacatcaatgcaaggttaaggctatgctcaactccaaatcttactgtattcattaggaaaggctgctgcatggcttgtatgattgtaggttaaagcatatatttgtgtttaaagagagagacttgactcagatcgattaccaccagtacaccaaggcaaagtaatcgtgcaagacacttgctattatatgaacttaaactatcaattggactagtgctaccatctcaaggaccgactacgccaagtcatgttgttattccatcactaagagattgtgccaagcatagatggagtactcaacatcattaaatcaaaagaagacaaaaggttaactcgtttcttgctgaattgaactttactaatgatgaaaattttataatatctaaatggtgtacatttgcatttttaagttttatgtcaaaggatcatttcactgctacaacaacgaacgactgcatcgaggatgtgatgtattgcacagaagatgaagtgacacttgctcaaattgagatggttcacaacaacgagcagaccggttacgcgcagatgctccaatttccattggatgtgtgatccagccagtcgtcttcctccatgcatgatatatatgattggaaatataatcaagtctacttttatctctaacaaacggctcgtcatttcgagttcccataagagaataatgtctattttagtggatactgcacagaagctgaaagggcccagcgaacctgctcgggaatgactcatggagacccttgagctagctcacttactttgaatttcagcagtcatgtttatccccatctagtagggttgttcgtaatataaatatcccctatgttttatcatttgaaaaacttttgacgatgagaatatgcttgtttagctatgtgctaacaaattcagagagatatctacccctttgctgttgtgatttccttgtgggattacaaaagtggtgttcgatgccccctaattggtgtttctggtccctttgaggatttttccttgattggttctaggttgtgttggttggtaacttagagtgtggttgggtgaactctcaatttaggttgccataatagagacggtggtttgcttcgagtatgatcgtcaggaaccacggttatcttggctgcttgtagctagttttcttggtctatttgaggctttatcggttcttgatcctatgccgtgaagatcgggacatcactgtacacacacacatacacacacacacacacacacacacacacacacacacacacacacacatatatatatatatatatatatgtatgtatatatatatatatatatatatatgtatgtatgtatgtatgtatgtatgtatgtatgtatgttgatcagtcaataaggattgcacttcgttgtgaaacatataaacaacagagggagttgcttgtacaacctgcaaaaagctagccccttcagcgattcaagcatgcatgatgcacaagtaacatctttgtgatttttgccgcctattaattacggtctaggagacatggggaatttattacgctctagcttttgccttattttagcaatgtgctatttcatcctggtagccaagttgataccgttctatagcgaattggtgcggctgacaaacgcctgtgagatagggctcttcttgtgtgctagcattgatgaaacgcctgtgacagatgcatcgatagaatcctccacacctatatgattctctgttgagtaaattgcgcccgcggtacacaaacttgtaaggtgggtgcaatttagtgtaaaaacttgaaaaactctcttttcggtacacaaacttgcgtagtgcgtgcgaaccaaggccaagacatgacttcatcaccaattttattgagttggcttgtgattaggatgccacattggcgcatacacacgttatgggggcatgagttggctacacatatttgcaaataacccctcatacatcttccaattcctccgaatcttcttttgtgttgtagcccacgatgatgcccatgctagagatcagtttcacgatagcctaccgccaattgagtttgcaacaaaaggagataaatcaggagattgatatttggatcaaggtggaaggccgcgaattggatccaggcggtaggactttgctgggagaaaacacgccggccacgtttagggcagcggtggtaggacgttgccgccggcgctgaggcaacatggtgccagggctgcgaagtgaaggtgcacgatctcctgtatacagtgagtactttagtttatcatggtcaaaaatgagattgtctttctcaattccaatttttgtggagatttcttcctcttattgtcgatttattaggtattgcaaacgagaaggactatcagttgttttaatttatgccaggagctagttcatggtacacaaaagctgtaatttttgttgacatttatggtatagaagtgatcatggcaaatttgtatttttggagagcaatttgatcattaatgtactgctagcttctgttgttaactatgctttcttcctggatatacccttaaacatctgaacctaaagtaaactgttctgaagatgaataattatctgtacacaatatatgtagattccgaagatgaagaattcagcattgagatgcaccacggaggcttttttatgggaaatggtgtaaaccgggcttatgttgatggtagagtaagctggtttgaccattgtgagtcagattcttggtcactgttgtgggttgatgatttcattgaagaactaggatatgagaaatctgataacaccaaaatttactggttgcttcctggcaaacaattaaatgatgggttgaggagggttaagtgtgatgcagacactaatagtatggtcgctcttgtacctagggtccgatcatttgttttgtatgcagatcatcaagatatagtcgacgctattgacttagaagatgtggcaattattggttcagatcctttgcgtactgctgtgaacccaagtaaaataattaggtctaagagtgatggtggggagttgactgtagataaacgtgctaccgacgctaaaattgatgataaagaggagtcaagaactgaagatccagattttgttgatagtgattatgagattgatcatggggatgatgacttgtttgataattgtgttgaagggcaaattgagttagcgcataataaagtggagggttcagactatggttcatttgaagatgaaaggttgatgatgccagatatttctgaagaagaagaagaagaaatcaagttcagttttaagagttttagggctgatgtagacatggagacacctgagttcaaggttagcatgatgtttgtagatgctgtagagcttacgaaagcaatagatcaatatactataaagaaccgagttgctattaagaagacacggaataccaaaacaacaattgaagctaagtatgctgaaggttgtccatggatgttgtctgcatctatggataatagagtcaaatgcttagtggtaagggaatatatagagaagcacacctgcactaaacagtgggagatcaaggccgtcacagctaagtatcttgcaaaaaggtacattgaggaatttagagataatgataaaatgacactgatgagctttgctaagaaaattcagaaggaactccacttaacaccatctaggcacaagctaggtagagctagaaggatggctatgagggccatatatggagatgaaatatctcagtacaaccaattatgcgattatggacaagaattgagaacctctaacccagggagctcattctacctgaacctacattttggttgcttccatactttgtatatgtcattcgatgcttgcaagagagggtttatgtctgggtgtagacctatcatttgtcttgatggatgccatattaaaacaaaatttggtggccatatcctaactgctgttggtatggacccaaatgactgcatttttcccattgcaattgcagtagttgaagttgagagcttgaaaagctggagttggtttcttgacactctataaaaagaccttggcattgagaatacatctgcatggacagtgatgactgataggcagaaggtatgacttcgtctgatttttcataatatacataacttacattttagttcctaactataattcttcataattcgtttccaggggcttgttccagctgtgagaagggagttttctcatgctgaacaaagattctgtgtgaggcatctatatcaaaattttcaagtgttatataaaggggagacactaaagaaccaactttgggctattgcaagatctagcactgtgcccgagtggaatgccaatatggaaaagatgaaggcattaagtagtgaagcttataagtaccttgaagaaattcctccaaaccaatggtgtcgagcctttttcagtgactttccgaagtgtgatatccttcttaacaataactcagaagtgtttaacaagtacattcttgatgccagggagatgcctattttgtctatgcttgagaggattagaaatcagatcatgaacaggttgtacaccaagcaaaaagaactagaaaggaattggccatgtggcctctgcccaaaaataaaacggaaggtcgagaaaaatacagagatggctaatacatgctatgttttgcctactgggatgggagcatttcaggttagcgacaaaggatctcaatacattgttgaacttaatgtaaagagatgtgattgcaggaggtgacagctcactgggattccttgtaaccatgccatttcctgtctaagacatgaaagaatcaagccagaggatgtagtgtcatttttctattcaaccaggtgctatgaacaagcttatagctacaacataatgccactgagagatagtatccactgggagaagatgcagggtatagaggtgaagccaccagtatatgagaagaaagtggggaggccaaagaaaactaggagaaaacagccccaggaactagagggtgggactaaaatttcaaagcatggagtagagatgcattgtagctactgcaaaaatggtggtcacaacaaaactagttgtaaacaaaggaaggctgacttaaaacttcagaagcaacctatgtagcaaatggcgacttcatcaattgttgattcagaagagcttgtcatcactcgggtaatatttatacttattttgcttgtgtatttgtttatctccactaactatgaattttaaactcattgtatatttgtttcaggaacctgtcatcactcaggtactattgatgctcattttgcttgtgtatatgtttagctgcactaacaaggaattttaaacagaacatatatttgttttaggaaatgcacctacttagcataccccagcaaaattctaactatctgagttcatctgtggtggaagcttttattaaggaggtgacaatccttcattaagttctcaaagaaaaaacaatccttcattaagctagcattttgtcagctaatagcaaccatcataacattagtacataatcttttacaggctgctagcaaccatcaagaaagggtgaatccaggagcagtgccagagactgctttcattgctactaataggagagaaggggttcaaccaccactaaccacatcaaccaaacaaggcagggccacattgaggaagagaagtgcagcacccaagaagaaaaactctcccaagaaaaagaaacagtagtttatactatgcattcataaagttggttccatgttatcaattttgagttacattactagtgcacaatcaaattcatgtcaagttatgcatttagttttcattcaggttattcactgaattttattcaggatttcagtttctgttcaaaatatgcactcacgtgtttcattgtgttcagattttgtcacaatgtgtacaattaagcattacatccttgttgcttcagtggatttaatgttcatgctgttaatctgacggcacaatggcttaattccttgctgcttcaatgtctgcactgaaacattggagctaggcttcaaagttgctatatgaattgtcagagtctgagataaccaatgttggcctaaagcaagccactcaaatgcctaccgcagcatcaacttctaagctctcccactaaacttgacctcctcgccatctgtcactatcgtcagtctcaacaatactgttgcagccactgccgtcaaacttgacctacccgttgtagccaccgtcggactcgactccccccacggcgtagctatcgggctcgacccccatcactacaacctccgcggattcgacctccccagctccccgccgctatgaacacctctcagattcgtttcactgaaaaattatacatgatcgaaataccaaacaatagaaggggttttctgataaaacacggccattgcttacgagcaggcgaacctgtccttcttacgtgaatgcttagttggcggtctactcatcatccaactcagcaaaattagatttgctattctgtttagtcatagtccgcacgcacctatacaagtttgtgcaccaaaacgagagagtttttcaagtttttacactaaattgcacccacctaacaagtttgtgtaccgcggacgcaatttactcttctctgttataacttctcccttgtatattctcatatcattccttcttaatatcattgttataattcatttcttctttcgcgggaaagataatatgcaaataaacaatgcagttaaaaaaaaagttgatcaacacaatgcagtaggaataagtggtattaggaaaaaaatgtataacggtattggcgttaatgtggcctcgtgccgtctgttcattgtaatcgtgctcactgaaatatgacactctatggatgcatgttgcagtggaaaaaatgttatcaggctaacaaactcaaaaataaattaatcttagaaaagaaacatttgtatagagtattgtacatatatagatttatattgaaatggcgaaatatcatataaaacttctgtcgtaagccttcttttagaaaaggaagggtgaggagaggttatttttaaggtggggtttgatggtctacatagtagtggccgagtcttttaagtatgctcctaatcacctaaccacgccaaaacaaccactacattgagggtttcctacagaatacctcccgggacaagcaagaggttgctgttctttcctgctgcagggaagagagggagaggggagagaatagagggaggagaggtgtagacgtgtagtcatcttcttatgctgctattgtgttgttcttctgctttgctgctgcagtaggatgacgtggggatcaatcttgagaacagaaaggaaggaggagtaatccctggctttaatttgtttctttgattcagaatggttgcaccaaagaggagaatgcatagtactatttaaagacctggagatatatgaagagaaactatatgtgtgtccgtgcatggcaacacattgtgatgatcattgcatcaaaccgaaaaaatatattcgaaaaataaatcatattaaaatatttgaaattccggatgcatgtttggatttcggttgtgctgaaagctaggtatatttgtggattttattttgtagtttggtgtatgataagataccaaataattaggcccatgcatagaaagggaatttaattaaacttgtcatagtgaaagtttgaacttatgttaagagaccggtgtgctcattgtgccagcaaaacgacgaaaaccttatgttaagagtaacatgttggagtgatctttcagaaaacctccaataaagaagtaaacaagtcacaccatttagtacacatactccctccattctcatttatttgccgttggttagttcaaaattaaagtaaccaatgtaaataaaaacataggtataaatcaactttgacaatcctagacgacctcaagaatattaattcagctcctaaaggaccacacacttctcccctatatataggtacttaataagtgtccacacatgccaatagaaatacagaattgtacatttcgtatattatatcctaacttcttgaaagttggtagaacactagtttcaccgctcccacgcgtccacacatatgctacatcagataatgaaaaaaagaacacttcccctgtaagctaagtaaacctagaatgagaacgagggtaagctctcaaagagaggtgaataatcataaataattgtacgcattgaaagcaaagagaccatcgacccatgtgctttctgctcaataagttactatgctagctcctcccccataatatgacaatatagtccacattgttggaactaacatagtttacatcttttataacatgccagctaaatgttgtggtctctatctgtctaagcttggaaggcaccgggaatcgttcatacaagaatacaagtggaagcaggacatgcctgctcacatccgttattgggtttacacgtcggcgcgcggctgccacacggcactctgcctgtggctacgcttccacggcttgggccgtcgagaagccgctgctgcaaggtgaactgatgagagaactctggcgatcgaaggccagccgccacctcggcgtcttcaggtccagcagcagctatctactgacgaggaactctagccatcggcgctgtttgctgatcagttcaccagcacgcacgagctccgttatatacaactttagtgaatccggctggaagtaagtgaatagcgtgtgccattatttctgttatgctggaatggatatgcagtgaacagcggcctataaatcctagtccaacctgtaagataaaaggagacatatatgtcaagtatgagatgtatacctctccaataataggagaaaatctcaatatgaatacattttgtagctttgatctgtcaatgagttcttcaattcctagtaaagagcagccatgtagaaatgaatatgtttatcctagttttatctatctatctatctatctatctatctatctatcatctatctatctatctatctatctatctatctattatatactaaaagttcattaatcttcctacaaatgcacctaagtcgctatgtggcatcctataaacgcttataagccgtcacatggcactctaaaaaataaccgttgattttcattaaatttggtagacccattatttacaaccattagatttacttttttttaaaaaaatcatcccctaaacccggccccaccgagcattaagtacgtaagttctaagttacctacatacgccctcccttccctctttctatttccattaattatttctcatattttcttgctttatttgttatgaaaattaagtaactacgatatctaaatcatataattgttttttttatccatcgatgcctttagattgtttacgaccaaattcatgattaaagaccaaaattcactataattaaaagttgaaaagaaatattttaattttgggctatattttctgacttttgcatgcatttcaaacaattggaagaaatatgaataataataataataataataatgataatatattttatcatcttacataacttcacgataattaaattagatctacagttctaaaaagtaaaatgaaccgcctatgttacttctatggggttgggacctaatctccctagcacgcaaaatgaagcaactcattaaccatgttttaaaaaatgaattaatatgatttttaaagcaactttggcatagatttatttttaaaaaaaaaccataccgtttaacagtttgaaaagcgcgcacctggaaaaaaaattgtgctaaaaaattaggcaactatgatatctaaatcgtataaataatgttattttaataacaagacatccatgcctacgcacgtagcacattcttcatactattttacatttaacgacccacattcactataatgcaactatcaaaaaatatatatgtaacttttggttatatttttcgacctttctgtccaactcaaaaagttataaaattatggaaaaaaataatgatatagattttatcaccgtatatagcttaacaatgattaaattagatatacaatgaaaaaactgaatgaacctaaataatgttccaaaaaatactcctctcattccgatattagagtaagtcaaaataatattattatatttgtagtgtatatatttttaaaatatattgtatacatataaatatatttatgaaaagataactaaaaaagatgcatcttaatcaatcaataaggcatttattctatttttatacaataaaacagtagtaattataatgtattaaacttgtaaaataaatattcttattatatacatacgtactctttctcctcctctcctctctcattccattctttattattctaaattttaactcattaacaacttaataaaaaataaataacaataaaaaatctaaatgactatatctttaagttatactatcgggtttttaagttcttttgaactattgttttatttataaataaataaataattcaggatccatatcaaccatatttacagtacgtcatttgtaaacacctatgcgtgtcaaccaaataagaaaaatagaacaataaaaagttgataataattcttatatcatcttaaatcatcatacattctttatagagcactaacaatgtcatgtattaagtattaaatttaaaaataaaatattagaaattataataaaaaacatttgaccatcagtttcgacataaatatgtagatccattattttgaaccattaaaactacttttaaagaaaattttaagccgctaggtgttacattttaatagttagaaaaaaatatttgaaattttaggaacaaaacaatagatcatcggttttaaatcatttatagaaagtagggaagaactggcccaaaaaacaaaaacttccccctccacctcacatgtggacaaacacaacactagttagtcccctcacccctcagctcgcgccttcccctctatccctcctagatatttttatagctctcaaactaaaaggagaaataatcaataatattaaaacatacataatttttatgccacacttctaatttctagtctaaattgctctattcataattaaaccaacaatttaaagatctataaatcatatattttgaacttaaaataggagtggtataaaataaaacaagaaatataaaaggaacgttggttcctacttttcactaaaattagaacaactattgcatcttccatggccatatcattttttaagtgcttagatattataggctttcatgacattatgagttactccacatattattgcatatataagccacacaaagttagtgatttatagttggttgagaagttatttttgtaattattaaactaaaatgttcggagtcatattgactaggtatttttcttttttctttaaaaaatttatatgtaaatatgtaacaaattgcgtcaattgaaccaactagtaggactagcttggtggtacaaataaaacatattcattaacaataatgttaattaggctttgctaaaaaaagaacgcccctaaacattttattaaataagaaaaaacaccatatgtttccaaacaaacgaatagacacactgatgatgataagttatggataaacagtaagtttgaaatgacaagtatcatctggttggtatactataattttaatttttttcaaacataatctctaatacatgcccgtgcatcacgcgggctatcttcctagttatatactaaaagtccattaaacatattacaaacgctctcaagctaccacgtggacatcctacaaacactctcaagacaccacctagcactctaaatatcgacccttgaatttcatttaaatcgtgaatctgttattttaagccattagatatatagataacttaaacaggtgggccaactaatttattttatgaaaataaactatcctctcatccatactattaattgtacgtaccgatacgcatatagatctatatatactatatcacgtacgtatgaacattcttctctcctctccttccgtactcttgtattctcttctattttgtaactaaaagtttaatggaaaaaacagtaagttaggtagcaaattaatcataatcataactattggactgtcgttttataattagatagctaaataaattaagatttatattacacttatttaatttaattgaactgttattttatttacagttaaataaaaatcaagatatgtatacatatattactcatattttatcaactaattacttacctcataggtttgttatcagatccagctttactatcctgtaactttattaccttaactttattgttcaattgctacagcgagtgatcctgctatatacaggcggcatgcaaaggcgcgccccggtctctagtttttttaatagagggcactatagtaatttttactaaacattactctttgctaaataagcaaaatccaagaatgacaactatattggagaagaaggtaactctactcagaatgagaacgggtgccaggtcttatgaagacatgactgctcatcaatactcttatatatgtatatatatgcatgcaaagcaaagagactatcaacgtgcatgattttgattctgtaaataagtttgtcttatgtatgcatgcaaagcaaagagactgcatgattttgactctgtaaataagtttgtctgctagctcctcccccaaaatatatacatatatatgcatactccgtatggtaggccctcacaagttaacatatgccaactgaactttgcaactgttacgtttgaactctatctatctaagcttggaaggcatcaggaatcgttgatgggcagagagacatggaagcatgttatgcctgcatgcatcccttgttattgcccacacaagcagacgcgtggccaccactgggcagcctacctccggtcaatcatcgacgggcttgtgtagacgagaagccgcgacgagcagccgcaattcggacctataccgggattcgtggccaagtcgatagagattcactgctccaccaaacatgcctggccgcacgaatgccagccatcggcgctgcttttttcgagtcaagcaagtgcatataatcctgagctcgatgccatcttcggttaaggctgctgaatagtagtggctagcaagcagcagctgtcgactgaggagacaactcaggtgatcaccacagtatgctgatcctgttcacctgtgcgcaggagctgcggtcttgccggtggttttgatccgagagatgagaaaagtgaccgcatattttcaaaaactttcagatgcttaattgaaatcaaggcaatcccgtaccaaattaatgtatctggctgaaactgagtaaatcctcgtgtgccaccatttcagttgtgccgaaactgagtaatgttcccgtaccaaattaatatagctttaatatcctagttaacaaacgattgttccaggcatcaatgttcatgtttttcagagaagtgatgattgcagaaattagaatctatataatatggattgctcggagcacatcagtcttaattacactcgatgggcactgaaatgaactcaatttgccttaattatttgcattcttacaacaacaaccgcattagcatagatgagagatccgacaaatacttcaagtattaacagtacattaacttgggacttgggagctgtatatataccgatccgtcaatcagtaatgcactatggcgtgaagattaacacatgaacaacagagggagtagcttgtacaaaggccagcctgcaaaaggctagcggcctcttcagcaattcaatcatgcatgacgcacaagtaatatttctgttatttatgccgcctattaaatagggtctaggagacatggggaatttattgcgctctagcttttaccgccttgtttagttcgcgaaagaaaatttttggatgtcacatcggacatttgaccggatgtcggaaggggttttcggacacgattgaaaaaactaatttcataactcgcctggaaaccgcgagatgaatcttttgagtctaattaattcgtcattagtatatgtgagttactgtagcacttatagctaattatggactaattaggctcaaaatattcgtctcacgatttctatgcaaactgtacagttagttgttttaatctatatttaatgattcttacttatgtttaaagattcaatgggatatttttggaactaaaccgggccttattgtatcaatgtgctattttatcttggttgcgaagttgatatcgttctatagcgtggctgacaaacgcctgtgacgtagggctcttcttcttgtgctagctccgatcaaacgccgcctgtgataaaagcatcgatcgaaaactccacacctctactactctgttaaaacttctcccttatatctcatctcattccttcttaaatatcattgttataattcctttcttcatccgcggcggagataatatgccaataaacaacgtggttaaaaaaaagagggttgatcaacacaatgcagcaggaataagtggcattaggaaaaaatgtataacaatattggcgttaatggtgccctgtgctgtcggttcattgcaatggggctggctggaatatcgcactgtatggctgcatgttgcagtggaaataatattatcagtctaacaaactcacaaagaaattaattaatctcagaaaagaaacatttgtatggaatattatacatatatagatttagattgaaatggcgaagtattatataaaacttatgccataccctttcttttataaaagaaaggtatgtagtggccgagtctttttagtatgctcctatttcctgcagattacctcctgggacaagcaagaggttgctgttctttcctactccaaggaaggagggcgcggggggcggggggggggggggggg

SEQ ID NO: 29132 - DNA, 6218 bp, Oryza sativa
gggttgtagatcttatgctgctattgtgttgttcttgtgttgtactgctgcagtaggaagacgtgggaagcaatcttgagaacaaatggaaggattaatcgttggctttaatttgtttctttgattcattgcgcctatttaaagacctggagatatatgaagagaaactatacgtgtgtccgtgcatggcaacacattgtaatgaacattgcatgaaacctaaaaataatatttgaaaaataaatcatgttaaaatatttaaaatttcgaatgcatgtttggatttcggttgtgctgaaagctaggtatattagtggattttttttcagtttggtgtatgagaagacaccaaataattaggcccatgtgtagaaagggaacttaattaaacttgtcatagtgaaagtttgaacttatgttaagagactggtgttcattgtgccactaaagccatggaaaccttacgttaagagtaacatattgaagtgatctttctgaaaatctccaaagaaagaagtaaacaagtcacaccaatttagtacacatactcagtccattctcatttatttgctatattagttagtttagaaatgaagtaaccaacgtaaaaattaaaaagacaaattttgctacaggacactgcttatgtatggttttagccctaggacactgcccaaactcacttttgggaaaacactccatagacttatgtgcaaaattgagctgataaaaaatctattatacttttttttaaaatttctttcaacaagaagaagggaatatatgcatatatattcatgttcagaaaagtaacatgcatggatggcaatatatacatgtatattcgtggagcgttgtgtgcaatcatgttgttactagtgaattactaatgctgataaatagtacaatatgcatatattaaagcaagggaacgatgatgcatgcttgctatactctattaaatcgtgtgctccacctcgtcactatacaggctatacacggtgcgtatgggtgcgccgggaatcgttgatgcacagatatgacagatttgtctgagaaaatcggcttgtaagcatcacctccgatgtatggaagctcgctgatatggttacgacagccatgcgtacctccacccatcacaccaacagacggtcattccaagcacgtactggtgccgagtagtagaacacatagggacgggttggcagagattcgctacaatggctgcacgcatgccacccgttggcgttggttcttgcaaactttgagcaaggtagctgtgctctattctgcatatgctcccatcggcccgtaacagtgagagtaattttattcgatgtgatgttagtcggatcaaactctaaaattgtaatgttgtaaattttataaaatgacctgggacccggatgcaagggtgaaaccgcaatatcagagttaatttgtgtggtggtttttctacacagagaagattagaagttctttatggatcccaaaaaaaaaaggaaaaacaagttcaagttattgtaaacattaccttaattactgttgctttatagtttctcttccattaaattttgtattttaatttttcctttaaatatttctcatttcgaaggaaagattatgaagcacatatcttgtaataactatactgaatactttttttctggtctatacagcatgtttggagcaccagcttggtttggattttgcaatacagcaagtttttacgacagtatcataagccagagcaaactccaccaaaaataaagtagttgaggttgatagacactcaggacgaacatccctttatttaattatgtattggtctttgcccattgaagttccgtatttttcaggaacactagagcttgctggtgaatttagaggttggaggtgaagttatgtgaacatgactttaatttaaaccatgataattaacttcaaatttcatgcatggagtgcgttatcatcgtgatgtttggaatttaaagaggattgagatttgctactttcatcaaacatagttgaaaaaattcttttgttttgtaatcatttttatataatatgtcaacacaaactctttcaaaacttgattctcaaccttttgtattggactagtcaccctggatgaaaaaaaggagagtcgttacagttgccacagcagctgcatctattacagatccgctgtcaaaaaaagaaaaggcaaaaaccatgtaagccgatcctgctgtctctttttgattccctaccttcgtcgctgctctctctaccacccgttggccttcctctaaaccggtgaactcacccggtatcccattccgatacctaccctaaaacctttctgcttggggatgctgccttttatgtcagagtttgtcgaggtcgccggagatggaagagaatgatacaggagtagggggtgaaaacgatcggaattggtagtatctcttcggaaacgatgctcgatcggccggtaattgaccatatttattatttaaactactcagtatcgacattaatatgatgcagaaagaaattagacaaaaagaaatttaaaaataacaaaaacggtacggtcggaaaatgtaccccttaaacggaaacaacgcccggttaatcgggaatttctgtgactgtttttacccctatacaggagcatagaccacaatgctgatcagtgagaagaaaattttcagacattgcttccaatttttcatgcgaatgtagtttagtaaatacattttctttagtgacaaagaccatttctaacccaacatctactccctgaacaatcaaggcagttcctgacgtcagctgtaataaaagcatcgatcaaaacctccacatatctactattctctattataacttctcccttatatattctcatctcattccttcttaatatcgttgttataattcctttcttcttcccctgcagagagaaaatatacctataaacaacgtggttcaaaaacaatgtcgatcaacacaatgctgtagtaataagaggcattaggaaaaaattgtataacggtattggtgttaatggtgcctcgctatgggtacattgcaatggtgctcactgctggaatatcacactgtatggatgcctgttgcacaggaaaaattattatcaagctaacaatctcaccaagaaatctcaggaaagatacatttgtatgtaatattgtacatatatagatttatatttcgatggcgaagtaagtttctaaatcctattccaacctgtaagataaaaggagacatatatgtcaagtatgagatgtatacctctccaataataggagaaaatcccaatatgaatacattttgtagctttgatctgtcgatgagtaattcctaataaaaagtagccatgtggaaatgaacatgtttatcctagttttttttaaataataaaactagccaaaacttgtccgagctttaatctccaactctccttgacatcgagtgggtatgtcaccaactcagtgtcgccttctatatcaccagttgagctcacctcgtctactagttcttctttaaactgttaatttgatggccaactaatcaatgatgtgaacataggaatgaataatcaacgatcatttaagtgaaaaattaaacttaaaggttgtaggctgtaggtggcactaattattttctttgtcctcttgataagaaaactagtgacagatagagaaatcagttatcactacgttgttgggcaacaaatagtgcgtgcacgatcgatgcatatatacatccaccccattgatcaagtactgtaattgtattgattgattgtttcagttattaaagttgctgcttttccaagatcactttttgtaatatattaagtggcattaggggtggaaacaagccgacttggctcgacttgtgaaagcttggtgaaaagaaagctcggcttggcttggctcactacaaacaatgagctaaaaatgcagcttggctcggctcgttaatgggctcgagctggctcgcgagcctggtatcaagtaaatctcaagtaggtgtaagagaaatcgatcaacaattttctacatagaatgtgtaataaagtaatatttttctttaatatatcatcacaacacataaatagataatatgataatcaaaattgttttttcaataaataaatagttagaaaacttgcaaaatttttgtatatgaccctaatatactgagccaaacgagctcgctaatggctcgtgagctagctcggtcttggctcgtttcggaaacgagctaggaagcttcggcttggcttgtttggctttcgtgccgagccgagctatgtgagcccgaaccaagcttgagccgagctcacgagcccaaactttttgtccacccctaagtggcatgatctttcagaacattgagtttcaattacagacggtgagcactgcaatcaattcaatttgccttatctgcattcaattggtacataggagctgtatatataccgatatatcgatcagaattgtgctgtgacctggaaattaacataggaaccacaggagtagcttgtacatgcccaccgtgcaaaaggctagcctcttgagcaatttttttttgagacaaaggcagcacctcatcgattaaattgcatcagcattaagtacctcccgaatatgatcctggattacagaacgaaaaatattacatgtagcagattcggaacaacgagctacggtatgagctgcaacattggttaaatgattgacatgaataaaggagcattccaggaactcagtctccaaattcttgatatcacggacaacaacgctgacacttgaacgatctcgtgcctattctcttgataactgaaaggcaatcggaggccatcaacacttgctggaaaccttccgcctttgcatgttccaaggcgaaacggatcgccaaagcttcagttagttctggagagagcaatccggttatcctcttgtttgcagcaagcaggcaggaggcactctgatctcgaattacaaaggccaaacccgtctgattagaagctggaagagtgcagcatctgagttaagtagtactaccatgcttgctggcggtggtttgcactttgtaactggaagggagagagatcacaccagaggcattcctttccttggagcagtactgcacattcatatctacatacgacacaattttgtgaatcacttgacacgggtgggaagtaacagggttgttcctagaaaaatttcccgcttcccatatgtgtcacggagtaacagccaggactgtcttctgaatgagagagctacgggttaggaaatcaaacacccattgcctcgtattgcataattctcgtatgcacaagttaatctgaaacttctccttgatggctttccaaacagttgcagcataggggcaaacaaggaagacatgctcaattctatcatcatgaccacaaaagatgcatccctccatagcaggaacatggcgtctcctgagttggaaccctgtaggaagacaatcatgtactgacctccatagatgtatcaacattttacccggtgcattgattttccaacgtgccttcctaaacagcgagtccacattcgctgcagtgttatcctctcccattggagctctgggccaccacaaataaatttgatgtcactaagttgtaagcagagcgaacaataaacaacccctcttgtcatgtggccaagaaacaaaatcctctcccccatgacggcatataggaaccagcaaaacttctgttgcaatatcatcgttgtaagctaccttgacaatctcctcatcccaagcattccttccaggattcatgacactggtggagaaaccatctttactcggttagccaaaatccacaatagtcccggttgcaataaaaaccaggattaaagattatctttagtcccggtttaaaagtttagagctgctttttaatctttagtcccagttggtgtgatctatttctagtccctgttggtaacaccaaccgggaaaaaagatgcccactatctttagtcccggttggtttcaccaaccgggactaaagatctatttttaagtcccggttggtaataccaaccaaaacaaaatatcgtggcggagagtacgaggcacctgccatctgcgagatcaaggaggaggagactggcagccttatctcttcaacttttcctccactgaccttatctcttcat

SEQ ID NO: 29133 - DNA, 1005 bp, Oryza sativa
tttttaagaattttgtgattcggatctgtgtatttgatttgtgtgtgatgtccgttaatatgtgatgtatttgtgatgaattttgtagaagttgtgatgtaattttgttttaagcttttgtgatctatttgaatatggccgatttggggatttgaggattcggggataatttatttgggattttgggatggggatggagtgaaatcaatatattaaaaacacaatgaagaaaagaaactaataatagagcaaccggatctagctaggctagctctaccaaccgggactaaaaaggctctatctttagtcccgattggtaacaaccaaccgagactaaagatgtatttttactcccgattttttcacccgggacaaaagatagtgatctttagtcccggattggtagtcccgtttgaaaaccgggactacaggggggttacgaaccaggagtaaatcccctttctccaccagtgtgagcgaattgacagtaacatcatcagggatagggaagcgggtattcaccatatattcctgcttgcacaccaagtattcaattgtccatcgtgatcttaatggatgaaccatcaccaacagcccagtgcacccccttctttaacaactcctgcccaaacaaaatattacgccaggtgaaagaggcagatcgaggtttaggggcagaccaaatatctgagtttgagaagtacctaactttcagaacccttagcaaagcgaatttggatctgtgagaagatgccaaccctgtctggtcagtatcgcttggttaaagatgaccaagtccctgaaacccataccgccaagatattttggcgtagacagccactcccacgagggccaatgcatcttcttcctcccgcctcttgagcaattcaagcatgctagaggcatcagtcgagacattttcattttctaaaaaagttagtcgagacattttggcaggtggtcaaaacatatttactactacctccgtttttttaatagatgacg

SEQ ID NO: 29134 - DNA, 14849 bp, Oryza sativa
tattcaaaaaatttacgtaattataatttattttgttacgagttgttttatcactcatagtactttaagtgtgatttatatcttatacatttgcattaattttttgaataaaacgaatggtcaaacatgtgagaaaaagtcaacggcgtcatctattaaaaaacggagggagtagtaattttgctgatctatggcacctttagttagggtttaggagacatggcaatttagcgttcacttattatacaaatctagctttcgtcttactgtaacgatgagctatttcttgcctcttgattgccaggttgatagatttccatagcgtgcctgataggggagatgctcacatctgtgacgtaagacactgcttcctatgatggaaaattttttatccatacgatagcacatagctcggtacccaaaaaaatgttcctactttcagtcagtaccacaggaatttcttttactttgatttgtagtaacaaccctactgtttattggaaatttggtcataattcggcatattttaatccaaaataacaagataatcagcatgatatttacaatgggatttgatccagtgatagtggtgaatgtaatcaacttgagcatgcttaacgtagaataagcatcaacaatcacataataacgcaatgttgacattgcgatgaacattaaccgtaaaacttctaattgaaataatgtaagaaggttataccccaagaatggtcttccgctggagtttgaggcagtattgcctccgttgttgttggcaggaacatccttgtccttgtttccagtgttgctgttgtgtccagtgttcgacatattggtgaagacgaagtagacgttgacgaacagtgagtagtcgcgccttgcgctccccaaaaacctaattgcccgcccgtccgtgcaaacgtcacagcagtacgtcgtttcggaggcctactctcccaacgtgtgtgcacacactcgtcgggatgggattaccgtagcagcaacagccttggaaatggatgaaagtgtgtctcacttcttcttagggagatcaaatccattctcattttatatgagaaatggaagatgaagagtaagagtcatggaatagaaagaggaatagagtaactaattctcatcaattagccatgaaccatcctccactacacaaccatcaaccaaccatcaattaggagtaattgatgtaggttaccaatagaacagaaagaggaatagagcaactaattatcatcaactagtgatgaaccatcctccactatacaaccatcaaccatccatcaattaggagtaattgatataagttaccaattcactaatcaaatggattaattctcaaaactcctcgtcccattgatatcccattagagaatgaatacacatgaattcctagcataatgagccttggaatttatttaatttaattgatttaaatggatcaattaaccaattaaatctaacaatccccaccaaattttaaggctcatgagaatgctctctattccatagcagcttttatataccagtgtttcggtcaagactgttaatgtcacagcctgaatttctgtctcaggatttataaattatttagtaaattaatattagaatttatattaaatgttcattaatttacaagtgaagttaaatgtgggaagtaaaaactcctaaatataaatcatggttggatttaatttttattaaattctccatgattaattatactctctggaattttctcggatttttcggagctcaattactaattttaataatacaaagaacatttcagtaattattcacatattaaattaatcattaaatgagctggttacagttttgttaaatactttgagtgtccaagtatgttcaagaattttcttggaactatttgagcattggaaatatttttaacaattgaaagatcatctcattggttaatttatttggaaaagtaataaaatcttcctcctccgcttgggcccttttcagcccattcccttctcttctctctcccttcctctcagcccgcatagaagtctgtttgtcctccctctcgctacattgttgtcttcaacatctggacagagcccgagccgtcccaagctgcagccgtgccgatccccttccgaatctggcctccccgttgctcctttttccaaattagttgcgagaacggaatcctctcaatctcctctacaatttccccaagaaatccccaaaagtttctatggaaatcctttccaatttcacggttcaatctttcctttttccggcgaagatcccaaactttccagagtttttcccgtcgatgtggactcgatcccgggctcccatggctatataaatgaccccctagtcgtcctctacctatcctctcaagtcccgtcttccgccatcgccggaatcgctctccccgcgagctccctctctctccacctccggccgccgctccagccgccgtggacagtaccttgccgcccttcgaagcttgtcactggccatcttccgtcgccgtctgtcgtcgcgtaagtgttggtaaggaccgtcgccttgcgctctttttcccggtgtcctcccttttatcgtcgctccgtagttcgccggtgatcgtcgttcctgtgtccgttatccgatgatctcgcttggctgtcttatcattgccacgtctacctaaaccctagatcaaattcaatctaatccgttgtttgtctagcatcgtcgtcgtctccgtgtgttgccgccgggtcgccgtcgtcatctctccctctccaatcgtttggttcggtgagacttctatctctgttcccttggtttaggttttaatctctcgtttgtgtcatcgagtagccgccgctgtgccgccgctaattgcctagtcattgctgtgttgctgctgttgtgccgtgtcgcaactatgtgccgcttaaacctagccgccgctttagcccgttgctcggtagttgagttgtctagccgtaggtgcaaccctaggttcctaccggcctatcgtttgtcgtaccggggctttaccgtgaatcgtgtctagcccaccggtttagccacagccgttgttgagtcattcactcgttcgttcgaatgaggtgttcctcgtgcttcgttcgttcatccgtgttgagtcgtcctttagttcagagccgccggttccgttcgccggtttcggttgatcatttgggtgatctcatgtcacgtagaattgactcgttgagtcggtatctcgtgaggttcgcttgccagatcaatccaagccattcgatcttggtcgactcggtcaagattaatctcagccatctaaaatcaatataaatctgttctctcttttcaatggcatattagtcctttttatcatatgtcatctaccaatataatctaatcttttccggagattgttttaatcttttatcttggttataaatcatttgtaaattgtttaattaatttggaatagtcttatctttaataggtttaattggaattaaatcttgtacaattcgtaactaattcatatgaaatcagaatgaggccgttcaagtctctaaagtcatttaaaattatgatctacatgtttgtttactttaaatgtactatttatttggtttttattagtctttttcctcgttttgcgtgttagcttgtcgttttcgtcgttttgaaggatcgtgagtgcgtcggaagtgttcaagaagacttattgaagaccaattattgcaaggtaagtcacacagatcccaaacacaattcctttgagcatgttgatcctatatttaaattctctatttatttcaattgtgcatttatttttgaatgtcatcaggtggtgtgaacttattcctttgtgtaacatccttaaattttaaactaaaatttgactgcatcatgctggcttttgattaaagttgtttggttcaaaaatctatttgttttttatttaaaaattggttcaagtattagagccctaccaatttactctaattattccctttattccaaaccttagtgaatttgagcaaattctctcaaaattcaaaccatagattattttcttaacttaccttaatattagtggagatttgctatacttcaaaccttagtgaaagcttttcaaaaccatagtttaaattcaaatctttctagggaaaatatccaaaattcctgaattttactgttcattgcacccaaggtgctcgacagaatgcctagcccaactagagcagcccaactctatccaatcttgcacaaagtttagatttgatcctaggggaccacaccccactcaaaaaccgtggtttagttggccttctcctccccttcacgcgtgctctctggcagccgactttgctgcgcgccgtgtcgccgcgcgtcggcctcggagccgcttacgtgtgcccgaccgccttggcgcgccgtcgcccgttggacgatctcagcccaccgccgccgcaccaatcttgatgacgacaaagccgggacgacgactaccgcaaggaatcgctgctcgacgccgtgcgctcccgtccaagccaccaccgagtgcgatttcgcttctaccctgggtgaatcgcgccaattctcgccgcacagttggattggacatagatggtggtatcccctctcacaattcaaaccattcacccccgagccagccgttttcaccctcgtcgcacccggattggcgccaacaagtcgccagccgattccaaccgcggtcaagtcaatacttggccggtaagtattcaaacgtggcctcccgccactcaatttgattttatccgccctctctcagcccctgccacctttgcctcatccaaatcccgagctcatccatggcgatgacggtgccggagctcatccgctcctcctagccctataaataggaccccaattccttccctgtccatcatcgatcatcaacaaccatagccccacaacccagaagctctgcttcaccaatccatctcatcaaccaccatcatccgtcggtcgaacaccttgtgcgcgatcgactccacccctctccatccatcctccgccctaaatatcctttagaacacctatattctaccatgttctagcatagtaagccctaaccgaagctctgcgtcgagttttacctcgtcgcaccaagccgagcacagccgcccccgcgctgctctgttcttcgccgccgcgaagtttttccggccgcaatccgtcgtttcaaccgatctcggtgagttcttccgtttcaaccatctacatactacctagattccattttagcaatccctttgcactatcatgccaccctctgagctgccgacgtgagcacggccgccgcctatggaggcgctcgtcggcaactatgctccgcgccttgccaaaggttggctagctgccggaatccctctagacacctcgtagatgctctagaacccctcccgtagccatgtctaactcttatcaccttgatcgccatctcagtctaaccgtgtcaccgccgccctagccattaggccgtccacacatcaaattaattccaccgccgccgctccccgtcgccggagatccctagctccctcacctcctcggtcgcaaccactttctccctctagcgccactgcaatcccaaaccctagcgtggctagcccgcttttggggatcggctggaggtagaagaagagaagagagagagagactgacaggtgggacctgtacatagtgccatttcacatttatttgattttcaaactttagaagcccatatcttttaaaatatagatccaatttcaatgaaacttggaccaatattcttctaaaatcatcctctatctattgggcccctttttgctatttttgttttttattttattttctatattttttcttatttttggattttatttaaactccttttgaatttgaattttatatgtctaaccctaggtcttgaggattcctctgacaccctagataatatcaatcaatctcaagacatcgagcaaggcaagttaccatatacctgttgatcatttaagcctatattttacaaattatttatttatagccttctattcaatattctatttttctatgcataaatcattcatagaaacccagataatttagtattgcttatttttgcttacaatatggttaaaatacctcatacttagattgggacaatatgtaagatttggttgatttccgggtggctagtattgtctcaatcgatataagttttaccaggtacttatgtcgaacgaacgggtacgaccgcagtttctagaatggggacagacctagttattaggttaattggcaatatggcacctctgtatagtggttcttatttttaagtcctcgcgcaggaggcaactatagccgcgaagggcaactttaaccattaccatgtacaggtaaaatggtttgtgatactcgagtataaactatatggtatatttctaaaccctgatcgagatgacgtggtgtcaaacgatcagttccccttaaatacctcgggaacgccagaactcctcttgctgctattaacattacgttcagagcatatgaggatataagttcatggaacaggtgccataatttgtaatgacttaatactgggccatgactaaagccaatgattatcagcaagtcgtggactgcgggtaaagcgtacatctgctgcagtagaatatctttgaaactattcgaatagctgtactcatggagttgagtaccgggaatcatatggtaccctggttagaaatctaaagtttatatgttttataaattcctgctataacttttttagattgtctaatactgctttttgcaaagaaccctattatatgtcaatgcataacatattcccgtgataacttgctaagtattgtaaatactcacccttgctcttataaaccctttttcagatctgggtcaagaggaggacccttatgactattactacgaagaccccaataacatagaaaatccctgaaggttatacctcactagtcagaatgtatagaaacttccgctgtgtattaattagataggtgagtacctattattgtaaaattcttagtattgtaagactttaacatatgcaatgaagaaccagttatattgtatgtatcaatatttactgatccagggattgatacattaatcttagttggatccaagttgttagttttgagacccgacactttgttatggccaatttgcattgattactctattccttgataccttgggttattataatttgactagttgagctttatatattggttcagctagatatattagatctaattgcttagccatgcttagaaacattagcacatgattgggataactaatgtttcactatcacttaatgatggatatttaattgtagctcacggtggttaatagtgattggttaattaattaatttgccaactaaaacttgataatggtgggttgtgagcacatggttttgatggtcatgctcatgacaattaaggaccggttcacgagtttcggttgtgaaacattaaccgtgccaaccacatgcccgcatgggcaacggttttaccttttgtatagcatggttcattgcggggcaccagactgagaagtggcggagataagcccacgggggtcgctggggagtccatgccttgtttataagggggtgattatgatcaaggaatggtgcgttgtggtggattgtgttatgcgaggggtactgtcacagctcctttccgaggtaccgtggtggtattgcggcgcatggtgacatattgtggggctgtgtcttgtgggtacagtggtacacctctggccagagtaaactattcgaatagccgtgcccgcggttatgggcgggtctaacaatgtctttcgtgattagtctcacacttctcaccataataaatgatgctataactggtaataatttgattagctcctggtttggaatggtacattcttggtttggagatagatctgtacagccgggtatggttgtttaggatggttgggcctatgcagcatgggtatgctgttcagtgttgattaatattgatgattaattactctattgttttacaaattctcaactctttgctaaatgctgcttttgcaaatgagtcctatattatgccattctttggtatccttgtgcacttgcatacttgctgtgtggcttgcggagtatgtcatatgctcaccttacaataatcaatcaaacctcagttgaagaaaagtcgcaaaggagaagacgtttggcttataccccagttgagctgcctgtgggagtggagccggagcttcgctagattttatttttcgctgcagttttcttcatggtgaggactaagtgcctcttaagtaagtatttatcgttttagttaatttgatgaatctgtatattaaattgtgagtttgtgtacctcggctgattcctggacgatgatttaatgcacaaattagtttggaaattacttgtgaatttccgggcgtgatagttaagttgaacttccacctagaaaaggagctgcacctaaccacaactgaacaatggactatgccttgaattgtcagtcttgtgcagttaggtttcactcaattccataactgatactaggcaaccgttagtattccctcggtttggagcttataagtcatactctaggcctttcatgagtatctagagattacccatatctcatagactgtgactagtagtcgaactcatataggtgtattccttctaagatgttctgcaggttaacatctctgcttaatgaaagccactcagaacacattgaggcataagccatcctaccatacaaaatagaagagaagtacatcatgaaaatgagcccatttaagggtctcttctctcggttacacagtagtttgtttcaccatccaaattcacgggatctccgatcacaatggacaggtttccactattgtgcatctctaagtgggtctcaagcccatttccctcgatgcactgtctatcacattacgtggtagccccttggtaaactgatctgccagatttttagctgtctggacatagtccagtgttatcactccggagtttttctgctttctaacagatttcagtcttctctttacatgcctagatgacttcatgttgtccttcgaactgttcactttaataatcacaatttgattatcacagttcatcaggatagctggcactggtttttcaaccaccggcaaatccatcaggagttcacaaagccacttggcctcaactgtcgtagtatctagtgctgtgagttctgcttccattgttgacctcgttaagatagtctgcttgcaagacttccaggaaacagcgccaactccaagtgtgaacacatatccacttgtggcttttatctcatcagcatcagatatccagtttgagccactatacccttccagtacttttgggtacccagtatagtgaattccatagctcatagtgccctttagatagcgcattactctttccagagcttgccagtgatcatctctcggatttgaaacaaaccggctcagcttgcttacatcacatgagatgtcaggcctcgttgcactagccaagtacatcaatgaaccaatgatttgggagtatctcaattgatgccttgctattcttcggtttttccttaatagcacattggggtcataaggagtagtagctggcttacagtcactatagccaaagcgactcaaaaccttgtccacatagtgggattgcacaagtgtaacatcagccactcccaaatccttcatttcaaagcttttggacagaaagtccttgacctcctcaatcacatttaggctggtcccaaagatcaatatgtcatcgacatatagacagaagatcactccctctcccccaccataacgatagtacacacatttgtcagctttgttcacaataaagccagcagatgtaactgttgtgttaaacttctcatgccatttcttaggtgcttgcttaaggccatacaaggatttcaatagtttacacaccatttcctcctgaccttctagtacatacccgtttggttgatccatatagatctcctcctccagctctccatttaggaaagctgtcttaacgtccatctgatggacgagaagaccatgagaggctgccagagcaagtaatactcgaatcgtggtcaagcgggcaactggtgagtaggtgtcgaaaaaatcctcgccttctttttgggtataacccttggccacaagccttgccttgtacttttcaattgtaccattaggattaagttttttcctgaaaacccatttgcatcctaaaggcttgcacccatatggacgctcaacgacttcccaagtaccagtagacataattgagtccatctcactgcgtaccgcttccttccagtagtcagtgtcaggagatgaatatgcctcttctatggtttttggagtgtcatccacgaggtatacaatgtagtcatctccaaaggattttgcaaccctttgtctcttactctttcgagtatctataatgttatccttctcaggattttcctaaggcgtttgatcattgtgttctatcggtgcaaagtgctcatggggtaaaacaaattcttgactagaagtgctaggtgtatttttcatgggaaattcactctcaaagaatgtgacatctttggactcagtaattgtaccaactcgcatgtcgggtactccagagtttactattaagaatctataactcatgctgtggatagcataaccaaggaacacacaatcaacagtctttggtccaagtttacgctttttggctataggtacatttaccttggccaaacagccccatgtgcgtaggtatgagagatttaatttcttcctttcctattcctcgaattttgatacttccttatgcttcattggaattttattcaggacatgacaagcagtcaaaattgcctcaccccaccattccttggaaactcccgcagtgtctaacatggcattcaccatctcagttagagtgcggttttttctttcagctaccccatttgattggggtgaatagggaggcgtcatctcatgaataattccaaactcttcgcaaaaagatgtaaactcattggaaaaatactctccaccccatcagacctcaaccgcttgattttcctttcaagttggttttctacctcagctttataggtcttaaaataatgcaatgctttatcatttgttttcaatagatacacatagcaaaatctagtgcaatcatctatcagtgtcatgaaatatttctttccccctttagtcaacacgccgttcatttcgcacagatcggaatgagcaagttctagaggtgccaaattcctcgcctcagatgccttgtgaggcttgcgaggttgtttcgattgaacacaagtatgacacttggaacctttgaccaaagtgaattttggaattaaactcatgttagccaagcgcgtcatacaaccgaaattcacatgacaaagttgcgaatgccacacattggactcatcattctcgctaatatggttcacaacattattattattacacatgtcatccaaagaaaagcggaacaagcctccgctgtcataacctttcccaataaaagttccatatttagatacgacacatttattggattcaaacacaagtctaaaaccatctctacacagtagagagccgttattgaagggacatgctgcacattcttcagctgcacggtctttcccaaagtaaactttagatcaaccgtaccaacactatgaacagccgcaagcgacccgtttcccatcaacatggaggaacctctcccgacctcataagaagaaaacagggaaatatcagcacacacatgaatattagcaccagtataaacccaccaatcaggtgaatgaaaaacagagagaactgtaggtaaaaatttaccgtaccacgatattcgtccgccctcgctaatgaccatgttggcagacttctggtccttgcgctcaggacaatccttggctcaatgcccaggcttaccacacacaaagcaatctccctttgcctttcccttgcctttcttcttaaaattggttgtagccttgggtttgacatcagacttgactttcttgttgttgtgagaagcgtgagggttcttcttctgcaccaaattggcagtagaacctccctcgatatttttgccccagttgtcctttgccctcgccttctcctcaacacccaaagagctaacgagatcggtaacactgaactcttgtctcttgtgttttagagaagtggcaaagtccgaccaagaaggtggcaatttggcaataatgccacccgccacaaacttgtctggcaactcacagttgttgttctcaagttcctttgccagcatctgaatctcatgagcctattccactacagaacggtcatcgaccatcttgtagtcatagaactgctccatgacatacagctcgctgccggtgtcggaaacttcgaacttggcctcaagcgcatcccacatgtccttccttgaaggcatgtgcatgtacacgtccactatattgtcagcgagtacactgatcaatgctctacggaacagacaatccgaagcctcgaacttagcctcctcctcaggagagagaggtggttcacttcgtttgccccgtgaaacatagaagcattgcatcgctgtcaaacacagtagtgcatgtgctttccatctcttataattagaaccatcaaaagcatgtggtttcagtgttgtagcaaagccaactaccgaaaatgaccaattaggtttttggtttattggaaatttggtcataattcggcatattttaatccaaaataacaagataattaccatgatatttacaatgggatttgatccagtgatagtggtgaatgtaatcaacatgagcatgcttaacgtagaagaagcatcaacaatcacataataacgcaatgttgacactgcgatgaacattagtagtaaaacttctaattgaaataatgtaagaaggttataccccaagaatggtcctccgctggagtttgaggaagtattgcctctattgttgttgacaggaacctccttctacttgtctccagtgttgccgttgtctccagtgttcgacatattggtgaagacgaagtagacgttgacgaatagtgagtagtcgcgcattgcgctccccaaaaacctaatcgcccgcctgtccgtgcaaacgtcacagcagtgcgtggtttcggaggcctactctcccaacgcgtgagcacacactcgacgggatgggattatcatagcagcaacagccttggaaatggatgaaagtgtgtctcacttcttcttacggagatcaaatccattctcattttatatgaggaatggaagatgaagagtaagagtcatggaatagaaagaggaatagagtaactaattctcatcaattagccatgaaccatcctccactacacaaccatcaaccaaccatcaattaggagtaattgatgtaggttaccaatggaatagaaagagaaatagagcaactaattgtcatcaactagtgatgaaccatcctccactatacaactatcaaccatccatcaattaggagtaattgatataagttaccatttccctaatcaaatggattaattctcaaaactcctcgtctcattgatatcccacaagagaatgaatacacatgaattcttagcataatgagccttggaatttatttaatttaattgatttaaatggatcaattaaccaattaaatctaacaatccccaccaaattttaaggctcttgagaatgctccctattccatagcagcttttatataccactgtttcggtgaagactgttaatgtcacagcctgaatttcctgtctcaggatttataaattatttaataaattaatattagaatttatattaaatgttcattaatttacaagtgaagttaaatgtgggaagtaaaaattcctaaatataaagcatggttggatttaatttttattaaattctccatgattaattgtactctctggaattttctcggatttttaataattttaataatacaaagaacatttcagtaattattcacatattaaattaatcattaaatgagctggttacagttttgttaaatactttgagtgtccaagtatgttcaagaattttcttggaactatttgtgcattggaagtatttttaacaattgaaagatcatctcattggttaatatatttggaaaagtaataaaatcttcctcctcagcttgggcccttttcaacccatttccttctcttctctctcccttcctctcagcccgcatagaagtctgtttttcttccctctcgctacagtgttgtcttcaacatctggacagcgcccgagccgtcccgagctgcagccgtgccgatccccttccgaatccggcctccccgttgctcctttttccaaattagttgcgggaacggaatcctctcaatctcctctacaatttccccacgaaatccccaaaagtttctatggaaatcctttccaatttcgcggttcaatctatcctttttccgacgaagatcctaaactttccagagtttttcccgttgatgtgggctcgatcctgggctcccatggctatataaaggaccccctagtcgtcctctacctatcctctcaagtcccgtcttcctccatcgccggaatcgctctccctgcgagctccctctctctccacctccggccgccgctccagccgccgtggtcagtacctcgccgcccttcg

SEQ ID NO: 29135 - DNA, 742 bp, Oryza sativa
agcattgcatccctgtcaaaccccagtagggcatgggctttccatttcttatattagacccctcaaaagcatgtggtttcagtgttgtagcaaagccaactaccgaaaatgaccaattaggtttttggtttattgaaaatttggtcataattcggcatattttatccaaaataacaagataattaccatgatatttacaatgggatttgatccagtgatagtggtgaatgtaatcaacatgagcatgcttaacgctgagagatcccctcataatttccccaaagcgtaaccatgtgtgaataaattttgagctagtagggttgcagccacgagtaagtcttcccttgttattgtgtagccagaatgccgcaaaacttccatgcctaagcgaactgttgagagtacgtttcgatttctgactgtgttagcctggaagtgcttgtcccaaccttgtttctgagcatgaacgcccgcaagccaacatgttagttgaagcatcagggcgattagcagcatgatatcaaaacgctctgagctgctcgttcggctatggcgtaggcctagtccgtaggcaggacttttcaagtctcggaaggtttcttcaatctgcattcgcttcgaatagatattaacaagttgtttgggtgttcgaatttcaacaggtaagttagttgctagaatccatggctcctttgccgacgctgagtagattttagtgacgggtggtgacaatgagttgatg

SEQ ID NO: 29136 - DNA, 710 bp, Oryza sativa
cctgggagtataaggagaacgagataattgagggtgcaaggtatgctcataaggatgagatgaaggaggcggtgaagcattgggcagtttccttgcagagagagtttagggtggtcaagtcaacaaattatgtgtatgaagtgaggtgcatgaaggaagattgtccgtggcgtgtccatgcatataagggtaaatggaatgattattggaaagttagcattgtgaccgagcacaagtgctacttacaaggggtggagaagtatcaccgaaacatcacttcagcttttgtggcaagtgagatgtacagcagtgttgttggtaacattggctttgaaccaaaatcaattattaggcacatcgagaacaaattcaagtacaccataagctatgcaaaggcctggagagccaaacaaaagatcattgagatgaggtatggcacatttgaagcttcttatgataatttgcctcgtttgttagccaccattgcccagaggaataataatacttactatgacctacatacatttacatcggttgatgatcgaacaaagagtgtgctgcaaagagcctttttctcattgggtgcttgcatcaatgcttttgtgcattgtcgacctgttctatgcatagatggaacttttatgacaagtgaataccgaggtcagatattgacagcaattgggtgtgatgggaacaccaggttctaccta

SEQ ID NO: 29137 - DNA, 26335 bp, Oryza sativa
aataaaataattaaaacacagttggctcaattagctactttagtacctgcaaatgagtctgggtggattccggggcaacccgaaccctccgttgaaaatgttaaggcgatcacaatgaggggaggtaagtccactcatgatccgccaaatcctaaccctgcagggactagcagtatcacccaggaagcatcatctggtaacaaggctgatgaataagtttagctagagaagacagtgtcgcaagaatactgtgacacacgactgttgctattccctcaaagaagcaggaaactgtcactagacgagcagcttgctcattttgttgaggtgattcaaaagatccatatcaatgtgccattgttggatgccatgcaattgccaacatacgcacattatcttaaggatattctcaacaacaaaaggccgctgccaacaactgaggtggtcaaactgacggagcagtgcagcaacgctatactccacaagctcctagaaaagaagaaggatccggggtgtcccacgatcacttgctcgatcgggacatagaaattcgaccaagctctctacgaccttggagcaagcgtaagcgtcgtgcccaaagacgtcttcgacaagctcaacttcacgatgttggcaccaacaccaaagcgcctgtagttggccgactcgtcagttcgttatccggctaggatagtggaggatgtactggtcaagattcgagatttcttcatcccgatcgactttgtggtgcttgacatggacactgaaaaggaaacactgctcatcttggggcgtccattccttagcaccgcaaacgccaacattgatgtgggaacgggaagcattcgtttccgtataaacgggaaggaagaaaaatttgagtttcaactaaggaccgaacaatgctccatggtccaaatcaaatatgggccaaacccgcaaaacattcaagtggtcgaagtggagctacccaagacgaacagcttggtgaagttcatgcagaacttcctggagaaggaaaaagttaatcccaggaaccgttattggaagatgccggtaaaatccaatatactggccaagaagctagagatgccggctcaaaggaagccgtcgctcgcaccaaaaccgattaaggtgtggcaagtaaagcaaaagacgcccgctccatcacctccggagacgggtggaaaatccgcaaactaaactgaagggaggtgtcacgcccagaaatttaacccaaatttccagactattttgcgtattaaatccctgtccaggaccagccagggtacacaaaacgacaagtaatatacagttccaaacataaataaagcgtaaaatacttacagaagaggcacttagtcctcacaccgaaacgaaagcagcagtagcggaaaaaggcgatcctagcggggcttcaactcctctccacaggcaaaactcaactggggtctgagccttggtcctctaacttcatcttcagctcagaagcactacacttctgaaaagggggaataatagcaaggctgagtacaaccaccgtactcagcaagccacaccaacgatgcagacgtgcaaggggaacacaaggacggtttgtggctatttgcataaaggtggttgtaaaacattttattgagcaaaacagtaaaactgttgagtaattaaagtaacattaaatctccactgatcaaagcaacaccacgttgaacaggcccaaccaacccacctgaactacagtgcattgagtcgatttattaaggtgggactaatcacggtgaatttggtcgaccgcccataaccacgggcacggctattcgaatagttttactctgatcagaggtctacaactgtacccacaagacacagccccacgacacgtttccatgcgccgacatgccaccacgacataccggaaagaggccgtgacaggaccctttgcataaccccctctaaccaagcacaccacacctcaggtttcacccccactcctcgcaaggcagcgggcagtcccctctcgtgtctaggtgaatccggaagccacataggccgtcgcagggcctatcaaaactccatcacgcccacccttgcctggatgcgttagctagaggaaagctacaatacaagcccaatgttgacaaaagacagataacaagtaaacatggcacaagcaagcaaataggtaatacccggatcccatgtaattagcaaaacatgcatatttatttgcaaatggtaagacatttgtaaattggaatcaacatgctcaagggggaatgtgtgacttgccttgcttcttcaaaacaatcttctgaactcttttcctcgcgaccgcggacttctgaaacgacggaatctactcgctggcacgcaaaatgaggaaaaactctaataaacaccaagcaaacagtacataaaaagtaaacaaacatgtagagctcaattttagatggattttgcaagttgaatggcccaatttggagtccgaatgaattagatatgaaatttagaagttttgagccattttaatggatttctagaattaattccaatttatgacgcatttattatttattttccaaaggaaaaggcaaagccgctgacgtcatcaaggggaaggggcggcgccggcaagcgggctccaccggtcagcgacacaagggcgccggtccaccgtggaccgggatcaccgaggcggtccaccgacggtccacgggaaccgacggctcggatcggcccaaagccgatcgggcggcgacgagacggcgtagccgggacacgggcatggcacaaagccgacccggttgagcgacggcgcacggcggcacgcggccagacgaccgccggcgacggcggcgcgtcgcggcagcgggcacacggagcggcggaggaggggaaaaaggaggaggcggagggagagctcaccgagggttgcggcggcgagacgaccacagggaggtgaccggcgatggaaaggatggcagcggccggcacgggaggcgatgggaacggtgttccgacgacgcccgaccacaacggaggctcggccgagggccggcaagacttggggaagatattggagcggttagggagggaagagccggcacggagcgaccaaaaacgacggccgacgcggcgatacggagtggagcttaccttgactttggaaaagcggctcacgtggggttctggacagagtggagcggcagccagggtgctgtggagcgtggcgacgctgcgcggtgacggctagagcgggagaggcagcggctggaggcggtatagttcaggcggctcgggtggacagtggaggtggaatttcggtggtagattggggaaaagagatgtagaacggggtggagctcaggccggcgatgccgacggtggcgacggcacggcacggcggtggttgaagcggcgagaagcggcggctggagccggcggcagcggcggagaaaggtggtgcgcgtggctgtggcgcttcgaaggtggagaggggaaatggagcggtggacggggtgcgcacggcggctgcggtgccggggagggcgacggcgcagtgcggggtgaacgggagcggtggcgcggtgcggctggagttcgccggggagcggcggcgcgtggactccagggaggatgtggtttcgtgcacggggaagctcggggaggaggaggaaacggaagaggagagcacgagggtgctttatataaggctcggggatggagatcgtggctgggagaggcgggaacagccggcgaagtgtggcgccgacgtggggtggtggaggagttaaccggcgccgattttcacggggagagtgggggaaaaggtggaggaggtggtagggaaccgattttactcggtttgggagcgagggtgccagcgggaaggcgccggattcgacgggacgtgggcggcaaccgtcggccatggcggcttcggcctgggaagccggaggtaggaggagggcctgacaggtggggtcgccgggcccacctgtcggggagggagagagggaggagaacctagggggttatttacactttgcgcgaggggaaggggaaacgggccgacgacccaagagaggagaggggaggccggccgaggaagagagagaggggcgcgggccgcgggagagaaagggggattgggccgggagcagcccaaaagggagagaggaggtttttaatttgtttttcattttatttaattggttaaatgaactttgtgctattcaaattgtttctcgagctccgaaaattcgcgggaaatttcagagagtattttagggcacaaagaatattacaaaatattctcggctaatgatttttaaaggaaattttaaattccctcaataatgcactttattaaattgctttaacttttatttaatttctagaaaatacattatttaatgatttttaatcccgaacgaaaatcggggcgttacaaatctacccctccttacaggaatctcgtcccgagattctgggatggctagaaagaaggctggttgcggggtggtctgactgatctgacaaatctgcacactgcactgttccttcctgttacaaactgactgatatcattggattggaccctggaattctgacaccccacaagaccgattaactaaccaaacctgtatgagtgatctggctagattcagttctacggtcctgttgcttcccaaaactgaattgattggttctacttgaactgacgcagactaggactacggatactcacaaaacttacttatcttgggctgaactgtcaatactagcaatttgataacctgacaactcaccaagctggctggaagagggtgaaacttgcatctggcatttgtaactcattgaccctatgtccgcttgaactggtcctgactcgaacggcaagtaattccaggaaaacctgcctgacctgtctttcgtctgaactgcaactctccttgatgtttcttctctaagctgaactattgacctggcctcacgagtgtaccttagaattgaacctatcgagttgagattggggtaactctgctagcaccttgcaacttgctccttcaagtacttcccaaattgttgcactaggttgaaccttcaagggaaacggcgacgaggcgagccaaaactcatctctgcgacctaccccccttacagagagtagtcatacttttgcctaactgggaacctttgaactgttgtccgtaaaaaaaaacaccaacacttctcgaatttacagagagccctgactttgaaaactgaaaacttcgtcgatctatcaaaatggagcaatgacgaggcactttcatcccggcaagacttggaacttaacccttagctgatgataggaaattccacataaaagtgactctcacttagctcatgaacataatgacccttgactaactttccaatcagttctaactgctggtaagactatcctgcttctagcgtggttctagtaacacatgcctgaatggatggtgtagttgacattctttgaaacataccctgatcacttaacagatcaaacttgaaaggtccttctcatggtatgacatcatacttaggttatcctttgctgactcttcctggattgatgaactgttggccctgcagctatgttcccagaaatactgcaatctgaacgactgccggaaactgactttgatgttgccgatagtttctgctctttgatcataaccacttcgctttcatatcttcggtaaagatgatccgttgaaaagggattctcggccatataccctactgactacacatttctggacttgactctgtatacttctaacccatgtatggaacaatttctttttcaacttctgagaaacattgaaatgattcctggaacttatactggttgccttgaactaaggaaatacatactgaattcatgctcgcaccactagggtgtaactgtcgcttaccattccctaacggtttccaaggctagagagttcccaagattctttatataatgtcactttcaaatattccatccctcttttcatttgagtaccactgatactgcctttaaagagatctcatcacgtcaagtgttgagtgtctaaccattttcactccgtttgttaaccattcctctattggctagcaaacaggttttggagctcaacaaaattgcgatgagttagaagagaaactcttagtttcttgtggcactgacagatacacatattaaattgcttctgcatgctcaagatgaaccataaaaggagaggaactggctgactcatattttattcaacatttctttttcattacatggctgccataaacatatatataccaggagaagtactacaaaattaaacattggtagactgatgctgattagaactgcccttttcacgactgaacttgaaaagtagaagtcttgtctagaactgctattgcttccattattcaaacctgactgacttgtttctttagttcctactaacagaagttgcatcggaaacattgctctgggcattgatcttcgaagagggaatggcaatcctcttgacagctgtagcaggtggggtcttcttgctcatgagattaccaagtggtgatttgccgatgggcctccggattggagcaatacgaggtgcattgctaggattgtcagttgccggatgacttggtgctgccgatacttgctgcgggtactgacaaaggagcgttctgcctttttgtagctgtagcaagctgttgttctcctggcattgctcaccctgctggcgttggtgttgtaggcttgaaacgattgccggtgaacaatgcggcctttgacggtgcccttgacaactatccgttgaggcggaggttgcaccttcagctgtcgtttggtgttgaggatagtgctggtgacttgtgagcaatgacgaactgcctttgttgctcttggaaaaggacaatcactgaaacaatgtcctggcttacgacaattgagacaaaaccgacttgcttggtcctgaggtgcaggcttctagttatgcacattgacagctgaaactggaacaagtagtgacttatgaacatccttggtgacgttgcttcttccatggttggtttccactggagctggagttggaggaagagcagaagggttgtgactgttgttgtcgactgccattggttgacgaatgggttgcacggttgtcccttgttctttcttggtcttagctatgaccgcgttcaactgacagtccttaggcacatgatctgttccttcacacaagaaacatgtgaccttcctcaaagggcatgcatctgagtaatgggtgtattcaccacaacggcatgtggggaggcataaactagcagtgtgtccgactatcccacatctagtacatgctttgaactccaatcctctttccatgaaactgttaagggtcgcatcatcatcgtcatcatcatcatcatcatcatcatcgtcgtcgtcagcagagaaccgctctcctgattcatcatcttcgggtctgggcggaccgtactttatgagatgccgggttagctgacgcgctcctcggaaggtatttcttcctctctgacgcttgggtatccttgctacatcttcaggagtaaattctgaactggtgatgaacatggtcctgccattatccatcttccattttactgtcctgttcgctccagagttgggctgcaaagtaccatccttctagtcggtagactgacttggagcttggttacttcctgggcactacttcttgtatttttcaggtgacctggcgaacatcttccatggacagttccttacataatgaccttgctcaccacagtcataacaggtagcacttattttcctttggtccgacggtgagttggctgaagttatcttcggggatctggacaacattttgacaggggtcttaggtgccgatattgggaactcctgactctgactctgattcaggttccgggttggcacctggacttgcatttgtggctggtggccttgacgcggctcctgacattgccgttgcatctgctgcatctggtatatctggtaccgacgtcgcatctgtcgcaacaattcttccactgtctgagtctgattagccatgactttggattgaggctgatcttcgaaaggttgacatgggaagctcatagagttgtgctgagttgatccatgaaactgttgagatcctgatccgatgaaattgtccctcatgctgaccaattgctgcgggcacaagagagagagggggagatgagaggggttactagagatgaggtactagaccacttgcctactgatctgttgtgagtagacttttattgttcaagttgcttaagcaaacaacctagtatggtcgcatccccaccaatgatgcaaaccatgcccctacacacaagcaaacaacacacgatctagaagctaatgaaactactcttccgggaaggattgggtttagggtaaattccgggaaaacttcacttgaccttcgcggaacgacgactctgaactgatcttctcgctcctttctgcacgaagcttgaggcttgacttccgaacaggcatgaagctgacggcttgtcctccaggttttacaactaacagaattggagggacagggaggagaattttgtaaaaaccgtttcacaaagaaatgctgaagggcaggaggagacattttgcaaatagggttttcggaaaacttgtccttagggtttgaccatttggctcacaccctgaagttcttctcccaagcctaaattgaatttataaatggtctccagaaaataccggtgcaaaagcaagagagaaaccctaaaggaattaatgcaaataataatcggaactggcatgtgggatttttcctgagttctacatgtcaaaatacgctaacaagatttttagtggaattttcagagctctagaaataattttaaccaattaaaaatgagcacaagcaatatttatttccctggaaattcttttccttctttttctttctttttccctcgttttcttttcggaatgggccgccggcccattctctcctctctccccttcccgctgggccggcctaaggctgaggcccagctgagccggccgcctccctcctctatcccgaggtcgccgacaggtggagcccacctgtcgggtcctcccctaacctccagccgacgccgccgcgccctgcaaccgccgccgcgcccttgctcccgcgtcttccgggccacgtcggccgcgcctgcgcgtgcgcccgcgtctcccgcgcccactccctctctctcctgcccgcactcgcgctcgagacggtcgggatttgattttcgaatcccgcctctctctcctctcccactccctccacgttggccagcgattcccgcttctcccggccacgtccggaccgctcctcccctatttaagcaccaccgccatcccctttctctttttccccatttcgctgagtcctcccatgctctctatcaccctagcgccgtcgccctcctctccgccgccgccgccgctgctctggtcgccactagccgccgcgccgagccgtgccatcgacgccgtcgcatttgccgttgtgcgggccatcctgtccacccctccatcggaatccgccgccggaatccactcctcgccgtgcgccggtgtgcaccgccatggccgccgtcttcggtcggcgctctcgctctctcgcgttttcctctctccctctaacccctctcttcttgctcgctaggtggttccacagaccgtccgccgttcactgtcatctcccggtcgtttctcatcgccattcgccgtcgccccgtgctgggcgaaccacggtgagcatctccccgtcgtctttcccctctccctcttagcgccgctgccttgccgttcggagttgcgccgccgtcgctcgccgtgcgccgccgctcgtcgtcggtagccgccgctccccgccgtcggccgctcgccgccttgcgtcgccgtcgcgtcgcgccgtgccgccgcgcgccacggccgccgggtcggcttgaaccgcccgtgcgcgccggctgcgtgccgcctcctccgccgtccgatccactcgggtggatcggggctgtccgttcgtccgcccgcgtggctgccgcgtggccgccgagtcggcaccacgtggtgcgccgcccctttcccggtccgtggacccgatccaccatggaccagcacccgcagccactgccatgtggggcccgcatgtcggcgccgcccctctctctcccagggtttatttattgcgcaataaatcagttaaggatttttttgtttatagtaaaaacactgtgaatcttctaaaattcatatctaattcatccgagctccgtttaagcccattcaagtcttagtaaatcaagaaaaatgcgtagaatccattaaaaatggttttgttctctgtttcagtagtcatatagtctgtttgtattgtttactttgtatgtcgcttagattccggctctcccgacgctccggtatactttgagatagtcgccgaggtttccccagcagcagagcaaggcaagtcatgcttgtcacttgaacatgttgatcctatattgcaaatgttctattgttttccttcaaatattgctttgttttacaatgataccatgggatgtttacctactgttatagccatgctatttttaccatgctcctttgttagcttgggatataacatgactagatattgggctagggattgcttagccatgcttagttcaactagcacacaatgggggcaatcacattaatgtttggacttcaggttctagtgttgatgttggtttggtgccaccgctccggtgttggtaaattaaaattaactaaatggtgggctgtgggtgcatggttttgttggtcgcgcccatgacacttaaggaccggttcgcgggaaaccctggaagaatacctcgtacttaccacaagccagcgtgggcaactggttggcttgtagtgtagctttcctctagctgacgcatccaggcaagggtgagcgtgatggagtttggatgggccctgcgacggcctatgtggcttttggattcacctaggcacgagaggggactgcccgctgccttgcaaggagtgggggtaaaacctgaggtgtagtgtgcttggttagagggggttatgcaaagggtcctgtcacggtctctatccggtatgtcgtggtggcatgtcggcgcatggaaacgtgtcgtggggctgtgtcttgtgggtacagttgtacacctctgatcagagtaaaactattcgaatagtcgtgctcgcggttatgggcggtcaaccagattcaccgtgattagattcaccctagcctagtctaatggaattgaatagtctaggtggatggttgggcctgttgcaacgtggtgtagcgttggacagtggatggttaatattgattaattattacaactgttttacagctttcaactactgttataaacgctcgctttatgcaaatgaaccaccctagctatcctttgattataccctgcatcataccccctattccggtatgacttgctgagtacagtgggtagtactcagtcttgatttattttccccaaaaccccagagtttgagtgcgtgtcagatggtggtttttccgaggagtaggcttcgtccatgccgtcgaagatgcctgtggagtggtgttcccactgcagtccaagtcaaggcttagctccagttatctattttaattttccgctgcatttatgtaagacttttataatgtttgtaagacgtggatctgtatgtcaactttgtcgtttgtgtaccccggctggtcctggacggggattttaatgcacattctgcttggaattctattcgggaatttctgggcgtgacaagtatggtcttgcacatcggacccaaaatgacgcgacctttgccaacaggtaaattggtatgtatccgcatatttatttccatcaatttgaatttttgcatcaatgcatatttgaatttcaaaatttgcatctagaattgaattttgaggaaagtacttcaaatgaattttccagagcaagccaaaataaaattttcaacgaaaattcgctgtgccacgaccacactgaccgttggaatcctacggccgaatgtggggccgattgaaccggccaggcaatggtcacatgccatttttggcagggtaacggctaatggggcccacaagtcggttttgattgttgtggctactctatataagccaatcggccgggagagagaactccaccccatttcaactcattttcattccttgtacaagctttgctctcaaaattcattcaagctttgctagtttgcctcaaattcaagcatttagttgcatacacaaaagttgcttggtggagctaaccggcgggtgaaactcttgttaatctaacgcctgccgggttagtccattcttgttcctttgtgcaaaatgaggaggcgactatttgtctgttcaagaagggacccggctctccatcaagtcgtcatgacgagtctagcgcttgtttatccgccgacgtctcgatggaggatgctgatgttccgcaacgtctcttgagcgacgccaacctcgaacttgtcagtgattttgaaagacaagcctacttaatgccgaaagaccgggattatgctcacacgcaggtatataattcggagctactgaaaaaaataggtatggatactgactttcgtgctatttggaaagctgttggatggcagagatttgctgtggtagatgagcctgctcctcatttgcttactttgcaatttttgtgcactttgaaagaaatagaatatggaatttcctttcactatttccataatgaatatacactttcatggaaaggattaaatatacttcttggttttcacgattcctgtaaaatcgatcttcggaaaagaatttctgcgttgtagaaaaacagattttgggaagacatttctggtgctccaatttgcaagaaacctaggatgaatgatatccataatcctacacttaggcttatgcacaaatggattgctatgactttgttttctagaggtgatcttagacctactagagaggatggattgattatcatgtttgccatggttaggaagattaaaattgctcctgtgaaatgtatgataaggcaatggttagagagtataagatttactgctcctgttgagtacacttccttgattactcgcatagcaaagggactaggggttattaccaatgaccaaattgcttatatttcaaccgcttgtccctgtgttgatgagagttatctagtgcaagggcatattcttaaacatggagtagatggatctttgatataccatttccccggttctacaaatgaaatcccgttgcctaacgcgggataacatttgtaccgctttcatgaactaatctttcccctgcagaccatagaagaatctcgtgtaggtggaacatacagggagacacgcaactgttagtgatatgccctagaggcaatcatagagatgattgtatcacatactatgtttacatatttatccgacactgttccttgaaatagataactccttattggttaatgaatatgtgattctttcatgagactctttatgttgtttgttactatttctaaaggatccctgatcaaatatcatatatggaacaaatatgtttatatgatcagcacatgtattaattgatgatcatgtctcatggatcatggtatagagataccaaattaataatgtggatacatgttggtgaacatgttgttggatagatccaacatgagacactgtaagagccatatgtgttgtgtcatcagtgatctcattgagtgttggtgttgaatccttagacctgagattatgatggttctcaacatgtgtagtagcttacttagggactgctaaacgctactccgtaattgggtagttataaaagtagtttttgggtatgctatgaaacacgtagtgggatatgaataatcaagatgggatttgcccctcctatggagagatatctctgggcccctcgatgttgtagattatggaagtgcatggccatgccaaaggtgattgaggagtcaatcacaagttatataatctatcaacaggttcgagtgaatgattgagctattagaggatggcacatatctagccttgagcttaatcgatatcgtgaggcaaaggggttcatgcaagtatacactagaggttcagccgatatgatctttatgtatgcccggtgggtcaatacgttctgctaggggccgctgttgacgcgtggatcgaaaagaagttttcgggttatagccgagtatatatgaacctacagggtcgcacggttaatgggccggaataaggggattagataaagatccaatatgagcttaattcgaatagggatccgaataggagtcctaccggccttggaggcccgagtgatggatcctatatattcgtgaggggtgtgactggcggaggcattgcatcacgtgagaaacccaagccgttacttccctccccgagcaaaaccctagtcgcgcgcgggtgctagcacatctgtggtggcgttccgtccctgtacgtgtggataccggtagtggcgccgctagtttgcggtgctgattggcgtgggagtacggcgaggagaacgcacgaggaggagaaggtcgagccggtgcgatcgactacttcctctacatcgacgcgcgctacttcgcgagagttccttcgacttctcagcatcttcttccactgcacagcgcgttgagtggtaatgatctatgatctaatacttgcatggttcccggtttacgcgatagaaatttttgatttatgctatcgtagcctacgcgtatcccaacagcaacatggcaaggaatgaacgagaaggttcaacatcctcaacacccgtacagatgtatgaggctggttgggagccaactagggatgcgcccagatggacctaagctccatgccatagcattggagtctcgagccagtgagagccgatggcgggcgcctcatgacatacagtagggaggctggaacaatcagtcccctagatcaagtggtatgcctccatctcccggtgaatggcactaaagttcctctcattgggacttgagtgaaatcactaggagaatggatactcttgatatgcagatgggagagatcaaacacaaccttgaggaacacatagcacggacgcaagaatggcaacagagggctgatccgatgtccactggaactgcacgccaatgagaaaaacgagccaatgagattgactcggtttcggcataatttgattacgccgttaaggttttcacatggcgaattgtagatgagatctagcgggaccgccgtgtgcgttgccccttagatttcgcttggggttttttatatctatcttactttattgttgttgtatatttgatatgacatggtacgatagattcccatagaaaaattaagtgtaatttatgctcttccaataattgcacctattacggttgtgatcataagtgatgggtttgccatagcaaagtgtcactttttatcatgataaaataggatagatgtcagacatctatatgcggagacaaggttatcaaaacagttttggaccttggggcataggttgggttggacatggagatgtcaccccaacagcacaagagtcacatatgatgtgattagcaaggtgttgcttacctattttgatagttgtctagctgtgatgccaaagctcactagacactaataaaatgaggatcttgactcactatgttactagagggaattttgtttcacaatacatagtgggagtatcttttgttaaattgtttaatgaaaggttaaatgtaaacatggtgctgattttacatatatttctattgtagatcatggcagctcctgcaccatccaattttaacttgcggtctattcttgagaaagagaagttgactggaacaaactttatggattggtattgcaacctgagaattgttcttagacaagagcacaaagagtttgtgcttacacagccttttccagctgacttgcccaacaatgctccggctgctcaacgtagggagcatgaaaggcgatgcaatgaataccttgatataagctgtctcatgcttgctactatgtcccctgagcttcaaaggcaatatgaggcattggatgctcatacgataatcacgtgttaacaaccaaattaggtaatatcagcgttgggagagaagattagatcgaagaaaagtcagaagcggagatcgagtttgaaaacagagcaggaatcggctggaatccaaatcggctacgataagatcggctgggtctgagtcgggctaggtaagccgatgtagcagatcccgacaatatgacttgtacgcgacatcgggttcaagttaatgtacttcaagatgattgccacgcacggatagagtcctgggaaggaaattgtatctattaattaggatatcttatgtaaattccttatagataaatgtgggcaaaagtctgccgcaaagacttatggtatcttagagtttgttagagataatagtcgtgtctggtatgggcatatcttgtaattctcgggtataaatagaccccgagccctatgtaattaacaacacacacgttcaatacaatttcggcgcatcgctacccttttttttagttttgtttcgatgagttcttgctttcgggttgagctgcatcggttttgatcttcaacaagaggtaaaacgtgttatgacgacttgcgttcccaggattagtgcttccatctttatgatactctaatctcatttatgtaattcgtcaagttatcgtatatcttacataatctctagcaatatcgccacctaatctattatcggctaacatatgtatacaaaaagcatccgattaggttagatcttgatgttgatctagattatatgagatatctaccattctatgaaacttctagcggcttgattgtctagatatcgttcttcttttcatacttaatgctgtatcagttgagtttgacctattaagtcgtgcttagaatatcaatctctagcctgccttctagttgcagctgatcgtatctgctttaactatatttgttctatatgcttcattgacatgttaaatctgccctttatatcaagatattgctgtgtctgagtatattaggctcttgttcgataaattattcttgctttaatatcctgatatagagtagtatcggagtattagccgatacatgctagatctatctgatcggctacgctataaacatatatagtcctgttattgatatatatttcgatctaagtgatttatactatctcggcatgatgaccgatctatcccaatcacttgattttaagtatacatcgatataaagagtatatatcgttaatatctacagccgatcgagtagatttagttcttctttacttattcatgactgccgatcgatacacagatgacatcggctcaaagataaatgatatgtcatcggcatctagccaatcggctatcatttatagatttaaccacggtttctttgcttccatttcttgttgattacaggatcaaatcagctggcacgctaacacatccgaaggcgagctttggacctgcattggagttaagcagatctcccaggccacgtgttttctgtcaacacgcttttggcaggcccggtgggacctataagaagtcagacgacagttcttcctcatggccgaaaaacaaccacaaccaccatccaccccaggctctgttaagaaaaagatgttgaagttaggattgactgacgtcaatgaagaaaacgtcatgccaatcgaccccgagaaattcacgcccgagcagaagaaaaaatttgaagcaatgttgcagcaagcacgggatctgttcttaaactcatttatacagacccgcaaggagacacttgttcagaaatacaaaataaaggtgattgctgatgatcctaggaccagctctctttgggatggagatgggaaacaagctccaggcggctcggctcagccgagtactaaaggtgctaccgacggctccccaagcgatcaaggcgacaattctcaaggagttcatggcgtccaaggtgatggtgctcaggagccacaaggaggaaatcttaaccagaatagtgaactagcacaagattttttcaataacttccaagatcgggttgattacgctgtgcatcatgctttgatcaatcagtccggggtattagtcaatacattgtccaccatgatgaagacaatagccgatggttcgatagttgagcatcaggctgcaggcccaatttacttgcaaggaggtgtcttcccaaattatctatctttgatcaccgatgctcagccatctgttcaagcagttccctctgttgcacccacgactcagccgacggcgccagcgtcgactcctttgcctgctacactagctatgtcaccaggacaaccggtgaaccctcggttgttaacaagggaacaaccacaacatggcgggcaggctacgaatcagctaacctaagaccaagttactgccatgtttctgccacctccacctattgttgatccagtacagcagcagccgattcagcaggcacccccaatccagccgtttatacaaccaacccaacagcaggtagtacaacaggctcagcaaacaccaccaaggcagcagcccctgtagccgatccaacagactccgttgaggcagcagatcgttcagccgattcagcatccggggttagtaaatacatcggccgggttcgcagtacctggtggccgatgtctaagatgatggtcaatggtggggccgcggtaaaaatttgatgccttatgctacgttcaggaagttgggtaggagcgccgaggatctcatcaagacaaatatggtgctcaaagactttggtggtaatccatcggaaaccaaaggtgttctaaatgtggagctgacagtcggcagtaagtcctaccacgttttttgtcatcgatgggaagggttcgtacagcttgttgcttggaagggattggattcacgccaattgttgcattccttcgactatgcatcaatgcttgattcaatggcaaggcgacaagatagagatcgtgccagctgacaggtcagttaatgttgccagtgccgatttagccctttgggagatggatggccttgattgtttatctggaaaagtctgggatggagattttctaaaagtatctgattctgatatacagccaatcgaggatggagaaaccaagctgttactttgagggcgtcgtggagggttcaaatgtctacgccaaggatacggatgacaagcaaggtcaaggtttcatgtcggccgatgagttggaagaaatagacgtaggtccaggtgatcggcaaaggccgacatttattagcaagaatttgtctccagagtttagaaccaagctgatagagctcttaaaagagtttagagattgcttcgcttgggagtattatgagatgcctggactcagccgatcgattgttgaacattggctacctatcaagccaggggttagaccatgctagcaacctccgaggagatgtaaagccgatatgcttgaacctgttaaagctgagatcaaacggttgtatgatgccggttttattcgtccctgccaatatgctgaatgggtttctagcatagttccagttattaaaaagaatggcaaggtcagggtgtgcattgattttcgagatctgaataaagctataccaaaggacgaatatccaatgccagtgaccgatcagctggttgatgccgcgtcagggaacaaaattttgagttttatggatgggaacgcaggatataatcagatctttatggctgaggaagatatccataagacggcttttagatgccctggtgcaatcggcttatgtgaatgggtcgtcatgacttttggcttgaagagtgccggagcaacatatcaaagggccatgaattatatatatcatgatttaatcggctggctggttgaagtttatattgatgatgtggttgtcaaatctaaagaagtggaggatcacatatccgatttaaggaaagttttcgagagaaccaggaaatatggcttgaagatgaatccaacaaaatgtgcttttggtgtgtcggccggccagttttttggatttcttgttcatgaaagggggatcgaggtaacccaaaggagcgttaatgcgatcaagaagattcagcctccggaaaataagatagagctacaagagatgatcggcaagataaattttgttagaaggtttatttctaatttgtctggaaggttggaaccttttacacccttattgaggttgaaagccgatcagcaatttacttggggggcagagcagcaaaaggctttggataatattaaagagtatctcagctctcgtcctgttttgattcctccacagaaaggaataccgtttaggttatatttatcggctggtgagaagtcaatcggctcggttttgattcaagaaattaagatataaggtgttaaagtatacactgttggataatgagctttattatcggacgattgatggagtattgcttaagtgcttgaatgccgatcaggctaggttgcaatcggcgaagttcatgagggaatctgtggtactcatcaatcagctcataagatgaagtggttgcttcggcgtgcagggtacttttggccgacaatgctggaggattgtttaagatattataagggatgtcaagattgtcagaagtttggagcaattcagcaagtgccggcgtcggctatgaatcctattattaagctttggtcattcagaggttgtggaattgatatgatcggtatgataaacccaccatcgagtaaaggacataaatttatattggtggcaactgattacttcaccaagtgggtagaggcgattcctttaaagaaagttgattctgaggatgctattcaatttgttcaagagcatataatctaccgatttggtcttcctcaaactattactaccgatcagggttcaatcttcgtgtccgatgagtttgttcagtttgctgatagcgtgggtatcaaattgttgaattcttcaccttattatgcacaagctaatgggcaagccgaggcgtctaataaaagtttgataaaattgattaagctgaaaatttctgattatcctcggcaatggcatactcggttggccgaagcgttgtggtcttataggatggcttgttatggatcaattcatgttcctccttacaaacttgtttatgggcatgaggctgttttgccatgggaggttagaatcggctctcgacggacggagttacaaaatgatttaatagccgatgagtattacaaccttatggccgatgagagggaggatctggctcagtcgcgattacgagtctttgcaaaggttatgtgttcatggtgtaatcggttgtggtttgccgatgtacaatggccgatattgttatatcgcccttagttgttttataattttatcaatgctcttgacattgtaaaactaggggggcacatatatatcaaaatgcagtgcaaaatttcaaagtcaaaattttttgagcaaacttcaaagtcatattaatcggcacaaaggattgttaaggcagtaaagtatcagaatgtcttagccaattacaaaagtttctaagtcctattacacaagggttattgagataagtatcgctggatagccgatatagccttctgcctaatctgttctacttcctctatggcttgggaatcttgagcatcggttctagggataactttcagagacttggtcagatcagcaacatgcttgatagccgatttgagtcttgatttctgttcttcaatagactttgggagatcggctaactttttgtgctccatatccagctcggcattgcattcttcgagttgtgctaagaggtcaatcttgcgagccttgagccgatcgatgttagacttgattgggcctttagaaagttgatcaagcttggacttctcttcatgcacaagttgtcgattagcttggatagtagcttcaatgtccttgcgctctcgcagttcggccagtcttaacttggctttctctagtttgaattgatgttgctcaaggtaaacggctagggtaaggatatcggctaactcatctgggattagagcctgaatctcatgtagccaagctctgattgagccacaatcaactaccaagctatctagtgatgatgcttctagctgatccaagatacttcctagagttttcttcacatcatcagataaaggggctaaagctttgcttgtggtatcttcttctccttcatcaaggtagtctccaatgtcgaaagagaaaagatcggctaagacctgcagcaatgatttagaagcagttagaggttaaacaggcatagccgatctgaatgcttgttgagacaaagaaaaacttactgggatagcaggagcagctggtggttctttctgctcaacgtgatgactccccacagctgaaggagtctggtcacttgatgattgctgtacaggaggagaaggaggagggggaggctgaaaacaaacaagtgttagacaaaatcggttgaaaattaactaatgagagttaaaactatcttaccggtggggatggcttagatgttgttacagccgatttcttcttcaccgcggtcttctttttctgcaattataagacctgggagtgaccggctataagacaaaatagttatgaaaggaattaaagtaagttgcttactcttgaaaagtggactggagcagaaggagttggaggggtttgcttgggcgaagccgatggtgttttttcagtatcgcttacttcggctgcagcctgatcaatttcgtcttcgattatctcttcatccagcacttgttcaatggatgggtctagggtaggcaggtcatcggctggtttggttttctttgtcttcttcttcttacttggggctgcgatgtttacagccgacgacctggttttcctctttttaccggcatcggctggttctctgataagcccttgaagaagagctgaggtcttgggggcatcatagccaataaccggaggagttagcccatctccgttagggattaaacctggagcatattggatatccttaccactgttgctttgacggggaggagaggattctattgtctgcaaatcaaaaggaggattagttgagattaatcggccaaacagctatttaaatctagtggagttaaagacttacttgagggacaacatctgggaagaggtctgtcatatacattgaagctggttggtggaatagatgcagcttccattcaccccaccatctgtcaaagtttttgcttctgaacattgccagttctatgttgtcaatactgcccagagggggtccttgaaggttgagtagcctccatcatcaaggtcgatgaaatttctcctcagcattggatcttgtcggcaaagaataaaccgattgggagttggcccattccaagttgtctagctgagctcattggatgatagaattcataagaagcttggatgtttcttccttgatgaatgccaatgggaaggatgcatgggctgattgcagctgagaaaatttccctggatgattggtatacttcatggttgatgtcttcgaatctgaagtccaatgggtgttcaagttctgcagaatcttcataaagaaaccaaactcgagcatctttttgaaagccttcatagaagctgcagaaccaatctttgagcagttcagccgatagttttgccccagcattagttggcatagaagcgtattctccgtatgatgtgcatctccgatgagtacgctcttctccatcatctcctacaatcggctctagccttgggaattcagcttctgatacggatggccgattgacaaccttcataactatcaggtttaaccaggtttgtagcagccaccagagtccacttgctccaactactgagctgatggctatcttagccgatgcattgttcaacatttggtatagatagccgaggaggattttgcccaagggaaattgtctctttgtttctagagcttcagctagaaattgccagttggttgtggggccgcaacttgatccacagaaaagaaatttttctagccacattaacaaaaaggccacatgttcccgaggggtgaccgagccctgacccatatatgccgctacatagcctgaccaacctcctatgcttttggtcttgaagtcatattggttctttgtgttcaagctcatagggttggccgacgaggtgacatccagacccgtgatcatgatgatatctatgagagttggggtcatcggcccttgattgaacaaaaaggcattaatggtgtttgaccagaaataggaagcagctgccatcaggggttcatctttggccgagtttgctataataaggtcaagtgcttggccgattccaatttcatcccagtaaaccctcttgctggctgatacacgtttgaaccatgtagtccaactcttttctggtggaactttctctagagacggccaggacttgaaagtattcttccagtgacctagatctggattggttaatctaaaggggatcctgttggtttcaccaatgatgaactcggtggggtcaggattgccgactgggccgagaaagtagtggttttcatgcgataggctgggaatcgcaactaggttggagtggtgctacaaatccaaagcgatccagaggaagagagcaatttgagatgtgagaaattcgatctgctgctaaagaaggggagttagccgatgagaacttacctcggcatattcggctgatggcgcaccagatgggctggcggaagacgacattgctacgggcggaaatctcgtcgaaggggaagtcgcctggaaatcgcctttgcgccggaggagtcgccggaggagagagagaagaggtttcgcttgagctgtgaaaacggaggtcacggtgtgagattctcgagggtaacggttagtatttaaagcgctggaataacggtcaaaagcggcggggtgcgaaatctactcgaagtcggtacacggcaaatccggaatattatgaaatatcccggacttgggggggcatgtgttaacaaccaaatttggtaatatcagcgtgggagagaagattagatcgaagcaaagtcggaagcggagatcaagtttgaaaatagagcaggaatcggttggaatccagattgtccacgataagatcggctgggtctgagttgggctaggtaagccgatgtagccaatcccgacaatatgacttgtacgcgacattgggttcaagttaacgtacttcaagatgattgccacgcacggatagagtcctgggaaggcaattgtatctattaattaggatatcttatgtaaattctttatagataaatgtgggcaaaagtctgccacaaagacttatggtatcttagagtttgttagagatcatagtcgtgtctgatatgggcatatcttgtaattctcgggtatacatagaccccgagccctatgtaattaacaacacacacgttcaatacaatttcggcgcatcgccacccttttgttttagttttgtttcgacgagttcttgctttcgggttgagctgcatcggtttcgatcttcaacaagaggtaaaacttgttatgacgacttgcgttcccaggattagtgcttccatctttatgatactctaatctcgtttatgtaattcgtcaagttatcatatatcttacataatctctagcaatatcgcgacctaatctattatcggctaacatctgtatacagaaagcagccgattaggttagatcttgatgttgatctagattatatgagatatctaccattctatgaaacttctagcggcttgattgtctagatatcgttcttctttttatacttaatgctgtatcagttgagtttgacctatttagtagtgcttagaatatcaatctctagcctgccttctagttgccgattagaatagcatcggagttgcagccgatcgtatctgatttaactatatttgttctatatgcttcattgacatgttaaatcttccctttatatcaagatattgctgtgtctgagtatattagactcttgttcgataaattattcttgctttaatatcctgatatagagtagtatcggagtattagtcgatacatgctagatctatctgat

SEQ ID NO: 29138 - DNA, 3552 bp, Oryza sativa
ggcacgctaacacatccgaaggcgagctttgggcctgcactggagttaagcagatctctcaggccacgtgttttctgtcaacatcacgggactacgtaacatgtttgaggaccaagcaagagctgagaggtttaatacctcaaagtccttgtttgcgtgcaggcttgcagaaggtaatccagtgagcccacatgagatcaaaatgattggttacaccgagagtctggataagcttggctttccccttagccgagagttggctactgatttgattctccagtcgctccctcctagctttgagccgttcataatgaatttcaacatgaacaacctgaacagaaccttggctgaagtgcatgggatgctaaagactgccgaggaaagcattaagaaaaactccaaccatgtgatggttatgcataagcgcaaacccaacaacaagaagagtggtcaaaagagaaagctaaactctgatgagatcacgagtactagcacgcacaaagatggcttacctcccaggttcacacagatccaccatcgccctggtctaaaacattttccactagatcattactacacaatgcaacacatgccaccaagaagatagcacacagccacacagtttatataaaaaaacagtgataagtagatcattagtcaatattatatttttctttgtaaaagtgtgagcagggctaagcaaatcaactgccctgagccaataccccatgtttgactctcatacaatctaggtgacaaataatcaaggataatcaacaataattcaaggcatggaataattaacaagtaggtcataactacccacacgataatttatgaaacaaatcatgcatataatttaaaacaagataattttgcaagttaggatcaacatgttcaagggtacacttgcctttacccatgggatcttcggactgaaccttcacctgcaacagcaacatcctcggcaacggcgtctacacgatcgcaaaaaggagaaaataaataaaaaaagaaaaggcagaaaaataacaacaaatgaaataaccaattaaatcaggaggtaaagctcaattttagaagaatttaggaaaaagaatgggccatatcggagtttggatggaagagatgtgaccttcggaagattgaattattcggaaaccgtgaataaagaaagagaaatatttataaaatattctctgaagttaaggaaacaaaggaattatttttggtggactgacgggcgtggtccacctgtcattgggatgatcaacggttaattggttacaaggatcagagttgtggactgattatatggaggctgagatttatttgtgaaaatcgatgacttggattggtattgggttttagtggaccggcttgtcctggacgtgtgtgacatgatgcctcgcagcgtggacgtcaacggcatggtgatggcaaaactccggattgaagtgggtgaaagaagcaagagcataccgggagaagatgatggcaggctcatgaaagagagcggtgatgctgattagtgaagatatgattgacaaaagattgaattggaagaatggaaaataagaaatattttccggcatttgtggattttattagaatcattttcgtggctaaaggatggggttcactgattgatgggagtgagatagcgaacatgccatgccagtctccgagacaatgacagaggtgacggtgtgacgtggttgccgacctaaggcagcgagaggacagcagctgtgttggccctctggagtggacgatatgatgacgacgacatggtcactggtagttcggtagcaatgggagcatagaaacaatgcgacggcatctcagcatctgggaataaaaattaaaggggtaccggtgctgggatgaagaagagacaccaggttcatggtataggatgacgacgttggacgtaggaggggaggaatattgtagagacagcactggggaagtagaggggcgaaaacggaggcgatgcttatgcaacaactattgcttgagctcgaggttgttatgaacgccaggaacaagccacgagagaagatagagcagagcagggtgtatgcactgattgtgctcctgctggcatggactactccggtgaagaaaacagtgatggcggtgcagtaatttcggaatggaaccgtgatgaccacaacagacatgtggtaggaacaccatatcgtttaacagtgaggcggtggcaccggcagacaatagcaacttgacgagagactgtgccggagacaggtgaagacgatggaagcggaggataagagcagcggtgctgctagggccttggagattaccgacctcagcgacattcataggaacgtgatggcgacaatgtggttcagctcgggttccattgcgacagcgaccatcgtggtgcgcaaacagatcagtgatgaccaacggccgcctttacgatcacaagagagaggtggcagcaataatggaagattgaattaatagaagatagaaaggaatattctctcgtgttttcaggttgattggaattattttgtgtaccaactggtatggttcatatgtcatctaaagagagagattaacagtggtgcacgcacatgcacgctgtgggcatggtggccgaggcaaagcagcagtacgacatcttttggacatgtgcgaatgaaaagaaaagaagataagggctctgttaaatacatataaaggaggaaggttgacaggggctgctttcgtgatggacgaaacaacatatagcgctatcaccgggtgataaaaatggaaggaaataatggaggaggaacatcaagagctcacctgtagatgtggtctcaacaagatgaagacatggtagcagcggcttaggttccaaggatggcgatgacttctttgcttgtaggtggcgttaatggtgacagaagttggtttggaaggggatgacgaaggagcagcgttggttcactgatgatggccagggccggccctgacgggggtcgagcagtgcggctgcactgggccccccaaacccaggggcccctcccaagatgccgaagagtaggcctactctgctgccgcgtatgatgatcaatccgtctagccctaacgattagcgacgtgctgatgccgacgttctcaattccctagccatccgcgagattagcagatcaatcttcttcttgtccctggcaggcgacggcaaaaagcaggcgtccacatgcggacagcctcgccgccggctgctccccgcgcgaaaacggcagccggcaacctcctctacggttccgctagcttcaaccgttacagcagttctgcacttctacacgcctactacctgtctgccgatggcgcctgcaggtgaggtgagttccctgctggattaattcagatgtgggaactgaaaatatcatgcgaaaaaatctattaagcctacaacttgtagtctgtaggtggactagacaggcctgcatgcagtgcagtctcatcctgctagctgttgcaagcacacgccggctagccgaagaattgtaattagtaagtgttgtt

SEQ ID NO: 29139 - DNA, 1028 bp, Oryza sativa
ttaatttccggatgttttatttttcaaaataaaaactatggagttcctcatttgatataaattcctaccagagccaaaaatattccatattgattaaaccatatatattttggttacttataattccattgaactttgtcaaattcttgtgacttgtgaacatacttctcatgatctatgatcaagatcatacatccacatatatgcacatgctaaactcctacactgcgagctagcaattatccattccatttccatactaccaccaaaaataaattcgccatgcttttatgcgctttcttctcctaaaaagaaaatcctttctgaaaaaaaagagagaaaagaaggaggaaaaggcggttatgaaaataaagttatgctctctcaagaatgagcatgatattgaaaaaaaaaaagagagagaataatgtagccatgccctctccttatttataaaagaaggattttaggagtaagcacaaaggagaagcgttttgatgcagcaacgggggttcccgatctttcgatgagaggaggataaacttcgatttggggaaggatacgacgttggcggtccgactacaactaccacaggggtgctgcgccttagcaaccggtacaccgactccacgttgttgctgttcttgccgtgccaagaacaaccttgaacctgcaagcaatcgaagaacaagcaagaacaagttgacaaggaaacagctcacggcacttgtcaaatgatgaaacttaaacaaaccaaaatggggttttgaatacaagtatccgggtggtctagccgacacacgcgagtacaaggaagtagctgcagctaaacttacatcaaaacaaaacccaaagtgcaaaatggtggctgctaggagtttatataggtggaggaatgaccaggagaggaggtgggagcaaaccctaggttttgtggacccctaatgggctgtaatgaaacaaggcccaagcccaagtttctgatgtaaaaaactattttcgtcattctgagcagccttggtcaaagt

SEQ ID NO: 29140 - DNA, 49735 bp, Oryza sativa
ctgttaattaagttcatgagctcgagctctagtcattggtccttgctgtgcaataggcgtggatgtatcgttggaaaggatgtcctcatcatcctccccttcttgcatttgagtcgtcctcgactctaactcatcttcttctcccaaatatggctttaaatctgcaatgttaaacgtggggctaaccccaaaatcggcaggtagctcaagcttgtatgcattgtcattaatcttttgtagcactttgaaaggaccatcagctctaggtagcaacttagattttctcaaattagggaacctatcctttctcaaatgcaaccaaaccaaatcaccaggttcaaaagcaacatgtttctttcctttgctcccagcaagtttatatttaatattcatgcgctctatgttctccttagtggtctcatgcagttttaacatcaattcagcgcgatattttgcatcaaagttcactctctctgaagttgggtggggcaaaagatcaattggagcacggggtagaaggccataaacaatctcaaaagggcacttcttagtagtagaatgttgtgaacgattataagcaaactcaacatgaggcaaacattcttcccacattttaatattctttttcaaaacagccctaagcattgtagataatgttctattcaccacctcagtttgtccatcagtttgggggtgacatgtagtagaaaataaaaatttagtccccaacttagcccacaaggttctccaaaaatgactaaggaattttgtatcgcgatcagaaactatggtgtttggcactccatgcaagcgaacaatctcacgaaagaacaaatcagcaacatgtgtagcatcatcactcttatgacaaggtatgaaatgcgccatcttagaaaatctatctacaacaacaaagatactgtccctccccttctttgttctaggcagccctaaaacaaagtccatagaaatatcctcccaaggcacactaggaacaggcaaaggcatatacaaaccatgagggttaaggcgtgacttagctttttggcatgttgtgcagcgagcaacgaacctctccacgtctctcctcatcttaggccaaaagaaatgatcagcaaggatatcctccgtcttcttcacaccaaagtgtcccatcagccctccaccatgcgcttcctgcaataatagcatacgcacggagctagctggaatgcataacttattagctctaaacacaaacccattggtgagaacgaatttgttccaagtccttccctccttgcaattcaacaacacatttttaaaatcatcatcgtgcgcatattgctcttttattgtttctaagccaaaaattttgaagtcaagttgggatagcattgcgtaacgtctagacaaagcatcagcaatgacattttcttttcccttcttatgtttgatgacatatggaaaagattcaataaattcaacccatttagcatgcctacggttaagttttgcttgacttcgaatgtgtttcaaagattcatgatcagagtgtataacaaattctttgggccataaataatgctgccatgtttccaatgttcgcactagagcaaacaattccttatcataagtagaataattcaaactaggcccactcaatttctcgctgaaatatgctacaggtttgccttcttgtaacaacacaccacccaatccaatcccactagcatcacattcatgctcaaaagttttgttgaaatcaggaagttggagtaaaggagcgtgtgttaacttatctttcaaagtgtcgaatgcattcctttgtgctgcagcccaagtgaatgtgacatttctcttggtaagctcatgtaatggggctgcaatggtgctaaaatccttcacaaagcggcggtagaacccagcaagtcctagaaagcttctcacttgtgtgatcgttgttggaaccggccagttatgtatggcttcaaccttggcttgatctacttcaattccctgcggagtcacaacatagctaagaaaagagactcgatctgtgcaaaatgtgcacttctcaaggttaccaaataaacgtgcatctcgtagagcatcaaaaacagcacgcaaatgaccatgatgatcctctattgatctgctatatatgagaatgtcatcaaaatataccaccacaaatctgccaatgaaagcacgtaaaacttcattcattaatctcatgaaagtactgggtgcattagtgagaccaaagggcatgactaaccactcatataggccgaatttagttttaaaagctgttttccattcatctcctaacttcatgcgaatctggtggtaaccactacgcaaatcaattttagagaacacaagtgaaccactcaattcatcaagcatatcatctagcctagggataggatgacgatatctgattgtgatgttgttaattgctctacaatccacacacatgcgccatgagccatctttcttaggaactaaaagcacggggacagaacaaggactaagagactcacgtacataccccttgtcgagtaactcttgcacttgacgctgaatctcctttgtttcctccgggttggtcctgtatggcgcacggtttggcagagaggccccaggaatgaggtcaatttggtgctcaatccctcgaattggtggcagccccggtggaacctcctttgggaaaatatcagcatactcctgcaaaaggttagtgaccggaggaggcaaagaaataggagtatcctcaattggaaataaggtttctttgcaaaccaaagcatagcaaacaacagtgtcagtgtcaacttcatccaaatctgattttgttgcaatgaaacaagatcccttcagcttaatctcatttttattattttgaacagagttggtgggtttcttcttatgcttctcaagttcattagccgcaataagatgctcactcctagtatgctcctgatttttttgtttgctagctctagcaagttcatcctttaaaataacttcaggagacataggatgtaacacaagtttttttccattatgcacaaaggagtattgattggatttgccaaagtgtaaagaatctttatcaaactgccatggcctacctaataacatagaacatgcttgcataggcacaacatcacagttgattgaatcatgataagaaccaatggcaaaatgtactcttaccaatcgtgttacctttaccttgccgctgctattaagccattgaatatagtagggctgtggatgtggctgtgtgctcaatgcaagtttctccaccatttcagcactagccaaattattgcagcttcctccatctatgatcacgcggcaagagcgttccttgatcacacacttggtttgaaacaaggtgtggcgctgattctgttcagccctttccatttgtgcgcttagcactcgctgcaccacgaggctctcatagtgctctgcagcttcagccccaatgtgttcctcatcttggtggggcgcgtcaccttcccgtgcattgttagttgcaagcaaagcataggtttctccatctaaatcactagcggaggagtacccaccatcagctctcacgatcattacacgagtgcttgggcagtccttgcgcacgtgaccatagcccttgcagcgtaagcactgaatatctcttgtccttcctgatgaagctactgatgatgaggtcttggaaggtgtagcagcaacccctcttgttggttcactcgggcatggtgtagagtttgttgtagagggacgcagcttgttgcttgaggacgatggtgctgctgctcgagttgacggtgcagcagcgttagaagatgtccaagagctagcacgacctgcagaaatgttagtcctgaagctagctcttcgtccctgtacttccctttcagctttacaagcaagatgaaacaaatgattaattgaattatattctttgtaggttagaatgtcctgaatttctcggttcagcccacccatgaatctagccataccagcatcatcattttctaccaatccacaacgaagcattcctgtttgcaaagcttgataatactcctctacagatttgtttccctgtctaagttgttgcaatttgtgcagcaaatcacgtgcatgatatgaaggaacaaatctagctcgcatgactcttttcattgcatcccaggtttggggagtgttatttggattggaacgaacaaattcactccaccaaatggatgcaaaatcagtgaactcactagtagcagccctaacacatttattctcaggaaaatcatggcaagcaaatttctgatcaatggctaactcccaagtaagatatgcatcagggtcatattttccatcaaagcaaggaatggtaaacttgatcttgcctaaagaatcatcattatcacgtacctcccgccgtggtggagcgcccaagccatggcgctgccggcgctgttgtctttgtggacgaccaagtacctcctcatcatgctcagtgtcagcaacgtactccagttcttcccttgctgcgatgctgctattagcatcatggccattgtggttgcgcctagccgatccatcatgaccatcttggcccattctctccaacgtattcaagatacctgcaagagaagtgttcacagccacaagggacctctccaatgaggaaagcttggagttggtgtcaatttgagcagcctccaattgaccaaggcgatcattggcgaccctaacatcctcatcaaggccttcagcatgctccctcacttggcgctcaaaatgttgtatgatgcccctcgtacgtggtgaatgttgagggtgctcccccgatcctcctgtcatggttaatgggaagaaacaattcacaagaaatatgtcctatcaactattggagctaggtgttgtccatctccacttctaccaaacttgtgcaaacgagttcttacatgttcttactttgttatgtaaaaggcgttggcaaacagcaagaacagcaacaacggttagtagtactggagccgacaacaaacacgatcctgtgatatagtagataaaaatttgtggagctataggtggctgcaagtaatatcaaggtacagctagaaccacattaatcaaagcaagttgaataatcattcaacgatggtattgtgctggtcctaggcaaaaccctttagagacgcgagcctagtcacaagcgtagccactcaaaatagcacgaaaataacacaaacacaacagcaacaacaacaacttcctctcttcccttcctttttttttttccttctcttcacttctgattttttttctttctttttttttggttttctttctttttttttttgtacagcaagctcaaagcttcagccaacaagtcaaaacaagccttagcaaaataaccttttctcaaacattttcgaaatttcacaagcttcagccaacaaatcaaaacaagaagtaatgatgggttggttggctagttacatgattcagccaacaagtcaaaagtgagagcacttaaatgctttcttgggaagggctgattcacttcaaaaagttgcaaaagggttggctgttggtggaggcagcaataaatgcatttgggggtggctgatgtggtgatgagggtgctgctggttgtggtggacgaaatttggtggggttggaggtggatttcgtggtgaatatggtggtgatggtggcagcgggatgaagataaaagaagtgatggtggaagtgtttgcggtgacgaattcgtgggcagaactcgaaactctaaaggactaaactactagaaccagcaactcaaccaatcgatgcaatcgaaaactcagcaagcaaagactaagtagaacagcaaaggctcaacatgttttggtgatttcgggtctgacctattttagtggtttttcttttgggctgtaggtaaaaacaaagaagtgataaaatctctcaccgagcaacttgagctctgataccacttgatgcagcaacgggggttcccgatctttcgatgagaggaggataaacttcgatttggggaaggatacgacgttggcggtccgactacaactaccacaggggtgctgcgccttagcaaccggtacaccgactccacgttgttgctgttcttgccgtgccaagaacaaccttgaacctgcaagcaatcgaagaacaagcaagaacaagttgacaaggaaacagctcacggcacttgtcaaatgatgaaacttaaacaaaccaaaatggggttctgaatacaagtatccgggtggtctagccgacacacgcgagtacaaggaagtagctgcagctaaacttacatcaaaacaaaacccaaagtgcaaaatggtggctgctaggagtttatataggtggaggaatgaccaggagaggaggtgggagcaaaccctaggttttgtggacccctaatgggctgtaatgaaacaaggcccaagcccaagtttctgatgtaaagaactattttcgtcattctgagcagcctgggtcaaagttgatggtgaggccacacatagctgaaagtagacgacgagatctttccaacaagtactcatttgccccgtttgccctccggagtgaagagcattgacttcatcaaatcagcgctgctagtgctgcttgcgatttggttcctctcccatattcctaacaacaagtagatcacaacaaccatttagtagcacccaattctgagaagaacttgtatgattagctaggaatgactttacctgataattaagttcacgagctcgagctctagtcattggtccttgctgtgcaataggcgtggttgtatcgttggaagggatgtcctcatcacgttttttctttattttaaacatttcatttccaccatatatcacacacacacacacacactttacacgatcttgatcttgagtatatttagtcatctattttagtctatgtttttgacttagtaataaatgtgaatgcaagtatgccatgtttgatccctaccaaactacacatatcaaccttagagtaggaatcaaaaaggcaaaatggtgaggaattcattttgatacacttggagagaccgagtgaatcatttgaggaacttggatttcttttacaaaaatcatttgaaaacttccggaataaaagttgaatgaagattgggtgattagtactctaattgttgttctgtctttcaaccgcttaaggcaagaagagacaatgtctcgtgggaatcaggggtaagggtaagccaccgtgccaaagattatttgatttaagagagagtacatatgccttgaacctatacatttgagatatacagcatagtagcaactcatgatcaacagccaagtctttgtttcctttcatcctttactcgtgacgagcaaaggttcaagcttagggggttttgttgacggtcgttagcgatcagtttcgaccgtcaatactaccaaaataaaggagaactagttatgcttacaatgcatatttgtgttagaataataagtattccactagtactgggattgctaacctcttgcagagaatgaacataagagcatccctagcagctcatctatatttcatcccccaaatgcccatatggattatcatccaaaaagattcctcatccatatcccttccaactccaacacatcatctatactatatcatccatatcccatcatcctatattttagtaatatcttccaactaaccttacatttatattttaagggatatattttgaacaacttaattttaacgttgtatttatcaccataatattttgaaacgaataaactttaacagatatatttttattgggtgactgaagcatttaaaatgataacccaacaaattaacattactacattttctcccctcatttaatcgctagggaactgctagtactacttcctcactgcttgttctctaccatctccgattctccgctagtactacttctctttgcaggcagtggctgcgcagaggagttggcgagaggcggcggcggcggctgtgcagccaaggggcggtggcggacgagctggcgagaggcggcggcggccaggcaagtgaggggcggcggcggccgagcgggcgacgggcggtgaggatgcacgcggtggccgcggagcccggcggccaggcaggcgagggccgcggatggctggggaggaagtagccggcggtgggcaagcaagggacggaggaggccggcggcggccgccatatcgcgatggcggcaggtgaagcgagcgaaggagcagcggcgcggcgcggagtcctgatggggcggcgcagacggcggggcctccactccggcgaacaccaacggcagacccggtatgtccatcctctctatgtccatctggatggtggcgcgagttcgtcgagctgagcagttggggggatagcgtgaggagagagaaacgccaaatttggcatggagagcgctcggtttggatgacatctaaagatggcgtgtgtgatggagactctgttggatcttggtttttcacctccatacgctaaaattgagatggatgcccgatggaagatctgctgggcatgctctaaaatggagaattggcatcaaaacaggcgatcaatcaatcagacgatgtcgagaaccagacttatcaatgaatgggccaagaattcagaaatgacatgatcaattgggtcaaaattcacaagtctacatatgggagcaagagaggaggccgccagccaaaacctgggcttgttgggccagccaatggttcagtcgaactagggggctcggccgaacccttctcagcatcatccgatctagggctttgcctggacggtgtggattagcccccaatgatggttggagggtatttccgaccattccaacggtcacaactatcattgggaaggtataaaaggagctctcatcctccatttcaacacacacctcaagcaagctctctcatactctcttaagcttagtttagtattctcaagctagtggagtaggaatagaacagaagtctgagtccggaagtattcggaagagttcggatatggctctagcagctctcctttcttcttttgtaagacttgtactttatttacaatattcttctttatacaactttggtattgtaatattttccgagtatatgaataccaactttactttatatccgagttatgttgattttactgctagcttatctgggagatgccatggtacaggtataatgtttgcttatgcaattactctatgtcatgacgatgatattagagtactatctggtagtttacacgtggtgtctagattactgggtatcattatttggggttatatgctgtggaagagaggtgggccactgatggtgacagctcagtacgggtattcctccgcgtgtgtatatagtcctaagttaatttcctggggagggtactcctccgtatttagcccctgttatatggtcatgacaggttgtcgtaagaaactcgtcagtcatgggtggcttctcgaagcaccaggagggcatcggaaagaggatattagctagttaatcttatagttaggatgtatgtacaatatgtatattagaagtataggaatatattatttttctattttctttccactttgctcagataatttaatatgagaatgagtagtcttatgcttgtgtgtcactttatcctctgcttatattaacccctgcttagactatagttattacaagtaatatataaattattagtacggttctctctactataatcttcccacgggattaaacaaacgtgatacccttggaatactctcgggtgaaatgttacaatggtatatccgtgcacttgtggatgaaatctgtaaccataatataccaggagtatttctgcgccattgctggaaattatatttctagtaatgttgttaagaaataccaacatcgatccaaacaccaccttagtcatactctaatttgcattttattaatgtatgtactgcaatatcgttaagaaataccaacatcgatccaaacaccaccgtgtctcggctcagcgcctagctggctcggcacacatgccctcagccccccacaggctcggctgctcacgagggattgtttggcccagcgaaaacatgcgattgtacaggcaaaatggcaagcacgcgttaatatctaatagtgctacgtggtccaatcgaaacccggcaaaattgccggcttaagataagttgactggattttgttaatcctagtgtgaacacatgttaagctacctaggacttgtgtaaggctgtggtcggaatcacccgctcccacgatgcacagtgcgcacggaaaacagagcggttaattagcgcatgattaattatgtattagctaatttttttaaaaaaaatggatcaatatgatttttaagcaactttcgtatagaaactttttgcaaaaaatacactgtttagcagtttgaaaagcatgcacgcgaaatacgatggaggggggttggaacccagggttccaaacagatacggccttggatatgtatgcgatgttgcttgtactctactttgtcattacctcgcaagtcattgtcactttcattttcaacactcacatgaccgatctgtgattcggtcttaggtgacaaagatagctcattttcatttgtaatacaatccgaaccgtcattcagtttggctatattttcaacgatgctattgtctaagctagcaacacaatccgaacgatcacttggtttggctattccatcattatttaaactagtaacacaatccaaaccgtcgcttggttcggctatattgattgttgcattattatccaagttagtaaaacaatctgagccaacctttggttcggctatacttgttatggtcttgttgcataaattattagcacaatccgaaccgtcgcttgattcggctatacatgttactgcattatcattgtgaataacatgtgtatgtggaataacatgactaatagtactaacatgaggcaaataacaattaaaatcagtgctattagttgtgggacaaaattctggaagaggttccaaggcgtagatctgatcggctatggatagcccggtctgaccggccaagcacccgatctgaccagtagtcaatgatgcggtcagaccgaccacaggaggcacaatctggccgagatagggcacggtttgaccggctatggtgggtgcggtctgatcggcgtcatgcgcggtttgaccgtcggctacgctttttatataaccgattcccgaggaatcggctgtgtaaatgccagtcgatccatccataatactatagatatgttgtatagatgcaaaactagaagtagcattagatttttgataactggctatctgagagccaattttcttaatagactcattaaagaaagttttacaagcatcttctaacatatcataattttttcaatataagtgctaacagatgcatctatataacgataaatatgttttcgaatggcaagagatggatcgggcgaattggagattaccttaaatttgagaggaggaccagacttgagaaccacaccttgatgggtcctgatgcatgatttcatcaacctctcttgtgtaatcaccttgatccactccttcatgacttgacgttgctcctcatcaagatcctccctgatgaggacatcctccactattacccgctggcaaagacgacaaagtcgggcggcgactgtgtgagactctgaataatcccaccttaaaagggagagccgcccttcccctattggactagtcttttagggagatcgggccttttcccgagtgggtgtgcctaagaactattggggtccggacaaccttaatttgttgggcctcggccgaccccacctgggccggattgttatcactcccatgtgaccttgtcgatctcgttcccgctcatcatagttgatgaagaaatttctcgattaatttcggccatatagctcataaccaaaatattttgaccgaatagattaatatactgtctttgatttccttcgtatactttgatgtgtaacaaatttgaccaaaattgatttcctcgagggtcaaccgatcaaataatatatgcacagtactagatcggctagaattgattttcaggttttctgattgtgcgcagcaacagacgtaattttgtgtagctctagcgaaatttggaactttttacagccgatgtgagtcggctctgattttcttttctcggtaacaaaccaattcagttttgcctaatctgggtagatcagctctggtagcctgatcttttttaaagaaaatttttggaatacgtatgcacagtatattgaattggattgagtttcaaactttctctgtgcacagcaaggactagcacgatcgatcagatcggtcggctgttgcttgtttcctgtgcctgtggccgtgtgtattgctgtattgccgccgaaacagatgtgttcggcgaggatgacacgatggtagccggtaaaaacaaaataaaatagtagattgatttcggccgcacggccgaaacagtcgtctcgacaaaacaacggataaattgcaaattcggctattttaaagccgaatagatttcttccccgacggagtcgtcaaaaaacgtgttggtgattttttgtgacaagtcaacaagcacgatcgcagcacctaaacgccttgcggtgaaaacggctaaaccagctagtggagccgatttaaagatcaaaatcagcctttaggccgatttagatcgatacgaggataactactcgtcttgtgggtagaacgaaaggttttcaagacaaacctacaaagaggtgtcgcactctcgcagtggcggcggacgatttacggcgcaaatcgacaaagatagactaaaactagggtagagtagaaaacatggctaaaattaaaaagaaaaaacgatttaagtagattatgtgtttggggggattataattgaaccagtcttatctcttaaataggggttggtcttgacctctataggccctcatccaagtccaactcgggatacaaactaaagaaaacccgaagcatgccttttcaagcaaggaaacccgagacccgacgaaaacagactcgggctcggaccctgacggtctgaccagccacatacctacggtcagaccagagttcaggccgcggtcagactgcccacacacatacatgcggtctgaccagccctgtgaaggaaacccgtcactttccaaactttgacaactttcccctatttcgttcataggtgccaattttgggtgtaaacacacctgcggtctgacttttcaaacttcggcaattttcccctatttcgtccataggtgccaaatttgtgaaggaaacccgtcacttttcaaacttcggcaattttcccctatttcgtccataggtgtcaaatttgggtgtaaacacacgggtctagtttccctgatctttcggtgagttgatgataactacgatttgctcatccggtgagttgatggtaactacgatttgggacaaacgttgatgatccgactacaaccagtaacagccctccctccagaaccacatagctagcccatccgacgggcgggcccacttacactttcgtcctcgcttcataaaagggttaacccgggagtgacatggttgcagagaagaggccttataagttggttccaaccttgctagactagcaaggtggtactaaacatgcacacagctctcatgggacacaggtcaaatcctaattgggccaggatgtcacatacaccctcccttaaaggacccaacgtccccgttggcctaacttagccatgtagccacataggcatataaggcaaatgtccaagaacacagcccctcctacgtgcgtgcagtgccggcaccatatgccatgccatgtgcctcacacagagcccacatgcactatatgctcgcacactgatccatagcccatccgacgggtggacccacttacacataccactccatttacacattcgccatcgcttcgtgtaaaagggttaacccgagagtggcatggttggagggaagagtccttataagttggtttcaatcttgctacactagcaaggtggtactaaacatgcacacagctctcatgggccacacaggccaaatcctaattggaccaggatgtcacacaaccgtacaagacgttgttgtgttgcgccttatcgattgatacacctctccatgtctttgtttatcttactgatggagatcaaccttattcctacaagcaaaacgaaggacacaagcaagaacaagatgaatgcaatccgaattgcaaagaatacacacgatgaattggggttctggagacaagtacttaggtagtctatgcgacacacgtaactacaaggtaaagttgcaatggctatactttaatgtaaacaaaacccgagaaaccctaaaggggtacctagctatttaaggaggtgtgaggatgaccaaagagactgttggtatttcttaacgacattactagaaatataattcccagcaatggcgcaaaaatacttctagtatattacggttacagagttcatccataggctcacagatataccattgtagcatttcacccgagagtattccaagggtatcgtatttattttatcccgtgggaagatcatgtagagagaactggactcataatttatatatcacttgtgataatcatattctaagcaggagttaagataatccaagggtagagtgaaacacaagcattaactactcattctcataatatatcatctaagctaagtgggaagaaaagagaaagaaaatctattcctatacttctaatatacatagtatacatacattctagttaactgatatactagctaataccctctattcgatgccctcctggtacatcgagaagctacccttgactgccgagttccttacgacagcccgtcatgaccatacaaccggggctaaatacggaggaataccctccccagggaattaacttaggattatatacaggcgcagaggaatacccgtactgagctgtcaccatcagcagcccacctctcatctacaatatataaccccaaataatgatatcccgtaatctagacatcacgtctaaactaccagatactactctaatatcatcgtcatgacataaagtaattacataagcaaacactatacccgcaccaaagcatcttccagataagctagccgtatattcagtataacatgtaaagtaggtactcatatactcggaaagtatttcaataccataaatgtatttagaagagtattctagtaaaagtacaaagcttataaaagagaaaagaaaagctactagagccatatctgaactcttccgaaggcttccgggcacctgatttctactctattcctattccaccagctagatactactaaactaaacttgagagaaatgagagagctattgcttgagttgtgtgagtgaagtgagaaggtgagctccttaaataggcaggtaatgacggttatggcggttggaaaggtcggtaataccctccaaccgtcatagggaaggaatccacaccgtccatccaaaccctgcatccagcggcttcacggcaggttcggccgaacccaatggttcggccgaaccatgggctggcccaacccagcccatcttcggcttgcggcctcctttgtttttctccttcgtagacttgtgaattttggcccaggttgtcatgttaattctgagttcttggcccattcatacataagtctggttctcgacatcgtccgattgatttatcgtctaagttgatgtcgattctcctccactttattgttattctctgcaaaagtttagtagacctaatactagtggaatattattattctaacatatttatgcattgaaagcatcactagttctcctctattttggtaatattgacggtcgaaacctatcaataacgaccgtcaacaaaaccccccaagcttgaacctttgcttgtcccgagtgaaggatgaatggaaacaaagtcttggttgttgatcaggagttgctactatgctgcatatctcaaagatacaggtgcaaggtatgtgtactctctctcaaattaaataatctttggcacggtggcatacccttacccttgattcccatgagacactgcttttccttgccttgagcgattgaaagataatagtaattagagcaccaatcacccaatctttattcaactcttattccggaagttttcaaatgattttgcaaaagaaagccaagttcctcaaataattcactcagtctctccaagtgtatcaaaatgaattcctcaccaattgttgccttttttattcctactctaaggttttaatatgtagagctaggtagggatcaaacaaggcatagttgcattcacatttattactaagtcaaaaacatagactaaagcagataactaaacatactcaagatcaagatagtgcaaaaatgtgtgtggtatatggtggaaatgatatatgaaggaaaataaagaaaaagcttctcctttgtgcttaccttcttctcccaaaaatccttcttttattgattaggagagggcatgattacattttttttttcaacatcatgctcatgcttgatggagcataacatttttttttcataatcatgcatttccctcctttttttttcaaaaggatttttttaggaggagaaagcacatgaaagcatggagaatttattttggtggtaatatggaaatgtaatggaatattgcttagctcccagtgtaggagtttggcatgtgcatatatgtggatgtatgattttgatcatagagcatgagaagtatctatacaagtcacaagagtttgatagagttcaatggaatgacaagtaaccaaaatgtatatgatttaatcatgatagcacatttttggctctgttaggaatttatatcaaatgaggaactttcaattttatcattttgaaaaacaaaacatccggaattcaagtcaaactagtatcataatcatagcaactcatatttactatctcatatctcgcaacaacctagacttagatcagcaagtgcagctcatttacctcaggttcccggataattgttggctacttttatttgacctttgagagagcacttaccaagaacccatatataagagatataaaacagagcaactattcatcatttctacaaagaaaactagcttgtcttacctagcatgactcaaacctatcctatctttttgtatttttttattttgcaaatttttatgttgttttcaagttttataagatgcaattggaaagcaaatatgtaattggaaagggaaaatatgcaatgtgatacaagttacctcagtggggggaagagatgaccccccccaagcttggctttcactcaaggtccttgataaggattgaacccctgaaagcggaactacgcttgaaggtcatcgtgctattgctgcatcatgttgttgaagttggcgaactgcgcatcagcagattgttgccatccttgcgtttgtgctagtgcaagggtgtccattctccaagtgatttcacccaagtccgaacgagaggaacttgagcgccattcacttggagatggaggcacaccacttgatctggaaggttgattgtccccccactagatgtcatgaggcgcatgccaccggtcctcactggcacttgcccaggttgagactccgatactgtgacgtcgagcttgggtccatccgggtgcatccccagttggctcccaacctgcctcatacatctgcacggtgttgaggatgatgaacattctagttcatttcttgtcatgttgcgcgtctccctgtatgctccacctacacgagattcttctatggtctgcaggggaatggttagttcacggcagttgtacaaatgatacaccacatttggcaacgggatttcatttgtacacccgaggaaaaagtaaatcaaagatccatctactccatgtttcagaatatgcccttgcactggataagcctcattaatacacggacgagcggctgagataaaagcaatttggtcgctaacgacccctagcccttttgctatccgagtattcagagaagtgcactcaacaggagcagagaactttatactttctaaccattgccttatcatacatttcacaggagcaattttgatctttctaaccatggcaaacatgataatcaattcatctcccataatgggcctcatatcacctctaggaaactgagtcatagcaatccatttgtgcatgagcctaagtgtaggattatggatatcattcattctaggtttcttgcaaattggagcaccggaaatatcttcccgaaacctatttttctcgaacccagaaattcctttctggagatcgattttacaggaatcgtgaaaaccaagaagtgtacttaagcctttccatgtaagtgtaaactcttcacggaaaaaatgaaaggaaattccatcttctatttctttcaaagtgcaaagaatttgcaaagtaagcagacaagaaccaggctcatctaccacatcaaatctctgccaaccaacagcttccaaatagtacgaaattcagcatccatacctatctttttttagcagctccggtgagtattctcgcgtgtgagcatacttccggtcgctcagcatgtagtaggcttgtctctcccgatcactgacaaggtcgaggtcggtgtcgttcaggagtcatcgcggagcttcggcgtcttccatcgagacatctgttgatgaatgagtactagactcgtcatggcgacttgatgaagagccagaccccttgaacagacgtgacagtcgcctcctcattctgcacaatggagcaagaacggactaactcggcgggggttaggactgacaagaatttcacccgccggttagtttcaccaaagcaacttgtatatatgcaactaagtgtttgaatttgagggaaactatcaaagcttgaatgaacttgagagcaaactttggagagggaatgaaaatgtgttgaaatggggtggaattccctctctcggctggttggcttaagtagtgcacccagaatggtcaaaaccgacctatggggcccactagccgttgccttaaagaaggaggcagccgaccgttggcctagctggttcggccaaacccacggtgggcccaaccggacccactttcagccaatgggttccaacggtcagtgtggtcatggcacagtgaattttcactgaaaattttattttggtttgctctgaaaaattcatttgaacaatttcctcaaaattcaaaaatcctaaatgcaactttgaaattcaaacatgtgatgatgcaaaaattcaaattgttgaaaacaaatatgcggatacataccaatttacctgttggcgaaggtcgcatcatttaaagtccgacgtgcaagactgtacctccatctagttcagtttgcggattttctatcgtctccggaggtgatggagcgggcgtctttggcttctccctccacaccttctttggttttggtgcggacggcggcttcttctgagccagctgctctagcttcttggcccgtatgggtggttttaccagcgttcctgggcatcgttgtttccttctccaggaaattctgcatgaatttcagcaggctgtccgttttgggtggctctacttcgacctcttgaatattctgtgggttcggcccgtactttattctgaccatggagcattgttccgtcctcggttgaaactcaaacttctcttccttgctgttgatgtggaaacggatactccccattcccacgtcaatgttggctcctacggtgctaaggaaagggcgcccaggatgagcggtgtctcttttcccgtgtccgtgtccagcactacgaagccaaccgggatgaagaaatcccgtatcttgactggcacatcctccgctatccctacagggtaacggactgacgaattagccagttgaaggtgcattggtgttggtgcccataccgtgaagttgagcttgtcgaagacatcttttggcatgacactgacattggctccaaggtcgcacaaggcctggtcgaactgttgtgccccgatcgagcaggtgatcgtaggacaccccggatcttccttcttcttcgggagcttgtggagtattatgttgctgcattgttccgtcagcttgaccacctccgttgggagcggtctcttgttgttgagtttgtccttgagataacgggcgtatgttggcatttgtatggtgtccaacaacggcacgttgatgtggatcttctggattacttcaacaaaacgagcgaattactcgtccacagacggtttcctactccgttcagagaacggcagcaaccgtgtgtcccagtactcttgcggcactgtcttttctggcggaacttacttatcagccgagtcattagatggcacttctttttctttttctttttcccccttttcttttcgaatgggccgctagcccattctactccccatccccctccccgctgggctggccgaaggccaaggcctagcagccggccgcatcctccctcctcccttcgggtcgccgataggtggggcccacctgtcgggcccgtctcccacctccagccggcgccgccgcatcccgcaaccgccgccccgctcactccgcgtctcccgggccacgtcgcccacctcgccgcccgcgcccgccttccccgcgcccactccctctctcacccgcccgtgcccacgctcgagacggccgggattcaattttagaattccgcctctctctcctcccaacctctccccactccgccggcgaaatcgcggtctctccggccacgatcgaccctcgtgagtctatataaagcacccccgttccctcctctctctttttcgttttgcaatcgcctgctcccgtgcactccaccgccctagcgtcgtcgccctcgtttccgccgccgacgccaccgctccggccgccgctagccatcgctagcggctgcgccgagccacgccgtcgacgccgtcgcattcatcgtcgtgcgggccaccccgtccacccctctcccgtcggattccgccgccggaacccactccgcaccgtgcgccggtgagccccgccatggccgccgccttcggccggcgtcctcaccctcttccatcttcctctctctctctctctctctctctctgtctatcccctttcatcgtgttcgttaagtggttccggagctcgtcccgttgccgtcatcgcagggactaaggatgccaactgagctagctgggtttctatcattttattaaagctcagctgattttgaaaagcagaagcaaagccatctaacttgacatttatgttttctaggaccttgtcattggccgcaagctttttgcttaacgcatcggtggttttagcttgcgcaaaaacaagatccttcaaggagggctggttagaaaaattatcgttgttgttacctccttgataatatgggcatggttggttccacccctgacctccttgtggatgatacccgttgttgttgttgcccatgtacatcgcctcctcatgggttcccgggcagtcattcccagaatgacctgtgttgccgcagacctcacatgtggcgtgagagtccaaggctttgacggtgccttgtggccatttctcgtggtcgtccaatcgcttcatgaggaggtccagcttagcagcaagtaactccgtctccttgacggtgtgcatgcctcgctgactggtctagagtcgttcctcgctccaacccatattggagaccatcttctctattagatcaacggctccttgaaccgttttagagaagaacgctcctccagctgccgcgtccaggtgatcgtgggacatcggggtgagtccattataaaagttttgcaggatcaaccagtcgtccatctcaagatgaggacaggcagctacgtactcttgcagtcgttcccatgcttccggaatagactcatcccttgtctgctggaaacttgaaatccttccacgaagggcattggttttgcccatcgggaagaatttcgagaggaatgtcgtagagcatttgtcccaggtattgacagcagcaaggttggcatagaaccactgcttcgctctcccgagaaggagaacggaaacagtcgcagcctgacggcgtcgggactgacacccttgatggtgtacgtgctacagatctctaggaactgttgcagatgagcattggcatcctcatcaggcttgccacagaacgggctagcctgcgccatcgtgatgaggctggacttcaagtcgaaatccacgtcccctatgttgacctacggcccaatggccacattgtcagcagagggagcagcgaactcgcggaaagtcttgttagctatagtcttgaaggtcggtggtgctggtacggctggtttctctgtcggtagagttttctgcagggctgcgactcgcggcctaacgctccggaagaaagcttctggattttctttgaagttttctggcagtttgaaaccagtcatgcactaccctgttttcacaacaaaagtgaaaacaaccaaggttagcctgcaaaggaaaatgattatacagaggcaaatataaattattagttaaaatagtctctattatgaatcttccctggcaacggcgctagaaatgcttgttactatttcttaacgacgttactagaaatataattcccagcaatggcgcagaaatacttctggtatattatggttacaaagttcatccgcaagcgcacggatataccattgtagcatttcacccgagagttttctaagggtatcgtatttattttatcccgtgggaagatcatgtagagagaacttgactaataatttatatattacttgtgataatcatattctaagtagggattaagataatccaagggtagagtgacacacaagcattaacttctcattctcataatataatatctaagctaagtgggaagaaaagagaaagaaaatctattcctatacttctaatatacatagtatacatacattctagttaaccgatatactatctaataccctctatctgatgccctcctagtactttgtcacaccctgaagttcttttccccaagcctaaattgaatttgtaattgatctcgagaaaataccggtgtaaaagaaagagtgaaaccataataaattaatgcaaataataatcggaattggcatatggaatttttcttgagttctacatgtcgaaatgtgctaataagatttttagtggaattttcagagctctagaaataattttaaccaattaaaattgagcacaagcaatgtttaatccctggaaattcatttctttctttttctttttcttttttcccccttttcttttcgaatgggccgccggcccattctccttcccctccccctccccgctgggccggccgaaggccaaggcccagcagccggccgcctcctccctcctcccttcaggtcgccgacaggtgggacccacctgtcgggcctgtctcccacctccagccggcaccgccgcatcccgcaaccgccgccccgttcgctcccgcgtctcccgggccacatcgcccacgtcgccgcccgcgcccgccttccctgcgcccactccatctctctcccgcccgcgcccgcgctcgagacggcctggattcaatttttgaatcccgcctctctctcctccccacctctccccactccgccggcgaaatcgcggtcaccccggccacgatcgaccctcgtgagtctatataaagcacccccgttccctcctctctctttttcgttttgcaatcgcccgctctcgtgcactccaccgccctagcgccgtcgcaatcgtttccgccgccgccgccaccactctggccgccgctagccgtcgctagccgctgcgccgagccacgccgtcgacgccatcgcattcgccatcgtgcgggccaccccgtccacccctctcccatcggattccgccaccggaacccactccgcactgtgcgccggtgagccctgccatggccgccgccttcggccggcgtcctcgccctcttccatttccctctctctctctctctctctctaacccctttcatcgtgttcgctaggtggttccggagctcgtctcgttgccgtcatcgccctccgtcgctcgccatcgtcaatcgccgtggtgagacacctcctccagccgcttagccgccgctaccgccgtccgtgtcaccgcgacgccgctgccctccgccgccggccggtcgccgccgctgcgtcgagccgcaccgccgcgtgccatgggcgtcgggccagcttgagccgtgcccgcgagccgcctcccccgtccgatcgaccgggcggtagatcggggcccatccaatcccggcaccggcgtggctgacaccgtggccgccacgtgtgcgccacgtcggcgccacgtgtgcaccacgtggtgcgccacccctttcccggtccgtggacccagtccaccgtggaccaccacccgagtcactgccatgtggggcccgcatatcggcgccgccccctctctctccccgggaatttaattattgcgcaataaatcaattaaggatttttctgtttatagtgaaaacacagtgaatcttctaaaattcatatctaattcatccgagctccgtttaagcccatttaagtctcagtaaatcaagaaaaatgcatagaatccattaaaaatggttttgttctctgtttcagtagtcttatagcctgtttgtattgtttgctttgtatgtcgcatagattctggctctcccgacactccggtgtactttgaaatagtcaccgaggttcctccagcagcagagcaaggcaagtcatgcttgtcacttgaacatgttgatcctatattgcaaatgctctatcgttttcctttaaatactgcattgttttataatattactatgggatttttacctactgttacagccatgctatttttgtaccatgctcctttgttagattgggatataacatgactagatattggactagggattgcttagccatgcttagttcaactagcacacaatgggggaattacattaatgcatagatatcagattcttgaaatgatgttggttaatgccaccgctccggtgttggttaattaaaatatattaaatggtgggtgcatggttttgatggtcgcgcccatggcatttaaggaccggttcggggatgccctagaagaacttatcatacttacaacaagcaaacgtgggcaacggctgggcttgtagtgtagctttcctctggttgatgcatccaggcaagggttggcgtgatggagcggggcgggccctgcgacggcctatgtcgcttccggattcacctaggcacaagaggggactgcccgttgcccgctggggactggggtgacacatgaggtgtggtgtgcttggctagagggggttatgcgaagggtcctgtcacggcctctatccggtatgtcatggtggcatgtcggtgcacggaaacgtgtcggggggctgtgtcttgtgggtacagttgtacacctctgatcagagtaaaactattcaatagccgtgcccgcggttacgggcggtcaaccagattcaccgtgatttgactcaccctagcttagtataatggaattgattagttctggtggatggttgggcctgttgcaacgtggggtagcgttgaacagtggatggttaatattgatgaattattaaaactgttttactgctttcaactaccgtctttaaatgctcgctttatgttctttgccattggatttgttccgggaaaattgggatttgttcctgtggttcaagggaaaaatcttggtcgctcgtttaagtgggatttctcaaatcagatcagactaggattttagtaacattatttgagatttatttgacagtcagtcgggatttgataggaggaatgcattaggtcctaactcgggaagatgggttgcaagttatttatgctcttattgttattattagtatgtatctaatttctcattattttatcgctatgtaagtccgtcttatttattcgctctcatgcaaaaatgatctatgcagaaaattatgctctcatttgttcattttaattgagtcctttactgctttatttaaattggatttgagcatgcattgatcctacccctttgtcttctctagatggccgaccacccatccaaccatcacggagaaggcatggatgattttgtggctgagttggctcgcatgaccttggtggtgggctaccccaacgcaccggagtactcgaccgttccaccgctcagtggcgagcttccccaccgtgttcgtctggaggttcatggctttgtgggcacctgcctcgctaacatggtggttaaggcatctggaggcaccgcagatcacgcctgtcaggaggcagcatacctgatgatggccaggcttcgtgatcaccacagctacatcttctgcaacacggcgtaccgcttcgaccctcgccgagcaagtggcgatgatgtcagcacctttcgcccgacggccggcgagaacgacaccaccttcggccacatgtgtgccgtgatgatgggaatggacaggatgcactctgacctgcacaaggcgtccaaggccttgaatgatgggaagcttgtgaggatcatagctctgaaggatgagatagcgcgtctgaagaaggagaatgctcaactgaagggtctccccgctcccggaggagtccggatccgcaccacgcctcgcaagtcaacgactgcacccgtgcgcattcagcttgcgcccaggaacccacctcctcccgcagctcctccagcacctcccgcagttcccgcagcgcccgtagctccagctccagccccagctcctgttccagcgtcagctcccacgtccgctctctcctgcgctcccgcgtcagccgccaggggtccagccagtggcaacggagtttgtgtgtttaggtttgttcgcttgtgggtcagtcgacggttgacatcatgtgcctatgatgtggctgtcttaataaggatttctttgctattttaagtgttttaattcagatcagaacaattgcagtttaaattcatatataataaagcttagttcctgagcatctgtttttcttcttttccatcccttccgtctgctctcccttcagatggtcaacaccaggaatggcagtcgtgcagcaggtgagggcagcaacgacgaagaacgcaccgacggtggatatcccaacagcgcctctggcaacgtccgccacagctccccgagaatccgactcttgcacaagtgatggcccatcagactcagatgatggcggccatgatgcagcagatgcagcagcagcaccagcagatgcaccagaggatgcagtagcaagctgagcagcagcagcggcagtttggtccccctccccctcagtccaagctgccggagtttctacgcgtcaggccacccaccatctctagcaccaccaaccccatggaggcgaatgactagctcattgccatagaaaagaagctcaatcttctgcagtgcaataatcaggagaaggtcgccttcgccacacaccagctccagggtcccgcatcagcttggtgggacaatcacatggctacccgttcgccaggtacggaggtcacttgggcggagttctgtcgcagcttcaggaatgcgcaggtgccagacggggtcgtggcacaaaagaagacagaattccgagcaattcaccagggcaacaggacagtaactgagtacctccatgagttcaatcgactagcgcgatatgcaccggaggatgtccgcactgacgcagagaagtaggagaagttcctagcaggcctagatgacgagctgaccaaccagttgatctccggggactacgcagacttcgagaagttggtagacaaggcaatccaccaggaggatcagcacaacaaaatggacaggaagagaaaggcagcatagttccggtccaaccaaggaagtcaccagcgaccgcgcttcactcccggacagcagggtggacctaccaccatgattgtccgccagcatcaccctttcaactcaagcagctttcaccagggcgccagtggcagccagaacaacccgggaggtcagcccaaccgcagtgcagctccgcgcccaccaatggccacaacacaggcagctccatcagtccaaggcaagaaggatactggagcaaagccagggtcctgcttcaattgtggcgagcatggccacttttctgacaagtgctcgaagccaaggcgtgccgggccaaggttttgcccaagctcgtgtcaaccacgcatccgtagaagaggcgcaagtagcaccagaggtcgtactgggtacgtttcctgtcaactcaatttctgcaacagtacttttcgattctggtgcaacgcattctttcatttcaaagaagtttgttggggtacatgggttaataagagaagaactgagtacaccaatgcgggttcatacccccgagaatagctccacctcggttcaattcagcccttctgtaacaatagaaatccgaagatcaccatttctagccaacctcatccttctcgaatccaaagacctagatgtcattcttgggatggattggctgaccaagttcaagggtgtcattgattgtgtgaatcgcacggtcaccttgaccaataagaaaggggaaacagtggtgtacaagtcaccagtcgcactgaagcagggaatctccttaaatcagattgaggtggaaaatccggtggtcaccgaggagaggagttcgaggaaattggaagatatccccatagtctgcgaatatccagaggtgttccctgaggacctcattaccatgccacccaagagagagattgaattccggattgatttggcacggggactgctccaatttacaagagaccgtacagaatggcagccaacgagctagcagaggtcaagaagcaggttgatgagcaactgcagaaagggtacattcgaccaagtacttcaccttgggatgctccggtcatttttgtggagaaaaaggacaagacaaagagaatgtgcgtcgattatcacgcactcaatgaggtcaccatcaagaacaaataccctttgccacggattgatgatctgtttgatcagctgaaaggagccaaggtgtttcctaagatagacctgcgatcaggctatcaccaattgagaattcgggaagaggatattcccaagacggccttcaccactcggtatgggttgtatgagtgcacggttatgtcttttggacttaccaatgcaccagccttcttcatgaacctgatgaacaaagtgttcatggaatttctggataagtttgttctggtatttattgatgacattctaatctattccaagtcagaagaagagcatgagcatcatcttcgtctggttctcgagaagttgcaggagcaccagctttatgccaagttcagcaaatgcgacttttggttatcagaggtcaaattcttgggtcacgtcattacagctcagggtgtggcagtcgatccatcgaatgtggagtcagttaccaagtggaccccacctaagaccgtgtcacagattcggagttttcttggacttgcaggttattaccgtcggttcattgaaaatttctctagaattgccagacctatgactcagttgcttaagaaagacgagaaattcaagtggacagccgagtgtgacaagagttttgaggaactcaagaagaaattagtgtctgctccagttctgattctgcccgatcagacgaaagacttccaagtctattgcgacgcgtcccgtcacgggcttggatgcgttctaatgcaagagggcagggtggtcgctttgcctcacggcagttgcgtccgcatgaaggaaactatccaacacatgacttggaattggcagcggtggttcatgctttgaaaatctggaggcattacctgattggcaaccgctgcgaagtatatacggatcacaagagtttgaaatatatcttcacccaacctgacctgaatctccgacagcgaacatggttggagttaatcaaagattatgacatgagtattcactaccatccgggcaaagccaatgtggtggcagatgcattaagtaggaagagctactgcaatgctttgtgcaccgagggcatgtgtaaggaattgcagcaggagcttgaacatctccacttgggaatcgtagaacacgggtatgtggttgctctagaggcacggcctacgctcgtggatcaagtcagagcagctcaagtaaatgatcctgagatagctgaactgaaaaagaatataagggtcggaaaagcccgggatttccttgaggatgaacgtggcacaatctggctgggagaaagattgtgcgtacctgatgataaagagctgaaagatctgatactcaccgaggctcatcagactcagtacttcattcatccaggcagtaccaagatgtaccaagatctcaaagaaaaattttggtgggcctgcatgagaagggaaatagctgaattcgttgcactctgcgatgtttgtcagtgagttaaagcagaacacctgaggcctgcaggcttgttacaacctcttcagatcccggaatggaaatgggaagagattggaatggatttcataacaggtctgcccaggacatcatcgggccacgattcaatctgggtagtcgtggatcgacttaccaaagttgctcatttcattctagtgcatactacttatacgggcaaaaggttggcagagctctatctctcaagaatcatgtgtttgcatggagtacccaaaaagatagtatctgatcgagggagtcagttcacctcaaaattttggcagaagttgcaagaagaattgggtacccgtttgaatttcacacagcttaccatccgcagacagatggctagaccgagagggtcaatcagatcttggaggatatgttgcgagcctatgcgcttgattttgaaggagcttgggataaaagtctgccttatgctgaattctcttacaacaacaactattaggccagtctacaaatggcaccgttcgaagcgttgtatggccggaagtgccgcacacctctcttctgggatcaaacaggcgaacgtcaactgttcggaatagaagtgctatcggaagcagaggagaaagtcagaaccgtcagagagaggctgagaattgcacaatctcgacagaagagctacgcagacaaccgccgaagggagctcacttttgaagcaggggattatgtgtaccttcgtgttactccgctcaggggagtacaccgtttccagacgaaaggcaagttggcaccacgcttcgtgggaccatacaaaatcttggaacgaagaggagaagttgcctatcagttagaacttccatccaacatgatcggtatccatgacgtgttccatgtgtcccagtgaaagaagtgcttgagggtacccgaagaacaagctgattcataccacattgacattcgagaggacttgacttatgtggaaaagccagttcgcatccttgagaccagtgaaaggaggactagaaacaaagtcagtaggttctgcagggttcagtggaaccaccactcagaggaagaagcaacctgggaaagggaagatgagttgaagaacgcccatccgcacctcttagccagctcttccgaatctcggggtcgagtttccgtttaaggggggtaggtttgtcacaccctgaagttcttttccccaagcctaaattgaatttataattggtctcgagaaaataccggtgtaaaagcaagagtgaaaccctaataaattaatgcagataataatcggaattggcatgtggaatttttcttgagatctacatgtcgaaatgtgctaacaagatttttagtggaatttccagagctctagaaataattttaaccaattaaaattgagcacaagcaatgtttaatccctggaaattcatttctttctttttctttttctttttcttttttcccccttttcttttcgaatgcgctgccggcccattcttctccccctccccctccccgctgggccagccgaaggccaaggcccagcagccggccacctcctccctcctcccttcgggtcgtcgacaggtggggcccacctgtcgtgcccgtctcccacctccagccggccccgccacatcccgcaaccgccgccccgctcgctcccgcgtctcccgggccacgtcgcctacctcgccacccgcgcccgctttccccgcacccactccctctctctccctcccgcgcccgcactcgagacggccgggattcaatttttgaatcctgcctctctctcctccccacctctccccactccgccggcgaaatcgcggtcaccccggccacgatcgaccctcgtgagtctatgtcacatcctgattttcgtcttacgatttataaattttttaataaatcattattagaatttatattaaatgttcatcaatttacaagtgaagttaaatgtgggaaataaaatttcctaaatataaagcatggatggatttaatttttattaaattctccatggttaattgtactctctggaattttctcggatttttcggagctcaattcctaattttaatcatacaaagaacatttcagtaattatccacatattaaattaatcattaaatggtctgattataatttttttaagtactttgagtgtccaagtattttcaggatttttcttgaaattatttgagcattggaagtatttttaacaattcaaagatcatttcagtgattattttaattgaaaaagttttaaaaaccctccccttggccgttgagccgtttcctgcccaactcctctctcctcgcgcgcgtgctgtgcggcccacgctggcccagtccaagccgccggcctcccccctctcagccagccaaaagtctactttacttccccgaatactgttcatcttcaagcttggacagaagcccgagctgccgtcctgtgccctgtgcagccgccggtttctccaccaaatccgccgcatcccgagctccgtttgcaaaattagttgaggggaaatattcctcttatcctcctctatcctttcccccaagaatcggactttatcccgaagaaatcaacgcggaatcgaattcgttttcgagtttatctctccaactaaccctctgtttttccggctcaaatcctctcggttggagtccgatctcttcaatccaagcctataaatagcatcccctagtcgccctatttcttttgcgccatctcccgagctctctcgtgcctcgtagtgccgccgccgcgccacccaaaccgccgccgtcgccggccggcgaacagccgcctcgcgccgccgcttgcatcgtcgccgccgcctcacgtcaccgccgttaggtgcgcacggtggagtagaagctcggccgccccactccccgccgtcgccggtcggcggagacccgccgccgccgtcgaccgaatcgccgccgccgcacaggctcgccgccggccgtcgttcgtcgtcgtccgtcgttgttctttgcaccggtgagttcgcgtcgtcgtcctctacgcgtaggtgccctccaaaagtccggccgagtctcctagcgccggcgaggtcgtcgcctatgtcgagccgacgttgatgatgtcatcatgacgtcatattccttttttttcggttttcttttcagatgaaaatcgattaaacttcggaaattcataactaaatcatcataactcggattcaagtggttcaagttgctaaattcatctaaaataagatctacatgttaaaaatatccacatgtactgtttatacttgttttttactgttttcttgattttgttctttcgctttagtttccgacgttccggaggagagggttttcgttgaggaaggttcagaagcatttgatgaagttcaaggcaagtcacacagatcccaaacgaccctttgagcatgttgaacccgtttaaagctaatgttttatttcaacttatgcattattttcgaatgtcagcgggtggtgagcctttcccaattaattaatggccgaagatgactttattttcctatgggttataatttgattagctagaaccttatatattggtttggttcagctaaatgctatatatatataattgcttagccatgtttagaaacattagctcactaatgggatgaatcatatatactacattattatttatggttatatttaatggtagctcacgatggttaatcgtgttatgataattaattgataattaaaacttgattaaaggtgggttgtgagcaaatggttttgaaagtcgtgctcatggcaattaaggaccggttcgcgagctactgttgtgagacattaaccgtgccaaccacaagccagtgtgggcaacggctttaccttttgtatagcatgattcattgcggggtgccagactgagaagcggtgagaagtccgtgggggtcgctggggagtccatgcctctggtttttgagggggtgattatgatccaggaatggtgcactgtggtgagttgtgttgtgcgaagggtactgtcacgatttccccctttgcagtgccgtggtggtacttcggggcatggcaacatgtgtggaatcgtgtcttgtgggtacagtggtacacctctggccagagtaaaactattcgaatagccgtgcccgcggttatgggcgggttgagcaatgtttttcgtaattagtctcacacctctcacaaataattattgatgcaataactggtaataatttatttagctcctggtttggagttagatctgtacagccgggtatggttgttcaggatggttgggcctgagcagcatgggtgtgctgttcagtgttgattaaaatttctgattaattactctactgttttactactcttaactctttgctaaatgctgcttttgcaaatgagcctatattatgccatcctttggtatccttgtgcacttgcatatttgctgtgtggcttgttgagtatgtcatatgctcaccttgcaataatcatcaaacctcagttgaagagaaaggatccagaaggagaagacgtttggcttataccccagttgagctgcctgtgggagtggagctgaagccatcgctagaccgttaattccgcagctgtttttcttttcttttgtaagtatgtaacgttattattatgatggatttgtatattaaattgtcagtttgtgtacctcggctgattcctggacgaggattttatgcacaaattagttcggaaattacttgtgaatttccgggcgtgacagtctatataaagcacccctgttccctcctctctcttttttgttttgcaatcgcccgctcccgtgcactccaccgccctagcgccgtcgccctcctttccgccgccgccgccaccactccggccgccgctagccgtcgctagccgctgcgcccagccgcgccgtcgacgccgtcgcattcgccgtcgtgcgggccaccccgtccacccctttcccgtcggattccgccgccggaacccactccgcactgtgcgccggtgagccccgccatggccgccgccttcggccggcgtcctcgccctcttccatctccctctctctctctctctaacccctttcatcgtgttcgctaagtggttccggagctcgtcccgttgctttcatcgcagggactaaggatgccaactgagctagaaaagccatctaacttgacatttatgttttctaggaccttgtcattggccgcaagctttttgcttagcgcatcggtggttttagcttgcgcaaaaacaagatccttcaaggagggctggttagaaaaattatcgttgttgttaccttcttgataatatgggcgtggttggttccacccctgacctccttatggatgatacccgttgttgttgttgcccatgtacatcgcctcctcacgggtttccgggcagtcattcccagaatgacccgtgttgccgcagacctcacatgtggcgtgagtgtccaaggccttgagggtgccttgtggccgtttctcatggtcgtccaatcgtttcatgaggaggtccagcttagcagcaagtagcatgcctcgctgacgggtctggagtcgttcctccctccaacccatattggagaccatcttctctattagatcaacggctccttgaaccgttttagagaagaacgctcctccagctgccgcgtccaggtgatcgtgggacatcggggtgagtccataataaaagttttgcaggatcagccagtcgtccatcccaagatgaggacatgcagctacgtactcctgcagtcgttcccatgcttccggaatagactcatcccttgtttgctggaaacttgaaatccttccacgaagggcattggttttgcccatcgggaagaatttcgagaggaatgccgtagagcattttgtcccaggtattgacagcagcaaggttggcatagaaccactgcttcgctctctgaagaacagagaacggaaatagtcgtagcctgacggcgtcgggactgacgcccttgatggtgtatgtgctacagatctccaggaactattgcagatgagcattggcatcctcatcaggcttgccacagaatgggctagcctgcgccatcgttatgaggctggacttcaagttgaaatccacttttgttgtttgtatctttttgatgtgctattcttttctaattaatagatcgttcttgatatcatgttgtcgaaaaagtttatgatttatgcactgagttgaaattgctagatgatattgaaattgatatcacatatatccagagaaattttcatcatatatagatatctattgatttttaagatattatattaagggcccctactttttgtttcgccctaggccatcgaaaactcaggaccagcccagatgatggctgtgacgatgacgacgtggtggcggaactcaacatcctggttgcacagagtggagcagcagggggggcatgatgtctcaacctatgggaacaccacatgatgaacggagaggaggaaatgatgaaagacttttatggtgtgcaactgcttaccaaccgtagcaaagaagaggcggcacaactttccgatgtaagtagcaaagaggagacggtagtagcaggaagatgatggtgctggaaacagaacgatgatggtgctggactgatcctcccatgcagccgctcgttctcgcgttgacggtttgatatatctccatgccaacagcacgatggccgtggctgggatttcgaaaaacagatcaaacccatcaatttgatttgatttttggtattgatcaatggaaatagatgaggagcggaagagacgagcagggaattgagggaagcatcatgaccttcatagcgaagcagaaacatcgtgcttgaagatgaagcagtagccaacatggtgactttggctgcacatggcactacatgcacgcacacggtgtggctgcgctggttaaacaaagaggaaaggaggaggggtgctgcagctatatatagagaagaataggagctaagcagccaggagaattggcttttacaaaaatggctcatgctcatgaaggtgatttaatttttggtgttaaataatgagattggtgagggagagggagagatttattagtgggaggacgaactcgaggagacagctcagatttttggaagatcagaaatgtggctgagggaggacgaagatggagagttgagagaagagactgggaattggaaaaacagatttgtctcatcatggtgattcaattggagataatgcagtgtaatattatttggttcttggtctgctttagtttcttggttgatgatcaacagatgattaaattcatggtggatggaaactgcaatcaactggagattaaatggctagcatttgcatttgatcaggagatctaaaggctgtgcatggtgaggtggataggaagaaggtggaaaactgatttggttcatgatggtgattcaatttttgtcattcaagtggagaaattaattagggaggagaagagattgcagagatagaatgacagggagagagatagagagagagagagaggcatcggcctggaggaaaaaggaaaaaggaaaagaaaaggaaggaatagaaaaggtggggatttttctggacttgggatttttttttttttgggatttatgggaaataatgaaatcgagttccacttcaaaaattcaaataaaaaccaagtaactctaattaacaaacgataaaataaaacggcggcgtaattaatttatttagtcacattaattttttttcatttataaaattttcattaagctattttaggcgaacaaacacgaatgtgattgattttttttaaaaattaagcaaattagaagacacaaaaaacgggacgtgacaccactccccttcttctccaccaggactatacaagaaacccactccgcataacgacatggcccaataaaccccgccttcaacaaccgatcaatctcctctttgactcggtcatatagcaaaggattaaaacgacgaggtggttgtttataaggcctaaaacccggtttaattggaagccgatgctcaacaagctcacggctaagacccggcatctcatggtactcccatgcaaagcaatcaacatactctgtaagtagctcgattatattaaccttataatcggctctcatatttttgtttacaaaagtcggccttggtttggttccatcaactatgtctacttcctccaatggatcggccgatgtaaacccttgtccaagcttctccacttcatcaaaatcttcaatagtttcaccaatatcgttctttgtagaccgatattcttgcaccctcttttgtaaccactctaaattagcctctttactcattatacaaatttatatggcttagctgtgctacactagccggctttatagagataggtacaaattttccatcagagatactaataaaatcatagttagaaagatccctccccgataagcattgaatattcccatgacgccactcaaaagtagcatcggccattgcaacctcggccgatgtatccgcttgaacaatttcaacatcatcgccgtcctattgaattaaacattgatgcaaggtagaaggcacacaacaattggcatggatccaacaacgacccaaaataacattgtagttaccttgcacatcgacgatgaagaaagcggttggtaacgtcttgttccccacggtaagctccgccgaaaagatacccttcgcctccgttggttcaccattgaagccattgagaatcatgttagtcttcttcaactcatcatcttcacgccccaacttcttgaacaacgagtatggcatcaaattcacagcggcacctccatccacaagcatcctagataccggctttccatcagtatgacatttgagatagagaggcttcatatgacggtttgattcatcgggcttctcaaaaaccacatctttaggacctagtgaaaattgagcaacctcggcttcatccatagcacaaaactccataggcaacatacataccttgttgatatccatgtcttcttttggagatgactcatctttagcaatcgattgttcttccttcttctctacaacaaccggttcttccttctctatggttttacgcctccataccggtggtggtcgcaactcattgaaccttttatccctttgctcttcagcctttttctctcttatttcttgggcccgaagacattgcaaccttctcctttgagtagccgttaaatacttaggcatcctcctaggtttcggctctgttccaggaggtaaataatgccccctattaggtctagttgatgacgatgaagccctcacatcgccctttgcaaacctcctatcaaaccggcgctggagcctggtcagaccggacgtagaccaccggtcagaccagccagatgcgctggtcagatcaatattcgatgggcggtcaaaccggcctgaggcgtcggtcggaccattgtcgggtcggcggtcagaccggcctgatggcccggtcagaccagccgtatggctgcggccgactgcgatgagctggtaccggcttcggattttttgcttgaggactctccaactttatctctagaaggtattggcacatcatgagaccctactttgatggtaattacctctgaagtccttgcctccactttaatgtgctttccttctcacctttcctcattggcccggttcttaccataaaaccggccgttgtttggtgaagacaaacgctcatgaattggcctccttggtcctccccacccttgattgaattgcattggaggcatatgattgaacattggcggcgttgccccccatggcatgtaataaggataaggataacccggcggcggcattggatagggaccccatggtatgtcttgtgaatgatgatatggaggtgaatgcgaccgtcttggcgagtgaccaaatcgctccctaggaggtgatctctgtattttccccttgttgcgagctctctcactaccttgcttttcatatttctccaaaagcatatcaagggtcactttggtcttcctaggagctttagaagttgaagcttcacttttattctctttacaaacacaaacctctgggttctttggcactattatctttggccttggttcaccaatgattactccttttcctttagtagattcggcttgctccggccgaatcaacaccttcttgtcattgaaattaattgtattcaccggaaaaggatcatgatcaagcttcatcttggagccatcggtgaacttcaatcgtccttcatctatggccaattgaacctgtcgtcgaaacacattgcaatcattagtggaatgagaatgagaatcatgccatttacaataagctcgacgtttcaattcttcttgagatggtatgatatggcctttaggtaatctaatttgtttttcttgtaaaagataatcaaaaatcttatcatacttggccacatcaaaactatatttaacctcactttgccgatctttgcgaggagtcggcattaggttagaacaaacaaaaggcttgtttttgttagtccatgaccattcagcaacatacatatcatgatcaccctcatcttcactatcactagcctcagggtaatcaatcacattaacattaggctttttctcatatggtctaacaatttttttattatccttaacccggctttcctgagccagagccctttgcataagttgactaacatcaagaaattgttggccatctagtctttctctaagaggggcaattaaaccattaaaagcaagaccagccaaatatctatcagttatattcaagctataacatcggtttcaatcatccctaaatctcttaatataatcaatgacaggctcattatattttttgcttaaccgatgttaaatcacgtaacctaagctcagtttctcaagtatagaaataatcatgaaatctttcttctaattgagcccaagtatgaatagaatttgccggtaaagaagtaaaccatgtaaaagcggtactggacaaagataaagaaaacaagcgcaatttaaaagtatcactattagcctcaccacattgcgctaaaaattgacctacatgctcccatgtggtcctaccatcttcaccactaaacttggtaaatttgggaactctataattacgaggaaacggcatattatcataatagtcaggatacggcttttggtaaaccttagcaagattcctagtttcaatcccgaatttatccctaataatcccaccaattatttcctccatattatcaggcctatgttgatttggtggtggatttggtggcctaataggttgtgtttgcggcgcaatatggttatattggacttgcctagtatcgggaggataccccctaccaacatcattataagcattaggaacatgtgggggaacttggggattagttgcagcactagatacaggaggatcaaatgttctaagatgatacaaataactagcattagtcattggatctatcccctgaattggtattattgcgccggtctgaccggtccagggcccggtctgatcgacatccagaggcgcgatcagactggcctaagtcccggtctgaccgccggggtaatacccggtcggaccggccgtttggcctgtcggaccgacagtgaagtcgcggtctgaccggccatcaggcccggtcggaccggctgtgtgcgccactccatcggttctactatttgtttgatctataggggcttggctagcagtggtagaggctttatttttacccacaaaatcggccaagagagggccgactttaaatcttaaaaactcatcaaatttatcctcaaaagttgcatctaattatctttaaaaacagtcatagatgaatctattgtagatgctacttgttgttggatagattgtgttacctcttcattgcttaccaaattgggagcgagcttaggacgtggccagggcttgatgatcacaccttgacgagtcctagtagacgccctcatcaacgcctcttgtgtgagctccttgatgtactcctccatggacttgcggtcttctccttcgaaatcattcaatgtgattggtatcacaatggccggctccacctccgccttggatgatggcggttccgtcatggcgaaatcgaagttgagttgacgttgaacggatctccccagtggagttgccaaaatcgtgttagcaactttttgtgacaagttgacaacaacgatcgcagcaccttatgccttgcggtgatcctagagtcgccaaccacctcgatctagcaaagagctaaacctagatggattttgacaaataaaccggctaatggagccgatttaagataacaacccgtctcatgggcaaaacggaaggttttcaggacaaacctacaaagagatgtcgcactctcgcagcggcggcggacggtttacggcgcaaaccgacaaagatggacaaactaagggaaaactaaaagcaatacgaaaaacgattcgattgattgattgtagattgtttttttacaatagaaccggccatgtcccttatataggggttggtcttgccctctacgggccctcctccacatccaactcggggtagaaactaaaggaaacccgaaacatgccttcccgagcaaggaaatctcgaaacccgacgaaacacaatcggactcggacctgtcagtcggaccggccacacaccgccggtccgaccggccgtcaaccggcggtctgaccgcccaacacacggcggtcagaccggcccactcgaaggaaaccggtagacttccaaattttggcaatctttcctattttaatcctaggtgccaaatttgggtgtaaacaattcctatacttgaatccgataagacatcgttgaaaaatagtttttcaatgaaggacttaggggaagcagcatatattctgggcataaggatctatagagatagatcaaagaggctaattggattaagccagagtacatacattgacaaggtgttgaagaggttcaacatgcaagattctaagaaaggtttcttaccgatgtcacatgccattaatcttgccaagaatcagtgtcctcaaacgactgatgagcgaaacaaaatgagtgtgattccatatgcctcggcaatctgatccattatgtatgctatgctatatacacgtctagatgtttcatatgcacttaatgcaacaagccgataccaatcagatcctggtgagagtcactggatagctgtaaataatatcctgaagtacttgagacgaactaaggatatgttcctagtctatggaggacaggaagagctcgttgtaaatggttacactgacgcaagcttccaaaccgacaaagatgattttagatcgcagtctggatttgtgttctgcctgaatggaggcgctgtgagtttgatgtgaccatggctactatggatatgaccattgctcacatcatgaatcaacaagaagacatcaagatcaagtcctccatgtgctgcaatctaattcggccacgtgttacattgctgatttcaaacggccgccaaatctacatacgtgctccgttttgggcccgtgagtacttgatggaaagctctcgaagtcctccttccaacggatccagcctcatctcggaattctatctcgtttggccgcaatcacagaagcaaggtgctgcgtcacctgtattgggccaatgggcttgtaactttgtttgggaccctggcccatgtggggtcctacatttgctaatttgattctaagttgttgtgagatatgagatagtaactaagagttgctataatcctagtctaagttcgacttaaattccggatgttttatttttcaaaataataacttatggagttcctcatttgatataaattcctaccagagccaaaaatattccatattgattaaaccatatatattttggttacttataattccattgaactttgtcaaattcttgtgacttgtgaacatacttctcatgatctatgatcaagatcatacatccacatatatgcacatgctaaactcctacactgcgagctagcaattatccattccatttccatactaccaccaaaaataaattcgccatgcttttatgcgctttcttctcctaaaaagaaaatcctttctgaaaaaaaaagagagaaaagaaggaggaaaaggcggttatgaaaataaagttatgctctctcaagaatgagcatgatattgaaaaaaaaagagagagaataatgtagccatgccctctccttatttataaaagaaggattttaggagtaagcacaaaggagaagcgttttttctttattttacacatttcatttccaccatatatcacacacacacacacactttgcacgatcttgatcttgagtatatttagtcatctattttagtctatgtttttgacttagtaataaatgtgaatgcaagtatgccatgtttgatccctaccaaactacacatatcaaccttagagtaggaatcaaaaaggcaaaatggtgaggaattcattttgatacacttggagagaccgagtgaatcatttgaggaacttggatttcttttacaaaaatcatttgaaaacttccagaataaaagttgaatgaagattgggtgattagtactctaattgttgttctgtctttcaaccgcttaaggcaagaagagacaatgtctcgtgggaatcaggggtaagggtaagccatcgtgccaaagattatttgatttaagagagagtacatatgccttgaacctatacatttgagatatacagcatagtagcaactcatgatcaacagccaagtctttgtttcctttcatcctttactcgtgacgagcaaaggttcaagcttagggggttttgttgacggtcgttagcgatcagtttcgaccgtcaatactaccaaaataaaggagaactagttatgcttacaatgcatatttgtattagaataataagtattccactagtactgggattgctaacctcttgcagagaatgaacataagagcatccctagcagctcatctatatttcatcccccaaatgcccatatggattacttcaccaagtgggccgaagctgtgccgttgaagaatatgactcatacggaggtaattgactttattttgaatcatattatccatagattcggtattccacaaacgttaactacggatcaaggtgcttcttttatatctaaggaagtgaggaattttgccgaatcttatggtattaaattgttgagttcttctccttactacgctcaggctaatggacatgccgagtcaagtaataagacattgttgaaactagtaaaaaagaagattaaggaacacccaaagaggtggcatgaagtgctttccgaagcattgtgggcgcatagaatatctaaacatggtgccactaaagtcactccttttgagttggtttatggtcaagaagccgttttaccggttgaagtaaatcttggttctcttcgttatatcaagcaagatgatttgtcaagtgaagattacaagacgttgatgggagacaaccttgatgaagtcattgacaagcgcttgaaggctttggaggagatagagaaagagaagaagagggtggccaaggcgtacaacaagagggtgaaagcaaagttgtttcaagttggagacttggtttggaagacaattttgcctttgggtactcgatccaaggagttcggtaagtggtcccctagctgggagggtcctaatcgagtatgtggcattgttcgatgaaacgcatattttttggagacacttcaaggggagcgttttcagcgagcaatcaacggaaaatacttgaagaaatacttcccgagtgtttggcatgacgcataggaggtactatggccggtaattggattatcgtactaagaccaaaacatgttctatgattttagattcacgttgttcatcaaaaaggcaggggggcatgtgtttacaaccaaatttggcacctaggattaaaataggaaagattgccaaaatttggaagtcttccggtttccttcgagtgggccggtctgaccgctgtgtgttgggcagtcagaccgccggttgagggccggtcggaccggcggtgtgtggccggtctgaccggcaggtctgagtccgactatgtttcgtcgggtttcgaggtttccttactctggaaggcatgtttcaagtttcctttagtttctaccccgagttagacgtggaggagggcctgtagagggcaagaccgacccctatataagggacatggccggttctattgtaagaaaacaatctacaatcaatcaatcgaatcgtttttcatattgcttttagttttcccttagtttgtccatctttgtcggtttgcgccgtaagccgtccgccgccgctgcgagagtgcgacatctcttcgtagatttgtcctgaaaaccttccgttttgcccacgagacgagtagttatcttaaatcggctccactagccggtttatttatcaaaacccatttagatttagctctttgctatatcgaggaggttggcgactctaggatcaccgcaaggcataaggtgctgcgatcgttgttgtcaacttgtcacaaaaagttgctaacagaaacttttggggatttcttggggatattgtagaggatcccattcccgcaactaatttggaaagaggagcaacgaggaggtcggattttggaaggggatcggcatcatcgggctctgctacagcgtgcactggcgggagacggctggagcttgaagtagtactatagcgagggggaggcaaaacagacatttctgcgggctgagagaaagggatagaatgggctgaattcggcccaagactaggaaggaagattttattgcttttccaaataaattaaccaatgagatgatctttcaatcgttaaaaatacttccaatgctcaaataattccaagaaaaatcttgaacatacttggacactctaagtatttaaaaatattaaaaccagaccattaaatgattaattttaatatgtgaataattattgaaatgttctttgtattattaaaattaggaattgagctccgaaaaatccgagaaaatttcagagagtataattaatcatggagaatttaataaaaattaaatccatacatgctttatatttaggaaattttatttcccacatttaacttcacttataaattagtgaacatttaatataatttctattaataatttattaaataatttataaatcctgaaacgaaaattcaggctgtgacactagttggcaccccgcgccttgccgcgggatttgctagttttatcatcaaataaaattaatattttaaatgattagatgcaactctgtatatatacaaaataaatggtaatctggcttcatagatagcctctgctattaaaatacaattaatgttttattttttataaatataattgtgtattgttatgatatacgaaagttatttttatgcacaatttggatatctgttaacgacgaaatttggtaagcccaaagtcatcatcgacttagagtcagtatcggtttcagagttatggaatcagccgataggagtcgtcaaatcgctagcacccgtgttttcgatggagtcggatcaactaaaggaaatttatccagaagagtccgacttcaagaaggatgtggcatggtagtttaactattaattaggaatagtttgttagttttcttttatctttaggaaagtgtgtttagtgttcgataaggagtttatgttttccttttatctttaggaaagtttctttcttgtctgacaaggacttgtatcaaccaatgggtataaatatgtacacccggggtctatgtaatcatctccacgatcaatacaattcggcgcatcgccaccttttaccttttctactttattttatcgtccggcgggacttggcacttgacgcggggctgcatcggtgctcgatctccggctaaggggtaagtccaatgatctgccggcctaggcaattgtatcgtttacgttggtgtcgttcaaggctgcatcagtacattcgacctattggattactcttgtttggatggtatatttgcctacctatttatcatatgtctatgttaatctagtcttagcatatcaatttagctctatcggctgcttctcgttttagggtttctgctggtatcggctaaatcgcgttgctagattatattagcttagacatctaccaccctgaaaactcagtcaacggcttgattgtctagatattatgtttcttttcatacttagtgctacatcagttaagtttgatccactaagtcatgcttagaaccataatctctagcctgcttcttgattgacaataagggtttcatcggggtttcaaccgaggagttatctggacgttgcatcggcttacaaggattgcatacgaattggatttagccgatagcgacaaaggtttcattgatttatctaatcgtttggattttatgacatcggacctgcagccaatgtatgctttaaccttcggatcagtgcttattctatcatattgttagccgattggtttatactggattatattgctatattatattatcagccgattgccttcatatcattatatacattggacatatagccgatagctcaaaaccctattgctatcggctggcattgtcatcggttagaactacaacatcggcttgtcagccgatcggctgtttgatctactgtttacatatcttgtcagttgcaggatcaaactgactggcacgcccgcatctcaccaacctttggacctgcactggagctaagcagatctcccaggccaatgtgtgtttttggcatcaacaatatcatcaaattagggtagtttgcacctctttgcttttact

SEQ ID NO: 29141 - DNA, 708 bp, Oryza sativa
catagggattccgtccctcatcggagtcgcggtcatcctctatgtcggcttccgtccaagtagggcggaggaacagtctatatgtcctatgcagccaacgaagatactctgagaaaagatgattttggtgtatagtctcgatgtacctgtagttccttccggctgtcctccattcatcaatgtatctattatgctctagcccccagtctttcaccttctttgttctcaccctgtcatacctagacaagtagaaggtgatgaaacaatagtgagcatcaacaagggttaaatggtacaaaattgaacattgacaatgaaagcaaacaaagataagaaatatttacttgtgtaattcaactccagttgagatgtcctcaaccggccagtcttgtttcttcccgaactgtccatgacacggtgcggaaggtggtactcaactgcccagaaacaaatcaatgggcactggtacattaaatagtcaaagtctcgattgcacatcgagttcagggtcaggcttgaagcctcatttgtgtggtatggtaaccattcaatctgcaaaagttgaagagatgtcgttggttagtatctcaattaaagaagtaaatgtctaactagaagtgatattggaagtacttacatgttgagactgtaagcagtccatctcattgacataatgcttgtatgccacatcccggtgagcatgtgcag

SEQ ID NO: 29142 - DNA, 3069 bp, Oryza sativa
caatttttttataaaaaaagaaatctctaaatgctatacatctgggagaacctatggcaatgagcatagtgtttatattaggttccaatgttgtgattgcaatgtcccatttttcgaactttcttctagagttcacctacaaaaaaagatctgatcagtacttcaatcccagctgatgagttcttttagatggaatggatgcaggttctgtagaacatcataaacatggcaagattagggtctctcaaaatttcatcaccaacagtggcattagagcacctggtaaattggtataatagttaggttgctccattgcattaataaaaaaatgaaaatcactgtcaatgttgatgtgcaacaattcatggtgtataggggaaaaaacgagattaactattcctcatggcaaccttaaaagaacaactcacacaaacctgcacatcctttgtaagctcctgtgccaagagtttagtagtcaccgtcgccaccgccgtctctggtgccatgagttgctcgctgctggtcattggccttgtacattgacggcaacgcggctgccgatgaagcgactacctgtgacccagagggcacagatgggagggaaggggaaggcattggtgcggcgtacggtggatgcccctgctgctgctggtgtgaagtggcttcttaacgcagtctgttggcgacggcgacagtgagggcgacgccgacgaccatggcgacgccgatgagtggtgggctggggtgtccttgtggagatgagaagcagatctggcgccggaaggacgaagaccgcgcccgcctcaacccccactccctccgccgtctccccctcgagttgatgcgtccggaacctcgcggcagtcccgccgccaggattgggccctcagcttttcgcgccgcctgtgatgcagccgtcggcgctccgacctcgtcgttgacggatgccggaggcggagacggctgcactcggtgacggcggtcggagacggcgacgcaatggcgccagcggcgcagggcgacggggacgatgatggcgacgacgcgagggggatgcggaagcagaggcgcttggagacggtgacgcgacgacagcggctgcgtaggcggaggcaatggcgcgaggggaaggcggaggcgagggtgggggagcagacggcggagggagagggaaagggagaaggagagagtgggggaagagagggcggaggggagacggacggcggcagctcggccggcgatggggacggcgggaggcgaaggtggcagcgcgatgggtaggcgccggcgggggtgaaggcggcggcgcgaggcgacggggacggcgtgagggggaggcggaggcggcagtgcttggtagcggcgcgagagagggagagcaagcggctagggtttgaggggtctgcgctagtgggagtattttttcgaaaaagcccctcgtcttccacatatcacaacgaagcccctgtccgcgattttttctcttcaaacacaggacgcgaggggcctatacctgattacgaagaaccggagggctttttcgcaaaaatccaacctcgcactgtagctactgtagcaaaatccgacgtggacacgcccagcgtccgccccttccgccacacttaatagtttctaatgaaccatggcatatagaataatcaattcattatcagagacatggcaatccatttgtacataagcctaagagttagattatggatgtcattggttctgggtttcttataaatcggtgcaccagaaatatcttcacagaatatgtttttctcaaaaccggaagttgccttccaaaaatcgactctacaggattcggggaaaccgagaagtgtgctcaatccactacataaaagattaaactctttacggaaaagtcaaaaagtaacaccaccctctgcttctctaagtgtgcagagaaactgtatagttagtagacaagagcctaagtgtgcacagaaactgtatagttagtagacaagagccaagctcgtctaccgttgcaaaggcgtgccaacccatggttctccaaatgacactaaaatctacatccatacttgttttccggagtagctttggatcgtacgctcggttgtgagcgaatgatcggtccttcagcatctggtaggcttgtttctctcgtctgtcaacgatatcgaggtcgttgtcggtcaggagctgtggtacagcgtcagtgttctccattgacacgtcggcagatgcccgatcgctcgactggttggatcgggagccggatcccttgagcaagtgggagagccgtctcctcatgactgcacaaaggcaagaatacaaagcgaactcgagcaggggttagcacaagacaatatacccgccagttaactttgcaccaaaagcaacttgctaatgcgagaatggaggattttaactatgaggctgttggctgttgttaatgacagactttatgccaccaatacctgcataaatcaaggaaataaaacatccaacatagtgatagggttaaattctgacatattccacgagtgttggtgtatatttgtatgcaggtaataaaccaccaaagttggaccaaaaatagacttgagtgaagaataattcctatccataccaagagtgggccaaaaactaccagaaaacatcttcaaatgggctttccactcacagaaatggatagaggacgcagagaaggagcaacaggccgaagatgggctctgtgagccagacctgggtttggtcgaacccatggttcggccaaccactaccacagccgttcgaactggggcttcgcgtggatggtctagatgagctcctaaatgacggttggagggcagaagtgtcttttcgcgttccataaccatcatacctgttggtgataagccctagaggcaatcatagagatgattgtatcacatactatatttacatatttatccgatattgttccttgaaatagataactcattattggttaatgaatatgtgattctttcatgagactctttatgttgtatgctactattttggatgaagcacaaagaacaactcgcactaaggtaa

SEQ ID NO: 29143 - DNA, 659 bp, Oryza sativa
cctgggcgacggctcgtccaagaccacacgaatcggtggtcttctggacgacaaataggaagacgcgctcgtctccttctgccggcaacgccgacgtcttcgcctggagaccggcagacatgccaggggtccccagggaggtgattgagcaccgtctcgccgtgcggccgggcgcaaggccggtcccgcagaaagtgcggcggcaggccccggaacgtcaagccttcatccgcgaggaggtggcgcgacttctggaggccggattcatccgtgaggtcatccatctggagtggctggcgaacccggtcgttgttcccaaggccaacggcaagcttcggatgtgcatcgactacaccgaccttaacaaggcatgtcctaaggacccttaccccctgccacgcatagatcagattgtcgactccaccgcggggtgcgaccttttgtgttttctagatgcatactctggttatcatcagattcgcatggctagggaggatgaggaaaaaactgcattcattacccccataggaacttattgttatacgacaatgcctttcgggttaaagaatgcaggtcctacttttcagcgtactactcgaatttctttgggtagccagataggaagcaatgttgaggcctatgttgatgacttggttgtg

SEQ ID NO: 29144 - DNA, 3747 bp, Oryza sativa
gggggagatatctctccccccactgaggtaacttgtatcacattgcatatttccctttccaattgcatatttccttttccaaattgcatatttgctttctaattgcatcttacaaaacttgaaaacaacataaaaatttgcaaaatagaaaaataccaaaaagataggataggattgagtcatgctaggtaagacaagctagttctctttgttgaaatgatgaatagttgctctgttttatatctctgatatatgggttcttggtaagtgctctctcaaaggttaaatataagtagccaacaattatccgggaacctgaggtaaatgggctgcacttgctgatctaaatctaagttgttgcgagatatgagatagtaatatgagttgctatgatcctgatactagtttgacttgaattccggatgttttgtttttcaaaatgataaaattgaaagttcctcatttgatataaattcctaccagagccaaaaaatatgctatcatgattaaaccatatacattttggttacttgtcattccaatgaactttgtcaaactcttgtgacttgtgtagttacttctcatgctctatgatcaagatcatacacccacatatatgcacatgctaaactcctacactgggagctaagcaatattccattccatttccatattaccaccaaaataaattctccatgctttcatgtgctttcttcccctaaagagaaaagtccttttgaaaaaaaaaagagaaagaaaaggagggaaaggcatggtcatgaaaaaatataaaaaaaataaagttatgctccatcaagcatgagcatgatgttaaaaaaaaatatgtagctatgctctctcctaatcaataaaagaaggattttgggagaagaaagtaagcacaaaggggaagcatttttcttttatctttcctcatataccatttccaccatatactacacacacattttgcacgatcttgatcttgagtatgtttagttatctgctttagtctaagtttttgacttagtaataaatgtgaatgcaagtatgccatgtttgatccctaccgagctccacataccaaaccttagagtaggaatcaaaaaggcaacatttggtgaggaattcatattgatacacttagacagactgagcgaatcatttgagaaacttggctttctttagcaaaatcattgaaaacttccggaatgagagttaaataaagattgggtgattggtactctaaattgctgttctgtctttcaaccacccaagacaaggagaagcagtgtctcgtgggaatcaggggtaagggtaagccatcgtgccaaagattatttaatccgagagagagtacatataccttgcacctatatctttgagatatgcagcatagtagcaactcatgatcaacaaccaagtctttgtttcctttcgtccttcactcgggacgagcaaaggttcaagcttggggggttttgttgacggtcgttatcgatcagtttcaaccgtcaatattactaaaatagaggagaactagtgatgtttgcaatgcatatatctgttagaataataaacttccactagtattaggtatattaaccttttgcagagaatgacaataaagtggaggagaatcgacatcaacatagatgacaaatcaatcggacgatgtcgagaaccagacttacgtatgaataggccaagaactcagaattgatacgaagaattgggccaaaattgacaagtcagcgaatagaagcaacagaggaggccgcctgccgaaattgggctggattgggccgaccccaggttcggccgaaccctcctcagcgccatccgatccaaggcttcgcctggacggtgtggattagcccccaatgacggttggagggtatttccgaccattccaaccgtcacaaccgtcattgtgaggctatataaggagttgccattctcacttcactcatagacctcaagcaatagctttctcatttctgtcaagtttagtttagtagtatctagctggtggaataggaatagagtagaaatcaagtccggaagccttcggaagagctcttctcttttcttttgtaagcattgtacttttattagaatactcttctttatacatttatggtattgaaacactttccgagtatatgaatgccaattttacattatgttcatgttacactgaatatacggctagcttatttgggagatgctttggtgcgggtataatgtttgcttatgcaattactctatctcatgacgatgatattagagtagtatctggtagtttagacgtggtgtctagattacgggatatcattatttgaggttatatattgcagatgagaggtgggccgctgatggtgacagctcagtacaggtattcctccgcgccggtatataatcctaagttaatttcctggggagggtattcctccgtatttagccccggttgaatggtcatgacgggctgtcgtaaggaactcggcagtcaggggtggcttctcgaagtaccaagagggcatcggatatagggtattagctagtatatcagttaactagaatatatgtatactatgtataatagaagtataggaatagatttcctttctcttttctttccacttagcttagatgagttattatgagaatgagtagttcatgcttgtctgttactctatccttggattatcttaacccctgtttagaatatgattatcacaagtaatatataaattattagtcaagctctctctacatgatcttcccacaggataaaataaatacgatacccttggaatactcttgggtgaaatgctataatggtatatccgtgcgcttgcggatgaactctgtaaacataatataccagaagtatttctgcgccattgttgggaattatatttccagcaatgtcgttaagaaatacccacaataacccttcacccatcctagccatgaacaaaagaaccgacccaaccctgcctacggccggtatcccgagacaggcaggttaggattgagcccctagcaacaggacctagaccgggtgcgccacacacataggggtgagaccacccgcgtactagtccagtgccatggcatctcgactaacggacaccggcccgtgtagccttcatttgcctagacatctcgactgccgagccgtagctcgtgtagctttcatttgcctcagagatatccatcgtcgcaacgacttcatccatctctatccgtgtccttttattcaggactagactgagcaccgagttaagccttatccattacacgtcatctcaatcagggtttagaattataatcataattatactcgagtatcatagaccatttacctgtacatggtaatggaaaaaattgcccttcgtggctatagttgctgtcatgcccagaaattcccgaatagaattctaagcagaatgtgcattaaaacccccatccaggaccagccggggtacacaaacgacaaagttgacatacagatccacgtcttacaaacattataaaagtcttacataaatgcagcggaaaattaaaagataaatggagctaagccttgacttgaactgcagcgggaacgccactccacaggcatcctcgacggcacggacgaagcctactcctcggagaagccaccatctgacatgtactcaaactctggggttttggggaaaatagagtaaggctgagtacacccaccgtactcagcaa

SEQ ID NO: 29145 - DNA, 6113 bp, Oryza sativa
ctcacaacccacctttaatcagcttttaattatcaattaattatcataacaagattaaccatcgtgagctaccattagatataaccataattaataatgtagtatgattcatcccattaatgagctaatgtttctaagcatggctaagcaattatacatatagcatttagctgaaccaaaccaatatataaggttctagctaatcaaattataacccataggaaaaataaagtcattttcggccattaattaattgggaaaggctcaccacccgatgacattcgaaaataatgcataagttgaaataaaacattagctttaaacgggttcaacatgctcaaagggttgtttgggatctgtgtgacttgccttaagcttccgcaaacgcttctgaaccttcctcaacgtaaacgctctcctccggaacgtcggaaactaaagcaaataaacaaaatcaacaaaacagtacaaaaataagcataaacagtatatgtggatatttttaacatgtagatctcgattttagatgaatttagcaacttgaaccactcgaatccgagttacgatgatttagttatgaatttccgaagtttaatcgattttcatctaatacagaaaattattacgaattaaataaaggatttatgacgtcacgatgacgtcatcgccggcctagcactggacgacgctgccaccggtgatagtgagctcggccgggctatccgaggacaccaacacgaagaggacgacgacgcgaactcaccgtgcaaagaacaacgatggacgacgacgaacgacggccggcgacgaggtccgacgacggctcggctcgggtccccgacggcgacggcgctccggtggtctttggcagctgcgaaggggcggacggggtgctcctccaccgtgcgaacccggtggcggcgacggacggcgacggcgacgacgctagcggcggcgccacgcggatggagcggcgtcggcggcggcggcgctagagctactcggcggcggcgctacgggcgacggctcggcttgggacttgaggcaaacggaagaggacgacaaggggatgctttatataggcttggactagagagatcggactccaaatgagaggatttgagctggaaaatccgagggttagtttggagagataaactcgaaaacgaattcgattcggtttatccgggcaaaattaatctccgagactttaggggaaaggaagaggataaggaggagataatttcccctcaactaattttaggaaaacacaagagaggtcggatttggaggggaaaaaccgagcccactcggtctcagttcggctgtcctgaggttgaaaatgaacagtgcaaagggaagcaaattagactttcggatggactgagaacagaacagggaaagaaaagggcagctcgacttgggccggcttgggctgcacagcacgcgcgcgagggagagagatgttgggctgaaatcagcccaacggcttaggagacgattttaaaaacttttccaattaaaataattcgcgaaatgatgtttcatttattaaaaatactttccttgctcaaataattcccagaaaaatctagaaaatagataaacaagcaaagtatttaatgaaattttatctagctcaattttatgttgaaatttttcctaggttattagtgtttaacttgtaagcttttaaaataggcgattttcatagcgtgacactgcgggaggaggtgggtccctgtgtgcaagctgaatgcgtacgggtgtagtcgtcgacttgcggggcgtggtgcggatccggactcctcctggcgctgggagacccttcaactgagcgttctccttcttcaggcgtgctatctcatccttcagagctatgatcctcacaagcttcccatcattcaaggctttggatgccttgtgcaggtcagagtgcatcctgtccattcccctcatcacggcgcacatgtggccgaaggtggtgtcgttctcgccgactgtcgggcggaaggtgctgatatcgttgccacttgctcggcgagggtggaaacggtacgccgtgttgcagaagatgtagctgtggtgatcacgaagcctggccatcattaggtatgctgcctcctgataggcgtgatctgcggtgcctccagatgcctcaaccaccatgttagcgaggctggtgcccaaatagcaatgaacctccagacgaacacggtggggaagctcgccactgagcggcggaacggtcgagtactccggcgcgttggggtagcccaccaccaaggtcatgcgagccaactcagccacaaaatcatccatgccgtctccgcggtggttgggttggtggtcggccatctagagaagacaaaggggtaggatcaatgcatgctcaaatccaatttaaataaagcagtaaaaaaaactcaattaaaatgaacaaatgagagcagaattttgtcaattaaaactcaaatagatcatttttgcatgagagcgaataaataagacggacttacatagcgataaaataatgagaaattagatacatactaataataataataagagcataaatacctagcaacccatattcctgagttaggacctaatgcattcctcccatcaaatcccgactgactgtcgaataaatttcaaataattttactaaaaccctagactgacctaatttgacaaatctcacattaaatgagcgaccaagatttttcccttgaaccacaagaacagatcccaattttcccggaacaaatccaattgcaaagaacacatgcaatgaaaaggattgtcctacggtcaaggttggctctgataccaacttgtcacgcccagaaattcccgaatagaattccaagcagaatgtgcattaaaacccccgtctaggaccggccggggtacacaaacgataaagttgacatacagatcaacgtcttacaaacattataaaagtcttacataaatgcagcggaaaattaaaagataaatggagctaagccttaacttgaactgcagcgggaacaccactccacaggcatcctcgacggcacggacgaagcctactcctcggagaagccaccatctgacacgtactcaaactccggggttttggggaaaatagagtaaggctgagtacaaccaccgtactcagcaagtcataccaaaatagggggtatgatgcagggtataatcaaggtatggctagaaaggttcatttgcataaagcgggcatttaaagacggtagttcaaagcagtaaaacagttgtagtaattaatcagtattaaccaatcactgtccaacgctacaccacgttgcaacaggcccaaccaaccacctgaactacaccagttcattagctaactaggggtgagactaatcacggtgaatctggttgaccgcccgtaaccgcgggcacggctattcgaatagttttactctgatcagaggtgtacaactgtacccacaagacacagccccacgacatgttaccgtgcgctgacatgccaccacgacataccgaaaagaggccgtgacaggacccttcgcataaccccctctagccaagcacaccacacctcaggtttcacccccatccccagcgggcaacgggcagtcccctctcgtgcctaggtgaatccggaaggacagaggccgtcgcagggcccgtcccgctccatcatgcccacccttgcctggatgcgtcatctagaggaaagctacactacaagcccagccgttgcccacaatggcttgtggtaagtacgataagttcttccagggcatcccgcgaaccggtccttaattgctatgggcgcgaccatcaaaaccatgcacccacaacccaccatttaatatattttaattaaccaacaccggagcggtggcattaaccaacattattactagaatctgatatcaactcaataatgtattttccccattgtgtgttagttgaactaagcatggctaagcaatccctagtccaatatctagtcatgttatatccccaagctaacaaaggagcatggtacaaaaatagcatggctgtaacagtaggtaaagatcccatagtaacattataaaacgatgcagtttttaaaggaaaacgatagagcatttgcaatataggatcaacatgttcaagtgacaagcatgacttgcctcgctctgctgctggaggaacctcggcgactatttcaaagtacaccggagcgtgaggagagccggaatctaagcgacatacaaagcaaacaatacaaacatgctataagactactgaaacagagaacaaaatcatttttaatggattctatgcatttttcttgatttactgagacttgaatgggcttaaacggagctcggatgaattagatatgaattttagaagattcactgtgtttttactacaaacagaaaaaatccttaattgatttattgcgcaatatatcccagggctgacgtcaacaaaggggggcggcgccaacatgcgggccccacatggcagtgactcgggtggcggtccgcggtggaccgggtccacggaccgcggaaggaggcagcgcaccacgtggcgctgacgtggcgccgacgtggcgcacacgtggcggccacgtggcacgccacgcgggtggccgaaccgacggccccgatctacccgagggtagatcagatggcggaggggagcgcacgttcggcgcgcacgggcggctcaagccggcccggcggccatggcgcacggcggcgctccgcggggcggcggtggcagacgacggcgaccgacggctagcggcggcggcgcgacagcgcgggcggcgctagcggcggctaagtggctaggcggcggcgcagcggctaagcggtgcgggagagagagagagagagagagagaggaaggggaggaggtgtctcaccgacggcgattgacgacggcgagcgacagatggcgatgccggcgacgggacgagctcctgaaccacctagcgaacacggtgaaaggggttagagagggagaggaagatggaagaggcgaggacgccggccgaaggcggcggccatggcggtggcgcacggcgcggagtgggttccagcggcggaatccgacaggagaggggtggatagggtggcccgcacgacggcgaacgcgatggcgtctacggcgtggctcggtgcagcggctagagacggctagcggcggccagagcggtggcggcggcggcggaaaagagggcgacggtgctagggctatggagggcacgggaacggatggttgcaaaacgaaaaagagaggagggaatggggaacctttatataggcccacaggggtcgatcgtggccggggtgaccgcgatttcgccagcggagtggggagaggtggggaggagagagaggcgggattcaaaaattgaatcccggccgtctcgagcgcgggcgcgggagggagagagagggagtgggcgcggggaatgcgggcatgagcggcgacgtgggcgacgtggcctaggacacgtgggagcgaggggtggcggcggttgcggaatcggcggccgcggctggaggtggaatacgggcccgacaggtgggccccacctgtcggtgaccccgggagagaggaggggctcggccggccggctcagctgggtcgtggccttcggtcggcccagcggggagggggaggaggaagagaatgggccggcggcccattcgaaaaagaataaggggaaaaagaaaaagaaaaaggaggaaatgaattttcttgggattaaatattgcttgtgctcatttttgattggttaaaattatttctagagctatgaaaattccactaaaaatcttgttagcacatttcgacatgtagagctcaagaaaaattccacatgccaattccgattattatttgcattaatttatttagggtttcactcttgcttttacaccggtattttctcgagaccaattataaattcaattttggcttgggagaagaacttcagggtgtgacagttgcctcctgctcaaggacttaacaataagagccactatacagaggtaccacattgctaattaacataatgactaggtcagtccccattctagaaa

SEQ ID NO: 29146 - DNA, 6103 bp, Oryza sativa
ctactgaaacagagaacaaaagcatttttaatggattttatgcatttttcttgatttactgcgacttgaataggcttaaacgaagctcggatgaattagatatgaattttagaagattcactgtgtttttactttaaacagaaaaatccttaattgatttattgcgcaatatatcccagggctgacgtcaacaagggagggacggcgccgacatgcgggccccacatggcagtgactcgggtggcggtccacggtggaccgggtccacggaccggggaaggaggcggcgcaccacgtggcgccgacgtggcgcacacgtggcagccatgtggcacgccacgcgggcggccgaaccgacggccccgatctacccgagggtagatcggatggcggcggggagcacgcggccggcgcgctcgggcggctcaagccggcccggcggccatggcgcacggcggcgctaacgcggggcggcggcggcagacgccggcgaccgatggcggcgtaatgagcgccggcggtgcgacggcgcggacggcgatagtggcggctaagcggctaggtggtggcgcggcggctaagtggcgcgggagagagagagaggaaggggagaggggaggaggtgtctcaccgacggcgattgacgacggcaagcgacggagggcgatgacggcgacaggacaagctccggaaccacctagcgaacacggtgcaaggggttagagatggagaggaaaatggaagagggcgaggacgccggccgaaggcggcggccatggcagtgctcaccggcgcacggcgcggagtgagttccggcggcggaatctgacaggagaggggtggacgaggtggcccgcacgacggcgaacgcgacgacgtctacggcgcggctcggcgcagcggcttgcgacggtagcggcggccggagcggtgtcggcggcggcggaaaagaggacgacggcgctagggcgatggagggcacgtgaacggatggttgcaaaacgaaaaagagagaggagggaacggggaacctttatataggcccacaggggtcgatcgtggccggggtgaccacgattttgccagcggagtggggagaggtggggaggaaaaaaaggtgggattcaaaaattgaatcccggccgtctcgagtgcgggcgcgggagggagagagagggagtgggcgcggggaaggcgggcgcgagcagcgacgtgggcgatgtggcccgggagacgtaggagcgaggggcggcggcactgattggaggtgggagacgggcccgataggtgggccccacctgtcggcgaccccgggagagaggaggggctcgggcggccggcttagctgggccgtggccttcggccggcctagcagggatggggaggaggaagagaatgggccggcggcccattcgaaaaagaaaaagaaaaaggaggaaatgaattttcctgggattaaatattgcttgtgctcatttttaattggttaaaattatttctagagctctgaaaattccactaaaaatcttgttagcacatttcgacatgtagaactcaagaaaaactccacatgccaattccgattattatttgcattaatttatttagggtttcactcttgcttttacaccggtattttctcgagaccaattgtaaattcaattttggcttgggagaagaacttcagggtgtgacaaacctacccccttaaacggaatctcgaccccgagattcggaagagctggtgaagaggtgcggatgggcggccttcaactcatcttccttttcccaggttgcttcttcttctgagtggtggctccactgaaccctgcagaacctggtgaccttgttcctagtcctcctttcactggtctcaaggatgtgaactggcttctccacatatgtcagatcttcttgaatgtcaatgtgttccgaatcggcttgttcttcgggtaccgtcaaacacttctttaactgggacacgtggaatacgtcatggataccgaccatgttggatggaagttctagctgataggcaacttctcctcttcgttcaaaaattttgtatggtcccacgaagcgtggtgccaacttgcctttcatctagaaacggtgtactccccggagcggagtaacacgaaggtacacataatcccctgcttcaaaagtgagctcccttcggcggttgtctgcgtagctcttctgtcgagattgtgcaattctcagcctctctctgatggttctgactttctcctctgcttccgttagcacttctgttccaaacagttgacgtttgcctgtttgatcccagaagagaggtgtgcggcacttccggccatacaacgcttcgaacggtgccatttgcagactagcctggtaattgttgttgtaggagaactccgcataaggcagacttttatcccaagctcctccaaaatcaagcgcacaggctcgcaacatatcctccaaaatctgattgacgctctcggtctggccatctgtcaacggatggtaagctgtgctgaaattcaaacgggtacccaattcttcttgcaacttctgccaaaattttgaggtgaactacctccctcgatcagatactatctttttgggtactccatccaaacacatgattcttgagagatagagctctaccaaccttttgcctgtataagtagcgtgcactggtatgaaatgagcaactttggtgagtcgatccatgactacccaaattgaatcgtggctagatgatgtcctgggcaaacctgtgatgaaatccatcccaatctcttcccatttccattccgggatctgaagaggttgaagcagtcctgcgggcctcttatgttctgctttgactcgctgacaaacatcgcagagtgcgacgaattcagcgatttctcttctcatactggcccaccaaaatttctctttgagatcttggtacatcttggtactacctggatgaatggagtactgagtctggtgagcctcggtgagtatcagatctttcagctctttgtcatcaggtacgcacaatctttctcccaaccagattgtgccatgttcatcttcgtggaaatcccgggcttttccgaccctcatattctttttcagttcagctatctcaggatatttacatgagctgctctgacttgatccacgagcgtaggccgtgcctctagagcagccacaaacccgtgttctacgattcccaagttgagatgtttaagctcctgctgcaattccttacacatgccctcagtgcacaaagcattgcagtagctcttcctgctcaatgcatctgccaccacattggctttgcccggatggtagtgaatgctcatgtcataatctttgattaactccaaccatcttcgctgtcggagattcaggtcaggttgggtgaagatatatttcaaactcttgtgttccgtatatacttcacagcgatcgccaatcaggtaatgcctccagatttttaaggcgtgaaccaccgctgccaattccaggtcatgtgttggatagtttccttcatgcagacgcaactgccgtgaggcataagcgaccactctgccctcattagaatgcatccaagcccatgacgagacgcgtcgcaatagacttggaagtctttcgtctggtcgggcaaattcagaactagagcagacactaatttcttcttgagctcctcaaaacccttgtcacactcggctgtccacttgaatttctcgtctttcttaagcaactgagtcataggtctggcaatcctggaaaaattttcaatgaaccgacggtaataacccgcacgtccaaggaaactccgaatctgtgacactgtcttaggtggggtccacttggtaactgactccacattcgatggatccactgccacaccttgagcagtaatgacgtgacccagaaatttgacttccgacaaccagaagtcacacttactgaacttggcatataactggtgctccttcaacttctcgagtaccagacggagatgttgctcatgttcttcttcggactttgaatagataagtatgtcgtcaatgaacaccatgacaaacttgtcaagaaactccataaacactttgctcatcagattcatgaagaatgcaggtgcattggtaagtccaaaagacataaccgtgcactcatacaacccataccgagtggtgaaagctgtcttgggaatatcctcttcccgaatcctcaactggtggtaacctgatcgtaggtctattttggaaaacaccttggctcctttcagctgatcaaacagatcatcaatccgtggcaaagggtatttgttcttgattgtgacctcattgagtgcgcgataatcgacgcacattctcttcgtcttgtccttcttctccacaaaaatgaccggagcaccccaaggtgaagtacttggtcgaatgtaccctttctgcagttgctcatcaacctgcttcttgacctctgccagctcattggctgccattctgtacggtctcttgtaaattggagcagtccccggtgccaaatcaatccggaattcaatctctctcttgggtggcatggtagtgaggtcctcagggaacacctctgaatactcgcagactatggggatatcttccaatttcctcgaacttttctccgcggtgaccaccgaattctccacctcaatctgatttaaggagattccctgcttcagtgcgactggtgacttgtacaccactgtttcccctctctcattggtcaaggtgaccgtgcgattcgcacaatcaatgatacccttgaacttggtcagccaatccatcccaagaatgacatctaggtctttggattcgagaaggacgaggttggctagaaatggtgatatttggatttctattgttacagaagggctgaattaaaccgaggtggaactattcccgggggtatgaacccgtattggtgtactaagctcttctcttattagcccatgttccccaataaacttctttgaaatgaatgaatgcgttgcaccagaatcgaaaagtactgttgcataaattgagttgacaggaaacgtacccagtacgacctctagtgctgcttgcgcctcttccgcggacgcgtggttgacacgagcttgggcaaaccttggcccagcacgccttagcttcgggcacttgtcagcaaagtggccatgctcgccacagttgaagcaggaccctggctttactccagtctccttcttggcttggactgatggagctgcctgtgctgtggccattggtgggcgcggagctgcactgcggttgggctgacctcccgggtggttctggctgccactggcgacctggtggaagctacttgagttgaacgggcgatactggtggacaatcatggtggtaggtccaccctgctgtccgggagtgaagcgcggtcgctggtgacttccttggttggaccggaactgcgctgcctttctcttcctgtccattttgttgcgctgatcctcctggcggattgccttgtctaccagcttctcgaagtcagcgtaatccctagagatcaactggttggtcagctcgtcatccaggcctgctaggaacttctcctgcttctccgcgtcagtgcggacatcctccggtgcatatcgcgcttggcgattgaactcatggaggtactcagttactgccctgttgccctggtggagtgcctagaattctctcttcttttgtgccacgaccccgtctggcacctgtgccttcctgaagctgcgacagaactccgcccaagtgacctccgtacctggcggacgggtagccatgtgattgtcccaccaagctgacgagggaccctggagctggtgtgtggcgtaggtgaccttcttctgatcattgcactgcagaagattgagcttcttctctatggcatggaccaatcattcgcctccatggggttggtggtgctagagaaggtgggtggactgacgcgtagaaacttcggcagcttggactgagggggagggggaccaaactgctgctgctactgttcgacttgctgctacatcctctggtgcatctgctggtgctgctgcagcatctgctgcatcatggcc

SEQ ID NO: 29147 - DNA, 1977 bp, Oryza sativa
cctgctaggaacttctcctgcttctccgcgtcagtgcggacatcctccggtgcatatcgcgcttggcgattgaactcatggaggtactcagttactgccctgttgccctggtggagtgcctagaattctctcttcttttgtgccacgaccccgtctggcacctgtgccttcctgaagctgcgacagaactccgcccaagtgacctccgtacctggcggacgggtagccatgtgattgtcccaccaagctgacgagggaccctggagctggtgtgtggcgtaggtgaccttcttctgatcattgcactgcagaagattgagcttcttctctatggcatggaccaatcattcgcctccatggggttggtggtgctagagaaggtgggtggcctgacgcgtagaaacttcggcagcttggactgagggggagggggaccaaactgctgctgctactgttcgacttgctgctacatcctctggtgcatctgctggtgctgctgcagcatctgctgcatcatggccgccatcatctgagtctgatgggccatcacttgtgcaagcgtcgggttctctgggagcggtggcggaccattgccagaggcgctgttgggatatccactgtcggtgtgctcttcgccattgctgccctcaccggctgcgcggctgccattcctgatgttgaccatctgaaggaagagcagacggagggggtggaaaagaagaaaaacagatgctcaggaactaagctttattatagaggaatttaaactgcaattgttctgatctgaattaaaacacttaaaacagcaagcaaaatccttattaagacagccacatcataggcacatgatgtcgaccgtcgactgacccacaagcgaacaaacctagacacacaaactaacaggcaattactaagcagtcgataaactaagggaaaacgagcctaatgctcggaacggctcctgcggttggtggagtagaaggcgtcctcctgctcgtcgccgggtccctctgagcggctcctggagtctggcagatacgtcttgccgctgtccggctcggagctactggaactgctgctgctgtggtcgcggctgccactgggagtagcaggcaaccaacctccgttgccactggctggacccctggcggctgacgctggagagaaggagagagcggacgccggagctgacactggaacgggagccggaaccggagctggagctgcgagcgctgcgggaactgcgggaggtgctggaggagctacgtgtcacgcctggaatttctatccaaaattccaaacgcttacatgtgtgttaaatcctcgtccaggaatcagccgaggcacacaataacaaattgataatagagtactattaaacaattaattaatattcgcaaattaaataattattacagaggtggacaattcctctcgaaagaataaaattctacgcagcggaaataaaaacaaaagactaaacagctatggcgactccactccacaagcaacttgacccgaacaaagcctaatcctcctgatcatcaccttcattgaagtactcctcctctgatgaatgaatattgcaagaatgagcatatgacatacttaaaaagccacacagcaaatatgcaagtgcataggataacaaaggatgacattatatagcttatttgcatcaacaacaattaataaacatttgagaatagtaaaacagttgagtaattaagcaatattaaataaacactatacaacacacccgtgttgcataggcccaacctcatctgaacaaccaaccccggttgtacagatcaaacctccataccaggaatataccattccaaaccaagagtcaaattaattatcacagtattatcattaatgagtagtgcgatactaatcacgaaaaacattgttaaactcacccataatcgcgggcacggctattcgaatagttttactctggccagagatgta

SEQ ID NO: 29148 - DNA, 899 bp, Oryza sativa
atataccattccaacccaagagtcaaattaattatcacagtattatcattaatgagtagtgcgatactaatcacgaaaaacattgttaaactcacccataatcgcgggcacggctattcgaatagttttactctggccagagatgtaccactatacccacaagatacagctccacaatatgttaccatgcgcctcgataccaccacgataccttggaaaggaaccgtgacaatacctctcacacaacacaactcaccacagtgcgccattcctggatcataatctccccctcaaaaccagaggcaatggactccccagcgacccctacggacttctcgccgcttcacagtctggcaccccgtaatgaaccatgctatacaaaaggtaaagccgttgcccacgttggcttgtggttggcacgattaatgtttcacaacagtagctcgcgaatcggtccttaattgtcatgagcacaaccatcaaaaccatatgctcacaacccacctttaatcagcttttaattatcaattaattatcataacaagattaaccatcgtgagctaccattagatataaccataattaataatgtagtatgattcatcccattaatgagctaatgtttctaagcatggctaagcaattatacatatagcatttagctgaaccaaaccaatatataaggttctagctaatcaaattataacccataggaaaaataaagtcattttcggccattaattaattgggaaaggctcaccacccgatgacattcgaaaataatgcataagttgaaataaaacattagctttaaacgggttcaacatgctcaaagggttgtttgggatctgtgtgacttgccttaagcttccgcaaacgcttctgaaccttcctcaacg

SEQ ID NO: 29149 - DNA, 4695 bp, Oryza sativa
tgtgggtccatgaacaacatgtcagtgacttgttatggaaaactttttgttggagtcgcttgtagttatttggtgcatcatgagcaaataatatttatgtagttataaaagaatttcttagcacgtcatctagttttgaagatatagaagttgcgatgttatattgagcacatggttatgtctattaaaatataatgactctatcattcatctttacgtaaattttaaatttatttaatcatatgcttgatcttgttaacatatgatagtctttggtttattgatttgcattacctaatgttaccatagcgttagcaggagcaagttactagttaggttggtgcgctgttactgtgcaatacttttttcctagtaacttgacactgttatgctacaagaaaattttctttacaggataagtattaacaaacaggcactatacattttcctttaccattgccttgatttatggaacaaaatatatgatttagccaaaagcgcttcttgctacataacaattgatacgatttggccaaaaggcgcttcttgctacataacaattgagctacattgtttgttgagcgtgtgctttgagatatcagagctacataccagtgaactttgataaaggatcctcacgatttcttacggaatcgttggcgctttgtgcctcctgaattgttattcccatcccaagcacttccccagaaaaacagtgccatccagaacagaactgcaaagaatatgcgtatcctatcctgtaatcttgataacctctcttgccaacctgtcaaaaggaagaaaagactagtacatatggttaaatgcatgcatccattaagcatgaactacaatcctgagatacactagaaatatgttgcgcatgaaagtaataggtagaaccgtagaactagagaagaaaatacaaaaatgattgcactgctctactggctaaaagttaaaatgcatacaattattaagaactaggagtataaagataatgtccacaaagttcaccagagattgactgttcctagacacaattccttgatagcattgtgaaacaatctcgttttggttgttgcaagcaagtgatacacatgatgtacataattcataataaatttcacacaaatgttgatgaacatcactaaccaactaatgaagtctctatatttatgatttaactaaaagttgcactgacaaagtaaatcaaacaagtagatacaactctaactatgatgtctgaaattaaaatagcatcaagaaattaagcattcctaagtatacaagataacgattatagtttgttgacgatgctgcctcaagttcaacacaaaccccacaaaaaagaacagcacacagagtcagccctccaaaagtttctagtgggatggcaaacctaggcagctagtgcttgccggtgttggctgggtgtgtgggtgtgttttttcggtgggagggctttggttctcctactttgttttttttttctttttcttccttccccttaatgaatgaaacacatttctcttgcattttcgaggaaaaaaatcactacggagtttttcccattgttgatgagttccctttgttgcgaagaatgctgaagaccaccaagaaaactaaaaaccaaagttttgtgagatttatgtgcaagatcaatgtacgtgaggaacaattatgataatattgcaatgattgaaaatttgtgtttgagaggtgaagtgccatgtgcttagtggtctgaccagtatggtaccgtagtctgactatggccctagtggtcaaactggggacgactcattttagtttgacttttggtcgcctcgggtttgcatggttggacaggtcacataacaacagtctgactaaggccagctaagattgggttgattaggacttatgtccaagttggttttgagttggatggctattgcaatattcttagtgatttacacacattacatatgatgtgtaaacgctaatttgaatcaagttcagaagaacttgtggtaaaaaaattgtttcttggtttggttatgacgttatgtacagttattacttgagggtgagcgtggtcgatgaccttagataggaacaagacagatgggggtgttgaggttcagtcattcagatagtcaatgagttcatgtgggacacacgggtagataacagtgcatgcgaaggtgagatttccatatggaattcatgggagatgtgcatcttatggaaaagtataataatttaaaaatagtccaagtttggcgaggacaaactcggttatgcgagtctttcctctacagctacgagccctagataaagaaagatttgtggcttgtgacagccatgttgcgggtatataaacactcggggagagcaaaattgttgaggatttttagagaagaattagggatttagacattttccattttcatctagggttttcccatgtggttaagggtgccaaggatacaccttgtaaacattttaaagcaacaaagataaaattcataaatccaaaggtgtaaaatccttttgcttttcctcactgttcttcatttttgtctatttttgtacaagttgatccatccaaaacttgctagggcagaaagaaatagttctgaaaattttcattgttcctttctgatgtttgaaaatgaccacattttcatgttttttatgatttcagggtcaatatgttcagatctataagtcgaagtgcgaaagttcttcttggaacagtttctaaatagataaagtttatattagtcgaaaagttccaggccaatagaagttagggggttagaagacaccaattttacatttggtttgacagattgcaaacagggctcgtggtctgaccatgactaagccactaaggacaatccgacctaactaacagggcctaagtgtgattgcagtggtttagtgatttcagtcctacaattgcagcattaagtagctgctgtttgcaaatcaggccatccacctgatattctaatttatgatttgtactgttttacttctactagggagggcaacatactagtaactatatattacatatgttgcagcagtttcaacttttaagatataacaaatatatttcatattttagtttcctaggcaccaaaagaaaacatggtatatggacagctaacattctcatgatattgaagcctggatgtctggcctgcatgaacaccataaaaaaatggccaacgatacattgttcccctacatctatgtgctctgctgcaaactaacacactacggatgaagaggacactttcttcagcaattcattttgtcccacaacccttttataaaatggaacatgtataaaaaagcatacatttgccgttagacaaaccgacaatcagcatttggtatctcaaatccccggcaaatgagtctggatcggacacaattagtacatagtaattctctagtacaacacatcccaacctcaatcgattaatcaattacttgggagcacggcataaaactgcggaagcaaaaagggaaggggacgcacagcagccttaccgtggggagaccgtggcggcggctcagaggagggcggagaggggccggcggctgcacggtagcggaagccgggccgagaacggtagccacggcccacagctgctggtaatcgccggaagcggagaccggaaaggggtaggaggtgccgcagggcggaggtggaggaggggatggtggcgggtggtgcgagaggaggggagctcgccgccgtcatcggggagaggcgatgggtccgggacgtggcggaatgacctcttcttcctcttcctctgccggttgggcgcggcgctctgcaacaagaaagagacggtttgtttggcaactctcgaccgaattgacagcgagatggaaatttgatttttagttccaatttcttgtttggtagtgatgttgaaattaacagagtttagttcgagattaaatttttaaagaaaatggatggattaaatcttccatgaaaatggatggttcagatttgtttaggcaaaataaaggaggaattcccctaattactatccctatctaggtattgaaaaggatgaagttctttcttcaattctccatcctcatcccatcgaaactctcatgtgttacaaccagttgacgtaaaacacgaggcctgggagatcttcttaactccagtgcaggtccaaaactcgccttcgggtatactagtgtgccagttgatttgatcctgcaatcaacaagaaacaaggacaaagaaaccgtggttaaatccataaacgatagacgatcggctaggtgccgatgacatattatttatctttgagccgatgtcatatatgcatcgatcggcaagtatcaataaataaaacagaactaaatctactcgatcggctatagatattaatgatatatgatccttatatcgatatatacttaaaccaagtgattgggatagatcggtcgccatgccgagacagtataaatcacttagatcgaaatatatattaataatgagattatatatattcatagtatagccgatcagatagatctagcatgtatcagctaatactctgataccactctatactaagatatcaaagcaaatagaatatatcaaacaaaagcctaatattcctaaatgcagcaagatcttaacataaagggcagatttaa

SEQ ID NO: 29150 - DNA, 9023 bp, Oryza sativa
atgcagcattaaatatgaaaagaagaacaatatctagacaatcaagccactagatgcttcatagagtggtaaatatcctatataatctaagccaacgtcgctatttaacctaatcggctaccttctactaacagatgttagccgattgtaggttagataacgatattaccgaagattatataagatatatgataactcgacgaattacataaataagattagagtatcataaagatggaagcactaatcccgagaacgcaagctgctataacaagtttacctcttgttgaagatcgaaatcgatgcagctcaacccgaaagcaagaacttgtcgaaacaaaacgaaagcaacaattcttaaaccggctccaccagtaagatatttttaatcctttcactagttgatctcagccgattttgtctaacacttgtctcttttacagcctcctcctcctccttcttctcctgtacgaccatcatcgagtgaccatactccgtcggctgtagggagccatcatgttgaagaagaagaacaactagctgctcctaccattccagtaagtttccttttgacacaagaatttagatcggctatgtctacttagctctaacttcctttaaataattattgcaggtcctagccgatcttttctgctttgacattagagactatcttgatgagacagaagaggataccacaagcaaagctttagcccccttatccgatgatgtgaagaaaattcttgaagatatctcatcggctagaggcatcatcgttagacagcttagtggttgattgtggctcaattaggactcggctacatgaggttcaagctctgatcccagatgagctagccgatatccttactccggccgtatatctcgagcaacatcaattcaagctagagaaagccaagctgagactagctgaacgtcgggagcgcaaagatatcgaggctacaattcaagccaatcgacagcttgttcatgaagagaaggccaaacttgatcagctatctgagggcccgatcaaatctaatattgatcggctcgaaactcgtaagactgagctcttggcacaacttgaagaatgcaacgccgagctggacatggaacataaaaagctagccgatctcccaaattctgttgaagagcagaaggcaagactaaaatcggctatcaaaaatgttgctgatctgaccaagtttttaaaagtcatccctgtaaccgatgctcaaggtgcccatgccattgaagaagtagaaaaaatcaggcaaagagctatttcagctttccagcaatatttgtcttagtgatatcttatgtaataggtcttagaaatttttttgcaatcggctaagaaactctgactctttatgtaactcatctcaacaatctttaagccgatttaatatgaccccatatttggctcaaaaatatgcaatttttcatatatatatgtgccccccctaattttacaatgtcacaagcattgataaaattataaaagcggctaagggcgatacaacaatatcggccattatacatcggcaaaccataaccgattacaatatgaaaaacaactaagggcgatataacaaaggaggaactgattaaacggcttgctgattatcagtgatcaagggccgataattcgggaaagtacctccttgaagataaaccggtcccgtagtctgatagtcagctattgaaccatcaaccatcgacttcaccatgtttgacaaagtattgactaatatcccagattgattgatcaaagcatgatgtacggcatagtctacctgatcttggaagttattaaactgtagctgtgctgcgttactaacttggttaagattagcacctttaaatccctgagaaccatcaccttgaactccttgagagccaataccttgaactccttgagagccatcaccttggtctcattgaaaaccatctgcagcacctttatcagtcggttgagccgagccatctagagcttgtttcacttctccatccttagaagaaccggtcccaggaacatcagcaactacctttactttgtacttctgaactaatgttcccttgcgagtctccgtgaatgagctcaagaactgattccgtgcttactgcatcattgtatcaagatctttttgctgctcaagtgtcaatttatcaaaagtgatgggcacaatgttggcttcatcaatctcagatagacccagcttcaggatcttttctttaacagagccaggaccagccgaggacggcgatgctactagtttctcggccatgaggaaagctgctgttgtgattctgacttctgataggtcccaccaggcgtgccaaaagcgtgttgacgtaaaacacgaggcctgggagatctgcttaactctagtgcaggtccaaaactcgccttcgggtatgctagcgtaccagttgatttgatcctgcaatcaacaagaaacaaggacaaagaaaccgtggttaaatccataaacgatagccgatcggctaggtgccgatgacatattatttatctttgagccgatgtcatatatgcatcgatcggcaagtatcaataaataaaacagaactaaatctactcgatcggctgtagatattaacgatatatgatccttatatcgatatatacttaaaaccaagtgattgggatagatcggtcgccatgccgagacagtataaatcacttagatcgaaatatatattaataatgagattatatatattcatagcatagccgatcagatagatctagcatgtatcgactaatactccgatacaactctatactaagatatcaaagcaaatagaatatatcaaacaaaagcctaatatacctaaatgcaacaagatcttaacataaagggcagatataacatatcaacgaagcatatagagtaaaactagttaaatcaggtaagatcggctgaaaccccgatgctaccctaatcgtcaaccagaaggcaggctagagattgatattctaagcacgacttaatagatcaaactcaactgatgcagcattaagtatgaaaaaaagaacaatatctagacaatcaagccactggatgcttcatagagtggtaaatatcctatataatctaagccaacgtcactatttaacctaatcggctgccttctaccaacagatgttagccgattgtaggttagataacaatattactgaagattatataagatatatgataactcgacaaattacataaacaagattagagtatcataaagatggaagcactaatcccgagaacgcaagctgccataacaagtttacctcttgttgaagatcgaaatcgatgcagctcaacccgaaagtaagaacttgtcgaaacaaaacgaaagtaaaaagagtggcgatgcgccgagattgtattgaacgtgtgttaaattgattacatggggctcggggtctatttatacccgagaattacaaaacatgtccgtatcggacacgactcttatctctaacaaactctaagataccataagtctttgcggcagacttttgcccgaatatatctctaaggaaattacataaaatatcctaattaatatatacaattgccttctcaagactctatccatgtgtggcaatcatcacgaagcacattaactcaacccgatgatgtataccgagtcgtattgtcggaatcggctgtatcagcttacccaatctgactcggactcagccgatcctgattgtagctgatttggattccagccgattcttactctgttcccgaatcgatcttcgtctttgattccgcttcgatctaatcttcatcttcgatactgacactggtggagaaaccctttgtagtcccggttcgtaacccccctttagtcccggtttccaaaccgggagtaccaatccgggactaaagatcgctatctttagtcccgggtgaaataaccgggagtaaaaatcgatctttagtcccggttggtaacaccaaccgggactaaagatcgagctaaccttttttttttgcatggccctgttgctgcatggtttatatatatatatatatatatatatatatatatatatatatatatatatatatatataaaccatgcatatatatgtttcaatacatatatatgcatacatatatatatatatgtatatatatatatattatattatattatatgtatatacatgcataatatatatgtatttatacatatatatgttatgcaaatgcatatgtatatagatatatatatgaacaaaatatatttacattatagaaaatgtgtacacatgcatatagaaacatatgtagtcatgtattaattacaatccattatatgtcctagctagctacgatttcgacgtagtagtactcgctgctagctcagaagctaaggaccggtgaattgtgtttccgtcgtagtagaattcacccttgggatcaaggatttcttcgttgatgaatcccatgagttgttcttgaatcgccgcgataaattccttgtgtgtggtcaggttatccctcatgcgaataaactatatgaatgtatgaaattgattagtaattaaacaagaaatcgctacgtaatgaaattttgaatttatttgtacatacatcgagctctcttgtggtgatgatttggtctgcaaggcagtggcaatactcgcacacgtaatagccgcacaagttagttccctgcttttgctttgcgcactacaaataaatgacaaacaacgagagatctaattaatatacacttgtatgtatttgaatcggagaaatataaatgtagagcatgtgtactcacaggaaatttgaacttccgcctaagtctttctctccatttgccgcggaccaaatgacggaaccgataccaagccctacatggagtttaaagctatgattcgtagtagcaattaacataacaagattttcttaattaacaaaggaacttatgacggtacctgtctataagttcgaaaaccttgtcaaacgtagactcttttttatccattgagtcatatacgttgacggtgtaggcctccaggtcgatgagtaaaagcacccagtggaatctgcaatgtgcgtgggatgcattacatatgaaacacttagcaagttcgtacgggaatgaaatttggtatgtaggaagacagtaaaattaaactaactctgtgttgtatggcaacagtatgaacgtcttgtaatgctgcgccttcaggagatggacgagattgtcctctgtttcttgtggatattggtcgagcattgcgacgtttactttccgagggtcgatgaatccagtatcgaaaaccctccgccgtcgggccctttgaatctccattctacaacgataaaagggagtatattattttctatggtctacttatatacaaggacctaattaattaaaggagacatatagtaagaaatctaactgaacgatatacttacaaaatccagcaactcataatagagacgtcgagggcgtccagctggtatagttcgtagattcccctgaaattgatccagagaatgtcatctccttgcaagaagtccgtgtccctgatcctcgctccgatcatctctctaccggtggcgctcatctccatgtacagctgatggaacttgtacatttgtgtgggtagggactgcagcagctcaggcttgacaagaggtttaccgagttcgtacatgtatttcacttccgccttttcgattggtgcgactcctagcaattgatccgtagttagaccggtgtcagtaataaattgttctatcgtcatttctttaccggtcaccaacggctcgatctcctggtttggttgctctccaagctgagggactagtttggactttccagaagatgctttcttcagcgttcgctcatagtccgatagcttgatggtctccttgacagatgcagacatacccctgaagaagttcctgacactggggtctataggaatcttcttttctggacttcgaggcttgaattgtctcttgacttctgatgcaacgtaagcgtcaagctcctcttgcgtgcaatcgtaccccgggtccttgttcttggcggcgtcaactttcgccttcttcgttgcccttgtgtgggcaggcggtggagctgggggggcccttgactttgaaggtgccggaagtggagcttgcgggggagtaggtgtaggagcacgaggaggagtcggtgcaggatcctgaggaggagtcgatgctggagcctgaggtggagacggtgctggcggagcatgaggaggagacggtgtaggatcctgaggaggagatggcggagccggaggagatggtgcacgagacgccgcttgtcgcccagggaggatgatgtaccgcctgcgccatagaataatggcatggcatgtgtctcgtagatgcgtctcaccgtctcctccagggtaatccagctcgaggtcctcgtacgcgccttcgaccaactcaacttcgaccttcgagtatcctgctggaatcggcctgcagtggtaagtacctgaagggtccgttgggatggccatgcccgacgccaccttcatgttgtgagagattatttattagtaatcaacatatataagcagcaactagcagaatggctaaatcttacctttattgataagttcttgaaaggaatatgcagctcacatggtgtccgctgagtgatgtcatcaacgggacaggtcgattcgtcctgtgtttgcatatggcgtccatgctctgtgatcctacctgccccgttgaggcgcagctgctacggtttcctgacgggctcaccattgcaggaggaatggtcggctggggatcatgggaccgatgtgcggccatgcgttcatcaaccttccttgccacctcctcttgcatgttgagttcgtagctcgatacccggaactctaggtctgcaatcttcgcctcggtatctctcttgctcctcatccgactcctgtacgtgtggatgtcctccttgaaaccaatcttccaaggaatcacccatttccctcgagttcgtcctggatgctctggagtctgcagggcgagtgtcagctcgtccctatctctgtctggtcggaacgtgccctgagaggaggcttccactgcatctgttagtcgtcgcgcagcctctcgtatctgatagccgaagaccagtgagccatcagctgggttgagcgttccaccgtgagcatagtaccagaacttcgatcgttccggccaattggctgttgccggttcgatacccctctcaatcaagctagcctccatctgctcccacttcggcatcgcgacgctatagcctcctgaccccaagtggtgatggtacttcttcttggcggcattttctttgtttctttccatcatcgcctgcccttgttcacctgtcttatatgcaacgaactcgtcccagtgatcccttagctttgggaatgtgtcgaagttcggtgtctgccccttcagtatatacttctggtacagatctcccttgaagctctgaaactgttctgccattttcttcagagtccaccttttcactttgtcctctgtacccgcaggaagggtgaatgtctcgagcattgtggtccacagcatctctttctccgaatctgggacaaagctctcatgatctccgcgtgcccttgttcttcgccagtacaccgtactgacaggcacgttatcccgcacaacccaaccgctgtgacgtacatagttcttggcggcttcggccggggcactaggacgtccatcttcttccacttccgttatgatgtgccgaccctcaagcttcttcgctgcacctcgttgcccgcgtgccctcttctgtccaacggagggttgactatcactagcctcctcctcctggttcccctccacatccctttccacgtgcccctgctggttcccctccgcatccctctccacgttcccttcctcgttcaagtactggtttggatcctcgtttccctcttcttcattccagtactggctgcttccctccgcgattgtatcgtacaatatctgttcctcatcgcggtcagccatctgttgatacaagaaacatctgctaagtcacgagacatttatgttttaacaatctaagtcatgtatgctaagtgtaaatgtcgtacattagaaccctacacaaccttacgtgctaagtctaattacaaatcgtgacataagctaagtctaggtgacgtatattatacaaccctagctagtaaataattatatactaagtctaattacaaataaaataatcttatattaaaactcaaataatattacatgctaagactaaaatagtcatgtatatgctaagtgtttcgtgcgtatatgctaagtctaattaagactacaatagtcaattgctacttgtcgcaccaattccgtagtcaataattacataccaagtctaattacaaataaagtaatattatattaaaactcaaataatattacatgctaagactaaaatagtcatgtatgctaagtgtttcgggcgtatatgctaagtctaattaagactacaatagtcaattgctaggagtcgcaccaattccgtagtcaataatgtcatactaagtctaatttgcaataaaataatcttatattaaaactcaaataatattagaacactacacaatcttatatgataagtctaattacaggtctaataatcttaattaattgcattacaaatataacaatcatttatattattacgtcacttgcctgctccaattccttctagggctagctcttccactcaggcttgacggacgactccgacaacacgtcttttctgcaagatacaaaaaaatatattaggataaatgcgaagtaacatatatatatatatattgcatttcacgttaacgttcgtcctcgttcgttcgctcgttcacgttccctagctcgttcacgttcgttccctcgttctcgcttgtcttcgttcgatcgttctcgttctcgctctcgttcgtt

SEQ ID NO: 29151 - DNA, 1541 bp, Oryza sativa
tggcggcgaaggagagaggccgagagagatcgatcggccgaaaacgtttaagtgttggtgaagaagacgagggcgcaccgggaatatatatacccccggatctttactcccggttgttctcaacaaccgggactaaagatatctttagtcccggttgttctcaacaaccgggagtaaatatcttttcccgctatttcgaaattctttttaaacccggttagggttaagaaccgggactaaagattatagcactgcatatgattttcgcttacatatgtgtttataaaatagaagttaatgcattaacattatttaaagtacaaagattaatgacaattacttcgaaaaattatttttgtctgtaataaattaagtggataaatcgtaataagcaaatataattaataaaaattccaataatcatatatacttagcatatatatgaatgatattattatattggtaaaaactctaattaagatatgtatgtacatactgcatgatttaaaattaataaaaattgtaatcatcatatgtacttagcgtaggaattatattaaattaaatgctaaaaactctaattaacatatgtaaatgccacatgcatgatttaaaccttttaaaaattcgaatagtcatatataagtagcatatgaaagatagtaaattaaattgtgaaaaactctaatatatgaatgatagttttaaaaatatattaaatttaatacttttaaaaattctccagtcaattataattagcatatgaatgatagtaaattaaatgttaaaactctaattaacatatgaaattgccacttgcgtgatttaaaacttttaaaaatcctctagtcaattataattagcatatgaatgctagtaaattaaatgttaaaaactctaattaacatacatatgaaattgccacctgtgtgatttaaaacttttaaaaattgtaagtatcacatataactagcatatacatgatttaaacttgttgaaacctctaataatcgtgcgtaattaacatatgccatacatcaattgatttatatggataatcaatacatccaaaatagtttacatcgtgtacacaataattacggcacgtactttctcctcactattgttccctccttgtgatcgctgcgtgagtaaggggtgtcttcatttgataggaggatgctagggtcaatcgtcaccgtgaaagggggttgcccatccaactgatcgtaatcctcgtcagtcttgtcctcaactccgacgatttttcttttgcctgggagaaccacttgacgcttaggctcatcaggccctctgcccttctttcctttgctagacatgtccttcacgaaaaagacttgcgttacatcattgccaaggacaaaaggttcgtccgagtatccaaccttgttaaggtcaacagttgtcatcccactgtcatcaatcattacgcctccactagtcaacctaacccattggcaccggaacagaggaaccttgagaggaccatagtcaagttcccatatgtcctcgatggcacc

SEQ ID NO: 29152 - DNA, 6521 bp, Oryza sativa
tcaacagttgtcatcccactgtcatcaatcattacgcctccactagtcaacctaacccattggcaccggaacagagaaccttgagaggaccatagtcaagttcccatatgtcctcgatggcaccgtaatacgtggcagttgttccatcgtgtcccatggcatcgacacgaacagcgctgttttggttcgtgctcttcatgtcttgggctctcgtgtagaatgtgtacccattgatctcatatccctggaatgtcgcgatcgacccagacggtcccctcgccaggaaggcaagttgttggttgatcgactcgttacccatgagatgttgtcgtagccacgcggggaaagtatcaatgtgatgccgtgtaatcaatgcatcggacttaccgatgttcctggcgcgaactagagccaagtgctcctcgatgtaaggagctaccaatgaagagtgttgcagaacagtgaaatgggctttacggaataaattgttgtctaccgtcgttattgctttccttccgagagttccctttccccgtagtctcccttcatggcgtgattcaggtaccccgattgggcgaaggtcttcgataaattctacgcaaaattcgatgacctcctctgttccataacccttggcgatgcttgcctctggacgagcacggttacgaacatacttcttcagaacgcccatgtacctctcgaaaggaaacatgttgtgtaggtacataggcccgagaatacggatctctttcacaaggtgacaaagcagatgcgtcattatattgaaaaatgaaggtggaaatatcaactcaaaactgacgagacattgcaccacttcattctgaagggcttctaatctatccggatcgatgaccttctgcgaaattgcgttcatgaatgcacatatctttgttattgttgcccggacattgtctggaaggataccccttattacaactggtagcagttgtatcatcaacacgtgacagtcatgagactttaggtttgtgaacttcttctccttcgtgcttattattcgcttgatattcgtggagtatccagacggtacctttatgctctccaagcattcaaacatactttccttctctgccttgctaagagtgtagctggctggactcaagtaatggcttcctttctcctttggttccgagtgaaggtcgccgcgttgttccatatgcttcagatcattacgtgcttccagtgtatctttcgactttccgtatacacctaggaagccaagaaggtttacgcaaaggttcttagtgaggtgcatcacgtcgattgcgtggcgtacgtccaagaattcccaatatggtaactcccaaaatatggagttctttttccacatcgccgcgtgaccatcttcgctctctatatgctggcttccaggcccctttccgaacactactttaagatctttaaccatatcaaacactgttttcccgctgcgatgtttaggcttcgtacggtggtcggccttatgttcgaagtgcttgcctttcttccgtaccgggtggtttgctgcaaggaatcgacgatgacccatgtatacaaccttcctacagtgcttaagatacgtactttctgtttcatccatacagtgagtgcaagccttgtaccccttgttggactgtccggataggttgctaagtgcaggccaatcgttgatggttacgaacagcagcgctcgtaggttaaactcctcctgtttgtcctcgtcccacatggggacaccttccttcttccacaactgtttaagatcttcgaccagtggtcttaggtacacgtcgatgtcgttaccaggttgcttggggccttgaataataatcggcatcattatgtacttcctcttcatgcatagccagggggggaggttgtagatacacatcgtaacgggccaagtgctatggccgctgctcatctctccaaaaggattcatgccatccgtactcaaaccaaaccgtatgtttcgtgcgtcctttccaaattctttaaattttctgtcgatgtttcgccactgcgaaccatcggcggggtgtctcagcatcccgtcctgttgacgctcttcagcgtgccatcgcaacattctagcattccccttgttcctgaacaaacgccttagccgtggtattatagggaaataccacatcaccttagcaggaattctcttctttgttagctgcccgtcaacttctcctggatcgtcccgtctaatcttgtatcgtagtgctttgcaaacagggcatgcttctaggttctcatactcctcaccgcgatataggatacaatcgttcggacatgcgtgaatcttatgaacttctagtcctaacgggcagactatcttcttagcctcgtacgttgtctcgggcaatttgtttccccccggaagaatgttcttgacgagtttcaataaatcgccaaatgccttgtcactaaccccattttttgccttccattgcaccaactccagagtggtatccaactttttgtgcccccgctcgcaacctgggtacaacgaagttctgtggtcctccaacatcctgaccaatttatgggcctccttttcactttcgcagtcttccctggcgtcctgcaacatctgaccaagatcatccgcaacgtcgttaccatcagcagctatttcctcctcgcccgtttgatttccttcaaatccaacatactgagcaaagtccggaatattgtcgtcttccactttatcttcttccatttcaacaccttgctctccgtgggatgtccaacaattatagcttggcatgaaccccgactcaaacaagtggaaatgaatagtcctggatgcagaatactccttctgattcttacacttattgcatggacaacaaataaaacccctttgcctgttagcttcggccactctcaaaaaatagtgcacgccgtcaataaactctttggaccgctggtcagcgtacatccattgccgatccatctacatgagtcaaaaaaaccgcacacaaataattattcttacaataatgacagtcatacaataattataagatatctttattcatacaaaaatcataaaatattacaccaaataattcttaaaaactatttgtaaagttttaaactaattttaatgtgttttacttcttttaattttcattttagtttgttttctattatttaagattaactttcactagagttttccttctcaactattttataaaaccttgtttagcaaatgaactaaatttctatatattctttcttccccacatacattttctctctcatcaacttacaactaaattttggagacaaaaaaagtgtgcaaaacataggtgcaaatgtagtatgacaaaaaaaaacattggaggatgaagttgcaaaccttttaggcacctcgatttgtatgtaatcaccaaaataaattcaatagaaattttggcatgacctcccctcttttttgaagaaattttgaagcttgctcgggcagctggaggaggaagaagacatatatataggggtgggactttagtcccggttggtagcaccaaccggggctaaagatcaccgagatcattagtcccggttggtattaccaaccgggactaaagttaagatctttagtcccggttggtgctaccaaccgggactaaagatcccgggggggcctgacaggtcctgacagcattcgacgcgaggatctgttagtcccggttggtaacagaaaccgggactaaagatcaaatatgcccgttacccttttgaaccgggactaaagatcatctttagccccggtttttattgcatccgggactattgtggaaatcggccgaccgacgaaagatggtttctccaccagtgtgatattaccaaatttggttgttaacacaaccaaacagaataattaatagcatcatccctctaaactctcaatctctcctaaaaactcccccaaccaaatgacccgagaggggttgctgaatttttttatatataatagtccctccgtcacagaatatagacagttttagagttggacacggttattaaaaaaatagatagcattaaatagaaagagattgtgattggttgagcagtggaggtaggtgggaaaagtgaagggttgtgattggttaggaaggaaatgctgatgaagaagttatattttgggacaaatcctaagagcatgtacaatagcaggctataagtcaactataaacatattttaaagagataaaggaagagagagaaaagtagcgggctacagatctgtagccagctgcagcacggactacaagacataatgtgtgtatgacaggtgggaccaggtattaatagtatagtaagcaactattgtatgaattggctgttacattggctatagatgattttgagctaacggtgggctatactattaaaattgctctaagtgctaaaaattgttatattttgggacgaggagtaattaactagcataatgcctgtgggttgcaacggtttctaaataatatttattgacataaattaaaatccaaaatcatatattatagttgggataaacgacgaaggaaatacaaacatacaaataacttttgtccggaacgataattcaatatcatgaaaattacataacttaatccctattttttcatttacctataaagaattcaatacaaagaaaaatataaattatgataatttttaatggatcaaatagtgctaaaactaatactgtgaaaaaacaacttaaattagttagaaattgaaaaaacttattttagcccacaaatgaaaaatccaatacattaattctaaaacggtgcatgtttcattgacataaattagaattttattgttctattcatagtcctatggtctgtgagtgttccatgagcatctttgggctagaccaagaaggaattgtgtcaaaaaaaaacattgttcattgccttccctagctgaagacgagaaacaaaagaggaggggaaatgggtgtcggtgctcctatgaccaaacagtggcgaggaagatggtaggatgtgtctcacgatgtgactcgtccatagatggtggtggtcggcaatgaagaaaaccaaaacagcaggaattgggcaagcaatgtcatggtcttggtagagggagaaacgataatgacgagctctggtggcgaacacgaccggataagtgcgtcaaaacacattcctgaacgagaggattctgttttccttgaactcgcggaaagaatgaaagatggagatgtgtattggtcgctaaggtacaacgtaacgtcttgtacggttgtagtcgggtcatcaacgtttcttctaaatcgtagttatctaaactcatcgaaagattgggccaacaacagtcttgagtgtcgagtggaactcagggttcatcagtgccatgagggagagagggaggcgggagaggagaggcgcaagggagaagagggccgcgagggtgggggagcgtgcagcaacgaagagatgggggcgtcggaaggaagggagagaggcggaagcggagatgcatgggagggctggcggcgtgggggcagggggggtggggggacggactaaagcggagggaggaagccttccgtattttttaattaggtatatagataaccatgaaattgtttcctatatataataattaataaccatgaaattaaatcattagtaattcattggcattatttagcaaaatagtaaggacgctatttggaagatcgtccaggtgtggtcactgttacgagcagcgtctgggtatagacgtagcaaaacggcgtccaccaggcaaatgctgcccgataagctcccgcccaacttagaaggtttctaggtttctcgacaaaaggataccagcgctgctctgctttcttttcctcaattgttgcagcggtgtagccgcgattgcctgttgtagcggcgaagcttgatgtcgtcttggttgcttgttagctgcgctgcggcggagtagcctcctccagagtttgtaaactccacaccacctcttctatttgcggcgcgcaccatccaccccggtcgatgtttgactccaaaccacgaggcgaggtgacgtcgtctagctccacgactccacacgcaggtagacaaggtcgcctttgaccggccgcctccacagaatttgcaccacagcccacaaggctatggccaaagcctctgcctactatggatccttttttttttgggaaaattggaactatgccattataattttgcaaaatttgagatatgccatcgtgacccacatgtcattgactcatgtgggtcctacatgttattgagataccgatggcatatctcaaactttgcaaaattataatggcatggttctaaattacccgttttttttctagttctatgggtccacatgtcaaagaatttaatgtcatctgacttaaggaagaggatctcaatccaaaagagagtggccccagaccatgcacgcggcatcactccctcacttattttttagat

SEQ ID NO: 29153 - DNA, 8838 bp, Oryza sativa
tccaagcaaagattagtgttgatatttcttaaacggcattactagaaatataattcccagcaatgacgaagaaatattcatggtatatttatggtcacaaatatgatccgtaagcgcacggatataccattttagcatttcaccccggagtattccaagtatcatatttgtttaatcccaagggaagatatgataagagagtactatgctaatagtttatatattacttgtatacatcaaggtctatgttggggttaagtaatttaaagggtaggtgacacacagaagaaagaactatgatactctcgctaaatataatctaagctaagtggaggaagaataagaaaagaattcattcttgtacttctaatatacaaacatctttagtctaccacttgttagtatacagtcgtacaaccaatactccctaatagtgccctcctggtgtttcgagagaccaccctgtattgtcgagttccttacgacaacctgtcatggccgtctaaccggggctaaatacggaggagtatcctccccaggaatttgtcttaggaatatatactaacatggaggaatacatgtactgagttgtcaccatcagcggcccacctctactgtcccgcagcatatatgcccagatagtgatacttaataatttagacaccacatctacattattaaatactactatatatcccccgagatgacatagatcaactgagtaatcggacactaaacccacaccattgcacctctctggtaggctagctacacaactatattgatacaagtataaaatgaagccggcactcagataatataaatggaataaaataccgaagatgtataaagaagaatattctattaattccataagtcttacaaaagaagagaggaaagctactagagacataccaaaattctcctgaagacccgaggactaagaatacttttataatttctactccactagcactaggatactactaaacttgagagagggagagagctcttcttcttgagtgtgtgcagagagtgaggatgtgaggtccttacatagggcagttatgacggttaggtgatgcaaaatgttcattctgccctccaactgtcgttgagggaggcatcctggacatccacaccccaaaacctgggatcaacggcggagatggggaggctggcccaaacagcccaattttcggcaggccgtctccctgttgtctcgtcagtccagaaggcctagtggatcgtgtgaattctgtgttctttgcgcattcatccataagtctggatctcgacagcgtatgattgattgaccatttactttctgtcgattcttctccatttatatgtgcttctcctacatctatgttagtagtatagtatatagtggaagttgatattttatttgcaaattatgcattgcaagcatagctagtctttattaattgagtaatattgatggtcgaaattggtcgataacgaccgtcaacaatcagttctctagtagtgattcttttcggtgttcgcctgcacgcagtaagctcgggttatcttttgggtattactttctccgtccaagaaaaatattaatcctatctatcaatccgaatgcatgcgtatctaggtcggtagttaggattaagtttttttttataggatggaaggtgtagatcagtgtttggcaatcagctcggtttttgtttcttgttgttttaacactttttctgttactagctaattaaatgaggatagtgttggagacctaatgaaggccgacgggttaggggtgaagaagggatactgtcacataagatttatccgtgtactccctccatgctaaaataagttaatgtaggtgtgttaacttattttgcacagaaaattccctgtgtacccctgaaagttcgcccaatcccttctatgcctctgagatttgctcattctctttcatacccctaaatttcagtttgaatcccttctataccccttttgttagttgaccattaaattcctatcataaagttcattttgccctttggtattattggtatttcttaacgacattactagaaatattcattcctagcaatgacgcagaaatggtcctggtatattttctggttacagatgttatccacaagcgcaccgatataccattgtagtatttcacccaaaaatattccaaggtatcgtatttttgatcccaagggaagataatatgagtagactatgctaatactctttatacatatattacttgtatttatcaaagtctaagcaggggttaagtttaatatacgggcacagtgacacgaagctaagctatagtttaacatctaccctatagttgaacaaatggttttactcattacacattcatcatgtcacacatccaacagcctaaaatcatctgagttacatccaacgtctcccagatcgcgccctccctccaagatccctccctctctcgcgcacctccctctcccttgtacaactgccgcatccccccaacgcatcgggccccacaaatcacgccggccggggccaccccttcctttccaatagcattccctttgcctcgccatcctgctgctcgtgcccctccgcccatcacactgatccgcaccggagtcgcagtcgccacccccgagcctctgcccatcgcatcgatccccgccgtccctccacccattgcacctatccgtgccgccaccgatgacgatctcgtccgcaccgcccctccgcccatcgcaccgatccgcgctgccaggccagtttgccctcgccgcccccgatgtacgccagggcgcccgcctccacgcccccatatcaccgtcggccggagtcgccgggctcgtcctcaccaagccgatcccctccgccaccgatagaaggtacaaaaatcctcctcccctaccagatgatttgtcttgctttgtattaatgggtgcatggactggtggtggtgcggctgtcaggctcttctattatgttgcttgcaaatcagctattaagtttgaagatgtacacattttgtgattagtctcttgtgattaagagaaaattatggtgatttgccactgacactttaacagaaaattatggaggggattcttttgcagtaccagtgacatgagaaacttcagttggttcatgagatggagctgcctgactcccttctgctgggctggttttgaccctgaacctgttgtttctctgaaaaatgtgtcattttatttttagaatgaggggttgccatatttgcttgttatgccgatgtggacaagcttgtcctgttttatgcacaggaattattggtttatatactaagagcaaaattaaaatattttctacaattatatatacatagagaggctcgatttatgggcacaaacgtcctaataggtcaatttaatctctttttgggttaagcaagaactttgtattgatgggtgcatggactggtggtggtgcagccgtcagctcgctctgaactctgaggtggtttgtttttttttctcaggcgcttgcaacactacatcatttccagaacgccttcaccaaaattcactgcatgcaatcaggcgcaagggttgtgttagtgatatgccctaggggcaatcatagagatgattgtattacatactatgtttacatatttatccaactttgttccttgaaatagataactcattattagttaatgaatatgtgattctttcatgagactctttatgttgtttgttactatttctaaaagatccctgatcaaacatcatatatggaacaaatatggttaaatgatcagcacatatattaattgatgatcatgtctcatagatcatagtatctttactacttaaaaaatacgtggtggtgttggtgagtcctgtataatccaagggccgatattcctcgcaggatcctcccacagatcgaagggatcaaataacctcctgctgtcccgcaccacccccacctccgtatcgcactgtcctcacactgccccctccatcgcacgcccccgtcactcctccttcgtaccgccttcgccgctttcccagcgccgccgtcgcgccctcggcggctcctccgccgcgctgccgccacatcagtcgcgaccccggcagctcctccgccgcactgccgccacctcggtcgtgaaccccggcgcctcatccgccgcgctgctgccacctccgtcgtgaaccccggcgcctactccattgcctcatagcccctctcctcctccaaccctacggatttctcctccgtccggtgcaccgcctcttccatccccatatactattcctacttcatctctccctaccgctgtcactgctcaaaccctaagatccgaagggagggaagagaacctaagatcggaaggggagggaagagaagagcgcatatgcggtggcaacggcaacctcagcaggcatgctgtcgacttccatcatccctgtcatcctccaggtaattgattctatttttatttgatttgttggattgtctgtagaagatcgagctgctgctaactcaggatacatacacaaaaaaaacttatgccccaatcaagcatttgggtgcttggctgctattgtgctattgacggaattgaccattcttttttctcgctttgctgttcaaggatccaaacatatgttgatgaaaccggcatcacaggccaagcccaaggcaacagtggggtttgaacttcgaagacgatttaatccctgtctttggtgaaaacacaaatcatcatgattcaccatggtattaggaggtcttgattctgaaatttccaattttgcttttgttactactttatttacatagtttctgtgtagcttaccttatcgttgttaagtatggttgaactagccattttagatgctaaaattctagaagttggaggcttatccatgcagttttagatttggttggatggaatttggattcttcgaacattcttaaactatggctctttttccattaaaactttacattttccatattgtcttcgactgcttgtagacgaacaactacaggggaatatctcatgcttttatggaaccagctaatgtgagagtatcaaggggagtcttggccgaatccgttgctcatggctggtaggagtgaggagtacataggattccacactacgaggtaatctacatgcatgattcatgtgcctgttggtctctttgtctaaaatgatagttcattttggtataccacctgttgaaataaatgggctaagcccaatttaattcaattaaaatctcaagaacccacaagtaatgttagagagaataatactaccttgaaaaattaggtgaaagaacctcaacttaaatatggtgatattggagattccctgttgaccggttgaggtgatggttggactgccacacacatgcgcgcgcgccgagtcggcctcggccgtaggcgtagcgaggcgaggcggccgaccgagccgagcctgcctgctgctcttccgttttgtaacagatgagaataaagtcaccattaacaaatgaaattcattgtgttgtagcctccacaacaaatgagagattcattgtgttgtaacctccacaacaaatgagagattcattgtgttgtaacatccacaacaaatgagatttatttgtgtggtaatggagatctctctctctatatatataaggatgtgactacacagctagtggtagctgtattgtctaaaccagctgagaccctatccacctatgcttcaaataaaaatttatcttaaactacttatccgatctacgatccgattacaccgttgtgttcgtaacaattaaatctttataacaagatctcacatgattatattttgatgaaaaaacataaattacttttatagtatatctaaattacttttaaatttcactaaattacttcttagacatataaaaataaattcaataaaacctaaaattaatttgcatatattatagaagtaacttataacaaaaaagagtgtaactttaatgtatgtcttttttcattggacgtgactacacagctagtggtagctggtttgtactccatctagtctctcctttgaacttgaaaaatgcaatagtatgtatccttttttaatctctttaataacttatatcttttaaaaaaggtacactgtgggcaaatgtctggtagtattcatttcaaaaaaaagcttatatcttttagatcacatattacttctaatgtcgtgacaaagttacttccattttgttttaagttacttttataatatatgtaaattacttttagaccttattgaatttacttttatatgactaagaaataatttagtcatatctaaaagtaacttatatatatatgataaaagtaacttacatatataataaaagtaatttataaatataaatattttttcatcgtaatataatcatgtaagatcttgttgtgaagatttaattgtaacgaacacaatggtgtaatcggattatagatcggataagtaatttaagagaaaactttatttgaataggaaaaagatatacatgtctattgagaaacaaggcacacactgtgtcaatccttctcattgtgccattacagcgcggccacgtggatggacgataggcgcgatcgatcggctatgagatgcgtcgcgtgatacgactaaagcgagaagcctctcagtttagattttacgtatatataacgcaaggcagaggctctcaaagtgtgtgtcttcctcctgcattgttccttggcgatactctccttctgttcctgcgctgtctctctgtttccccggttctgttcatcccgcgcacatgggtgattggaacgagcaggtgcctccgaaactccgtccgcttgagaacctgcacgggtaggcgggcgatcaagtttttgagtagcgcttcaagcgcgactactctgcatcatcttcaccaacatgtcgacaaccggcgacaacaacaacactagagacaaggaggagcctcccgtcaacaccaacggaggcaatactgtctcaaactccagcggagggccattttcggggtataacgtttcactcttaccgttcgttcttcgtttcctacaactgtcggtcgcaatattattgcgttctcttgtctatgttgatgcttattctatattaagcacactcaagttgtatacatctagcactgtcactagatctactcatattgcaaatgtcatgtttattgtcttaatattttggattaaaatatgtcgaattatgaccaaatttccaacaatccaaaaacttgataggtctttttcggtagttggctttgctgcatcactaaaaccacatgctttcgatggttcaaattataaaagatggaaagcacgtgcacttttgtggttgacggcgatgcaatgtttctttgcttcacgaggcaaaccgagtgaaccgcctctctccctgaggaggaggctaagttcgaggctgcggattgcttgttccgtggagcattgatcagtgtgcacgccgacagtattgtggacgtttatatgcacatgccttcagggaaggacatgtgggattctcttgaggccaagttcggggtttccgacgccgacagcgagctgtatgtcatggagcagttctatgactacaacatggtcgatgaccgttctgtagtggaacatgctcatgaaattcagatgctggcaaaggaacttgagaacaacaactgcgagttgccggacaagtttgtggcgggtggcattattgccaaattgccaccttcttggtcagactttggtacttctctaaaacacaagaggcaagagttcagcgttactgatctcattggctctttgggtgttgaggagaagacgagggcaaaggacaaccgggacaaaaagatcgagggaggttctagcgctaatttggtacagaagaagaaccctcacgcatcccacaacaagaacaagaaagtcaaacctgacgtcaaacccaaggctacaatcaattttaagaataaagacaagggaaaggcaaaaggagattgctttgtgtgtggcaagcctaggcattgggccaaggactgtcctgagtgcatggacaagaagtctgcaaacatggttattagtgagggcggaggaacatcggggtatggtaaattttatctacagttctctctgtctgtcactcccctgattggtgggttgatactggtgctaatattcatgtgtgtgctgacatttccctgttttcttcttatcaggtcgggagaggttcctccttgttgatgggaaacggatcgtttgcggttgttcatggtgtaggtacgatcgatctgaagtttacttcgggaaagatcgtgcagctgaagaacgtgcagcatgtcccttcaataaagaagaatctagttagcggctctctactgtgtagagatggttttagacttgtgtttgaatccaataaatgtgtcgtatctaaatatggcacgtttattggaaaaggttatgacagcggaggcttgttccgctttatcttggatgatatgtgtaataaagttgtgaaccatgtaagcgatgatgatgatgagtccaatgtgtggcattcgcgactttgtcatgtgaactttggttgtatgacacgcttagccaacatgagtttaattccaaaattcactttagtcaaaggctctaagtgccatacttgtgttcaatcgaaacaacctcgcaagcctcacaaggcatctgaggtgaggaatttggtaccactagaacttgttcattccgatctgtgcgaaatgaacaacgtgttgactaagggggaaagaaata

SEQ ID NO: 29154 - DNA, 1286 bp, Oryza sativa
ctagattctgctatgtgtacctattgaaaacaaaggacgaagcattacattactttaagatctataaggctgaggtagaaaaccaactagaaaggaaaatcaaacggttgaggtctggtaggggtggagagtatttttccaatgagtttacttctttatgcgaagagtatggaattattcatgagaggacgcctccctattcaccccagtcaaacggggtagccgaaaagaagaaccgcactctaactgaaatggtgaatgccatgttagacactgcaagactttccaaggaatggtggggtgaggcaatattgactgcgtgtcatgtcctgaatagaattcctactatgcataaagaactaacaccattcgaggaatgggaaaggaagaaattaaatctccctcacctgcgcacatggggctgtttggccaaggtaaatgtatctatagccaaaaagcgtaaacttggaccaaagaccgtagattgtgtgttccttggttatgctatccatagtgtgggatataggttcttaacagtaaattctggagtacccgacatgcgtgttggtataattactgagtccagagatgccacattttttgagaatgaatttcctatgaaaaatgcacctagcacttctagtcaagaacctattttatcccctgagcactttgtgccgatagaacacattgatcaaatgcttgaggaaaattctgaggaggataacattgtagcaactcaaaagagtaagagacaaaggactgcaaagtcttttggagatgactacgttgtatatcttgtggatgatactccaagaaccattgaagaggcatattcatctcctgacactgactattggaaggaagcggtatgaagtgagatggactcaattatgtctaatggtacttgggaagtcatcgagcattcatatcggtgcaagcctgtaggatgcaaatgagttttcaagaaaaagcttaggcctgatggtacaattgaaaagtacaaggcaaggcttgtggccaagggttgttgtcacaccctgaagttttcccccttttgcttgctttaaaaattggttaaataaattgcttgaagaaattatcttaattaacctagagctaaatccctagttaataaatgcacttaataatcggaaatagtgtggtggaatttttcttgagttccccatgctccaatgcattaacaggatttttagtggaattttcagagccttggaaataattttaaccaattaaaaatcactaaagtgccattttaaatccca

SEQ ID NO: 29155 - DNA, 8739 bp, Oryza sativa
ccgccttcggccatgagccgccgccgctagagtcgccgccgcgccaaaccgccgccgccgttagcttcgccgccgcaagagctttcccggccgccgcctcgcgtcgccggaatcccactggagcgcctctcccctcgcgagccggtgagtttttccctcccctccatctccggccggcaattcaagctgccgtggtcgtcgtctcctctcctaacgcctctccatcttctcctagggtgtcgccgctgcccgtccgtgcctccgcgtcgccggtcatcgccgccgtcttcatccttcgcgccggccgccgtgctcacagtgaggagctcctctcctccctccttccctctgtcccgcacgcgctgccgctccctgcgctcgccatcgccttcgtccgccgccgccggtctgtgcgccgcccgccgccgcctcccacgccgctggttgccgtcaccggcgaccgcatgccgccgccgttcgccatgcttgccggccggcttgaagccgaggccgagcccggtggctgctcccttcaccgtccgatcggcttgggccgatccggacccttggtcccgtggaccggccgccttgagccgctgacatgcgggccccgcttgccggcgcccccttcctctcccctttaagccgctgacccgtgggccccacctgtcggcgccgccccccccttcgctgacgtcagccctgggctttattgcgcaataattaattaaggactttttctttattagtaaaaacacagtttatcttctaaaattcataagtaattcatccgagctccgtttaagtccattcaagtctcagtaaatcaagaaaaatgcaaagaatccattaaaaatggttttgtttcctgtttctgtagtcttatagcatgttttgcttgtgtgctttgtttgtcgcgtagatttcggccttttcgtcgatccgcggtctctcgaagacgttgctgaggtctcatcagttcgagagcaaggcaagtcatgcaatacgtttgatcatattgtacccaatttacaaatatcccgcatttctattaaatgttgcattcttttacaatgtaatgtgggatgggtcctattcctcagccacatattggttaccctatgccattgataacttgggtatcaaaatgactagatgttggctaaggaaatgcttagccatgcttagttcaactagtacacaaatggggatcacattattacatagactttgtcttttggcatagctttagattggtgccaccgcaatggtattagttaattaaaatacactgaatggtgggctgtgggtgcatggttttgctggtcgcacccatggcagttaaggaccggttcacgggaaaccctgggagacttaccgtgcttaccacaagcgggagtgggtaactgcttgatctgaagtatagctcgaccctttcctaggcaccggtggcgagggtgggcgtgatggagttgggtcggccggggtgtccggttgtccagctgccggattcaccgcggcgcaagaggggaccgcccactgccttttgaggggtgggggtgaaaccttagcgtggtgtggatggttaggggagggttatgcggagggtcttgtcacgatttccccctttgcagtatcatggtgatacttcggggcatggcgacatgtgtggaaaagtgtcttgtgggtacagttgtacacctctggccagagtaaaactattcgaatagccgtgcccgcggttatgggcgatcaaccagattcaccgtgattagtctcacccctagtttagcttaatgaactggtgtagttcaggtggttggttcggcctgttgcaacgtggtgtagcgttggacagtgattggttaatattgattaattactacaactgttttactgccttcaactactacttttgaatgctagctttatgcaaaagaacctctagcctcctttggttatatcctgcatcatacctcctcttccggtatgacttgctgagtacagtgggtagtactcagtcttgctctcttttcccccacaccagagtagaagttcttctcaattggagccgtctcagagaggttggtttcgtcgctgccgtcaagggttgcctgtggaatggaatcgcccgctgcaggagtcaagtcttcaggcttagctcgcttttaccttttccgctgcatttgtaatcctttatgtttttgtaagacgtggatctgtatgtcaacaattgtcgtttgtgtaccctggctggtcctggataggggtttaatacacattcagcttagaaattctggttcgtgaatttctgggcgtgacagttgtacccaaaaagaaggcgaggactttttcgacacttattcaccggttgctcgcttgaccacgattcgagtactacttgctctggcagcctctcatggtctacttgtccatcagatgaatgttaagacagctttcctcaatggagagttggaggaggagatctatatggatcaaccagatgggtatgtactagaaggtcaggagggaatggtgtgcaagctgttgaagtccttgtatggtctcaaacaagcgcctaagcaatggcatgagaagtttgacaatacacttacatatgttggctttgttgtgaacgaagctgacaaatgtgtgtactatcgctatggtgggggagagggagtgatcttgtgtttatatgtcgatgacatattgatctttgggtccagccttaatgtgattgaggaggtcaaggactttctatccaaaagctttgaaatgaaggatttgggagtggctgatgttattcttcacattaaactactgagaggagatgagggtgggattacacttgtgcaatctcactatgtggacaaggtcctgagtcgctttggttatagtgactgcaaggcagctcctactccttttgatcctagtgtgctattaaggaaaaaccgaagaatagcaagggatcaattgagatactcccagattattggttcattgatgtacttagctagtgcaacgaggcctgcatctcatttgctgtgagcaagttgagccggtttgtttcaaatccgggagatgatcattggcatgctcttgaaagagtaatgtgctatctaaaagggacaatgagctttggagttcactacgctgggtacccaaaagtactggagggctatagtaattcaaactggatatctgatgctgattagataaaggccacaagtgggtatgtgttcacacttggaaggggcgccgtttcctggaagtcttgcaagcagaccatcttaacgaggtcaacaatggaagcagaactcgcatctttagatactgccacagttgaggccaaatggcttcgtgagctcctgatggacttgccggtggttgaaaaactagtaccagcaatcctgatgaactgtgataatcaaacagtgattattaaagtgaacagttcaaaggacaacatgaagtcatccaggcatgttaaaagaagactgaagtctgtcagaaagcagaaaaactccggagtgatagcattggactatgtccagatggctaaaaatttggcagatcagtttaccaaggggctaccacgtaatgtgatagactgtgcatcgagggagataggcttaagacccacttagagttgcacaatggtggaaacctgtccattgtgattggagatcccgtgaatttggatggcgaaacaaactattgggtaactgagagaagagacccaaaaatgagcttatcttcatgatgcacttctcttctaatctgtatggtaggatggtatacaccttaatgtgatccgagtggcttttcataaagcagagatgttggcctacagaacatcttagaaggaacacgcctatatgactccgactgctagtcacagtctatgagatctgggtgatctctagatactcatgaaaaggccaggagtatgacttatacgctccaaacagaggggatgcaaacgacagcccaataccagttaagggtttgagtgaaacctgaatcgcacaaaactgacaattacaaggcataatccattgttcagttatgatctggtgtaactcttttcctaggtggaagttcaacctaacagtctccatcaaaacactggtataactaacaggttcagttttgagaacatttcttgtgagccatgaaatttggtggggattgttgaaataaatgggctaggcctaatttaatttaattaaaatctcaagagcccacaagtaatgttagagagaataatactaccttgaaaaattaggtggaagaacctcaacttaaatagggtgatattggagattccctgttgaccggttgaggtgatggttggactgccacacgcatgcgcacgcgctgagtcggcctcggccatggacgtagcgaggcgaggcggccgaccgagccgagcctgcctgctgctcttccgtttccgttttgtaacaaacgagaatgaagtcaccattaaaaaatgaaattcacaacaaatgagagattcattgtgttgtaacctccacaacaaatgagagattgattgtgttgtaacatccacaacaaattagatttatttttgcggtaatggagatctctctctatatataacgcaaggcagaggctctcaaagtgtgtgtcttcctcctgtattgttccttagcgatactctcgttctgttcctgcgctgtctctttgtttccccggttctgttcatcccgtgcgcacgggtgatcggaatgagcaggtgcctccgaaactccgtccgcttgagaacctgcacgggtaagtgggcgatcaagtttttgggtagcgcttcaagcgcgactgctctgcatcatcttcactaacatgttgacaaccggcgacaacaacaacactagagacaaggagaaggagcttcccgtcaacaccaacggaggcaatactgtctcaaactccagcggagggccattctcagggtataacgtttcactcttaccgttcgttctttgtttcctacaactgtcggtcgcaatattattgtgttctcttgtctatgctgatgcttattctatattaaggatactcaagttgtatacatgtagcactgtcactatatctactaatattgcaaatgttatatttattgtcttaatattttggattaaaatatgccaaattatgactaaatttccaacaccaccgtcatttaggaaacttcaattctcgagttgtggagctaggttgagggtatttgattatttaatctttatagggttctgtagcgtgcactcagcccttaggacttaacatgacagtacatgagcaaatgggaaagcagtgaatttttgcatcaggctggctcaactaaatgattgttatgtccatttggttattaaaatagaattttctgttgtataccacctcacatgctattaagatacattttgatttacatagcaattatgtttctatgtaaagatactaaatatatatttggtcattttggtaactgttagtatctcaagcagtaccacccccattcacttcccacagataatcactctccactgtgtactccatttccttctttttgatctgctctgctcgcttaacttgcatggcatgttggctaacccagaattggcaactggaggggggcagttgctgttcagtggctgacttggctgaccgtaggtacacgtatctatagtcaactaataaacggtatacatctcttcatgctaaatgtatatccttttcatgacagaatttattcaagaacgaaatgaaatctgcctatagtcagtagcaactaaatttacatttttagcatgtaattaataatgtattgtttacaggattcgctcgaatgctactctcaagttgtgggcattcgctacaatgccattttcgctgtctgttgcatttgcaaaatactatttttcatctaaataattatttcttggccctttttgcccctcactgccatctctctctctaaaccacgcactcacaactgagaccgagccgagtgagaggataaaagggcaaagggaggggcaaccatgctggcgccgccgccttcccctaccatccacgacattgagggcggttagaatgaggagcaggcagcagcagttgcgatggcgcggctcggtgtggggaggcggcgcaaccgggaaggcggcggagcaggtggtgggcggccccggcgaggttggggaagaagaagcggcatggatggtgggttaaggcgacaccacggatggcgagaaaggcggcgcgaatagcgggggcaggtggcgcggtcaggaaggtggcggagtaggtggtgggcggcgccggcgaagttgaggaagaagaagcgacacggatggtgggggaaggcggcgacgcagatggcgggggaggtggcagcaccagtgtggtcgcctctcccttcgctaggggtgcaagtgggcctgtctgccacatcctgattttcactttaggattcataaattatttaataaattatttttagaatttatattaaatgttcattaatttacaagtaaagttaaatgtgggaaataaaatttcctaaatataaagtatggctggatttaatttttattaagttcgcattatactctctggaattttctttgattttttcggagctcaattcttaattttaataatacaaacaacatttaagtaattattcacatattaaattaatcattaaatggtctgattttaattttgttaaatacttatagtgttcaagtactttcaggattttttttgaaattatttgagcaatagaagtatttttaacaattcaaggatcatttcagtgattaatttaattggaaaagtaattaaaatccccttttccttttcgggccgaaactggaaaggttcacctttagttctcggcccattctccctccctttcggctggccttatccctcctccgaagtccatttcaggtccctccttcaatccggcctagtagaggatgctctcggagaaagtctgctttacgtccctcgctactgttcatcttcaacctcaggacagccgaactgagaccgagttggctcggtttttctcctccgaatccggccttatctctcgtgttttccgaaaattagttgaggggacttgtttccttatcctcctctatctctttccccaaaaatccggttttatccctttgaattcgacgcgaatttggattcgttttcgagtttatctctccaccaaaccctaggttttcccgacgcgattccttgcgttccaagcccgatatctctctcccgtggctataaatagaacccccaagctctcctctttcgtttccaacccctagctcgagctcccgtgccctagccgtctctccctgcgagtccctctctctccagcgccgccaccatctccagcagcgccgcgccgcctctctggtcaacgccgccttgagccgtcgcctccctcggcttcgcaagggtcagctctaccccggccaccggttcttttgcgccaaatcccgccgggagattgccgtcaccgtgaaccagtgggttgccgccttgttttgatctccggcgaagcctcctcatcgaccccaaggtcgccggacctcgccgcagcctccctcggcatcgcagctgcgaggagaaccccgtccacccctcggttgtcgtctcccgtcgctgaaactccgccgccaccatcgatcggtaccccgtcgtcactcccgatctcatcgccagccgtttttcatcgtcgtgccgcccctcagtgagttcccctcgtcgtgctctttcttctggtgcctcggcttggccgcctaaaccctccatcgccggcaatgatgtcgtcatgacattgttaatcctgttctgtataaggctaaaatcatatttatcttgtaaaattgataactaattcatatgaagtcggaattaagtggttcaagtctctaaattcatctaaaatcatgatctacatgtttgtctactttttatgtactgtttatttggtttttattagtctttttcttcgtttttcgtgttagcttgttgtttccgtcgttgcgaaggttcgtgagtgcgtcggaagtgttcaagaagattaattgaagaccgattattgcaaggcaagtcacacagatctcaaacaaccctttgagcatgttgaacctatctaaagctattgttttatttcaacttatgcattattttcgaatgtcatcgggtggtgagccattcccaattaattatggccgaagatgactttattttcctatgggtaataaattgattagcttggactttatatattggattggttcagctaaatgctatatatataattgcttagccataaatgagatgaatcacactacattgttacttatggttatatttaatggtagctcacgatggttaattgtgttatgataattaattgataattaaaacttgataatggtgggttgtgagcacatggttttgaaggtcgtgctcatgacaattaaggaacggttcacgagctattgttgtgaaatatttaccgtgccaagcacaagccagcgtgggcaacggatttacctttcgtatagcatggttcattgcggggcaccagactgagaagcggcgagaagtccatgagggtcgctggggagtccatgcctctggttgtagagggggtgattatgatccaggaatggtgcactgtggtgagtt

SEQ ID NO: 29156 - DNA, 617 bp, Oryza sativa
ggattttgggttacctctcgggtattttaataagttccataacccatccttgtatggaaacataattctcctcacttttagtctagatttcctcccaacatcaaggtttatcacttgctgacggagcatgggggtcctcaccggaagcccgcgcaggcccccctttgccggttcggccgggggcgctaagtaaggttcttcgccctcgatctgaggaacgtccgcgagagagtaagtgcacaagacacggccgacgtagacaggttcggtccgctggaaagcgtaacaccctactcctgtgttctggtggatctgtgcgtgaaggaatacagagagctggagagcgagccagagttcagggtctagcacccattccccttttttctcctccctccagagtcccctttctttttttcttttctcttttctctccagagtccccccctcttaggcctgggcaccattaaagtttctcctgtgcaacctatgagtaggcaatggttacaaagtataaagttccctgctccagttgatctgttctgtctctcaattgcctaaggtggtgagaagcgggtgttctacaatttttaggcgtaagggtaagcctccgtggggta

SEQ ID NO: 29157 - DNA, 635 bp, Oryza sativa
ttcagtgcatcccacaactccttagcgtcagtcaaatgcatatacacctcgaccagacgatcgccaagaacgctaagaatgcatcccacaaagagagtagtggcttcctcgaattgcttctgctgatcagcagtaagaactccttcaggtttgccagtactcacccagaagcatttcatagctgtcaaccacagagtgaccctgatctgccatctcttaaagtgcacaccggtgaatttatccggcctcagtgcatcggcaaaaccagccatagtaaaatcacagcgcctataataaggtttttggattgtagaaattataagcacataatgatttaatttattccataaataaatcatgacattgcagatgtaaactagcatgaacacatcattagatctacacatgtaaactaagcagtaaaacatgaacggatcaaatatgcacaacatgtcgaacacgtaccgaggtggcggaaaaaccggttgctcggcaggtactactcgcggttgcgggcgttgacgaaggcgcgcagcacgcgagcagagaggaaggcgagccgtagcgaacgaacagggagcagtcgcgcgaagcgcttccaaaaaccttattgccgcttttcccgtgcaagacat

SEQ ID NO: 29158 - DNA, 619 bp, Oryza sativa
caggcctcggggcccaaggggagcgctcccagctcccctagattgattgcttggatcactgagatccaggcgtacctcgcagataagactctaccccaggaccgcgaagagagtgaacgcgtccggcgcatctccaagcgttacgtgctggtggaagggaccctctatcggcgcgcggctaacggagtcctcttgaagtgcattcctcgggaacaaggcgtcgagcttctcgccgatgtccatgaaggcgagtgtggagcccactccgcctcacgcaccttggttggcaaggcctttcgccagggtttctattggccgacggctctcaacgatgcggtcgacctgatccggcggtgcagggcgtgccagttccacgccaggcaaacccatcggccggcccaggccctgcagaccatacctctttcgtggccgtttgctgtctgggggctcgatatcctgggtccgttcaggcgggccccgggcgggttcgagtatttgtatgtcgctgtcgacaagttcactaagtggcccgaggcttatccggtcatcaagatcgataagcactccgcgcttaaattcatcaggggcatcactgttcggtttggggtgcccaaccgta

SEQ ID NO: 29159 - DNA, 514 bp, Oryza sativa
tgaatggctcaattcggagttcgaatgaatagatatgaattttagaaggttttgagccattaaattaatatctataattattaccaaattattgcgcaattattaaatattttcacaaaggaaaaggactgccgctgacgttagcaagagagggggccggcgccgacaggcgggtcccaggcatcattggctcaagggggctcggtccaccatggaccgggaccacaagggcggtccaccgcccgtccacgggatggacggcccagatcggcccaagccgatcgggcggctgatgagagcggtggccgggcacgggcacagccggggctggcccgaccgaccacagagggcgggggcgcgcagtcaccagcaacggaggggggcgggcggcacagggagcagcggcgcgcagcgcgggaagcggcgagaggaaacggaggcagtgaggaaaaggaaggtggcggagctcaccgaggggcacggcgacggcgagagcagcccgcggagggaggcg

SEQ ID NO: 29160 - DNA, 17579 bp, Oryza sativa
gctggtcaacgggtggaaaacaggatcgcgtgattttctctcggtttccttagccgagagattatttcccaacaatcccttgatatcatcttgtcacatacaactatatatgtaaaaatgaaaattggatggtttgcattaggtcctttgaataaaccatgtttcttgttaggtcctgtagcataagttgtactttaattgtacttcaattgatctctgtgttgtgctttaattgtactttttattggaaagaacatgctaccacaatttttagtagatctaaaattttgagcattgtcaaatcgtgctacagatattggccttcatagactgttggcgctagatgtctgtgactttgatcaaacagagctcttgtttccaatgttactgatggcaaaattttattttattttattttttccttggcaggaactttgcaaaccattttcaagtttcagaagcttctgaagatatcattgtgtgggaatagtaatgttgcacagatcgacacctgttcactcttatcatctgaattaagatttggtactactctaatcccatgataaatacttatatgcaatactcaacctaaggttcttccagctgagagcgttatactgaaaattatgatcagactaaccctgaaaaaattaatgaaattttacctgttgtggtgtttctgggagctggttccatttgctcgtacgcttgtggcctccggtggcagcgcggttcaggtgttcagctacgcgtggctatgttgagttagtacggtgcgatatcaaccagtgcctttgatctgtcgcattttgatcagtgatgctcatttagtgagttcttacctgtgctagattgctagaatgctaaatggtacagtttctgtcttgatagctgcagcacctaaacctgttctacatcatcggtaatgcattttgtatattgataactcaaaattttaaggccacatacttatcggaccaaagcaatgttggaattaatagatgggctaaggcccattcgaagattaattctttgaaaaatcacaaaagcccacctcatgggatggcatgcatgtggagtttagtaccaccttgcttattctaggagagggggaccttcttaaaagggaggatgccctcctagccacttgaagcatgtgtggtggagagaagagggggaacacacgcgcacgctcacctggccaagcaggcggcgcgcgtgcacgttgttacgcgtcgaatggtccgcaaaattagctcctcactcttgcgcagatgtagcctccttttgcagttttgttttgctgcgggaaatttggatttgtttttgttttagaaacattccgaaaaatccggtgcgtgaaaacagcgtggagtccggataagttacgcgcgacttatccggttcggttacacggagtagagatcgtgcgggcgccctgatcaagcgacctatctctatataaaccgagccgtcgccttcacgcaacatacgcaaaatcaatctagggtttgcctcctactctgtgctacgccgtcgctcgtagacaactccatcccgctcgccggcgtgcaccggcgatcaggagagcaggtctccggaacctctaccttcgatgtcctgcacggggagaaggcggcaataaggtttttgggaagcgcttcgcgcgactgctccctgttcgttcgctacggctcgccttcctctctgctcgcgtgctgcgcgccttcgtcaacgcccgcaaccgcgagtagtacctgccgagcaaccggtttttccgccacctcggtacgtgttcgacatgttgtgcatatttgatccgttcatgttttactgcttagtttacatgtgtagatctaatgatgtgttcatgctagtttacatctgcaatgtcatgatttatttatggaataaattaaatcattatgtgcttataatttctacaatccaaaaaccttattataggcgctgtgattttactatggctggttttgccgatgcactgaggccggataaattcaccggtgtgcactttaagagatggcagatcagggtcactctgtggttgacagctatgaaatgcttctgggtgagtactggcaaacctgaaggagttcttactgctgatcagcagaagcaattcgaggaagccactactctctttgtgggatgcattcttagcgttcttggcgatcgtctggtcgaggtgtatatgcatttgactgacgctaaggagttgtgggatgcactgaatactaaattcggtgctactgatgctggcaatgatctgtatatcatggagcagtttcaagactacaagatggctgacaaccgttctgtagtcgaacaggctcatgagatacaaaccatggctaaggaactcgaactccttaagtgtgtcttacccgacaaatttgtggccaggtgcattattgcgaaactacctccatcttggagaagtttcggtactgcactcaatcacaagagacaggaatactccgttgaggggttgatagcgtctcttgatgttgaggagaaagctcgggaaaaagatgctgcgtctaagggcgatggtgggcagtccagtgccaatgttgtgcacaaggcccagaacaagagcaaggggaaatacaaagctcaatagaccaccaacttcaagaagcagaagaagaacaataacaatcctaatcaggatgagaggacttgctttgtgtgtggccaacctggtcatctggctaggaagtgtccacaacgcaaggggatgaaggcacctgtagggcagacttctaagtctgctaatgtgaccattggcaacactggagatggaagcgggtatggtaatttacctactattttttcagttaattagtctactaattggtgggtttatactggggccaatgtacatgtttgtgctgacatctcattgttttcttcttatcaggtcgcacgaggttccaccgtggatggggaatgagtcatatgcaggtgtgcatggtattggcacggtagatctgaagtttacttcaggaaagatcgtctagctgaagaacatgcagcatgtctcttctatagataggaatcttgttagtggctcccgtctaactagagacggatttaagttggtttttgagtctaataaagtagtcgtgtctaaacatggatattttattggtaaaggttatgagtgcggaggcctgttccgcttttccctttctgatttctgcaataagtctgtaaaccatatttgtggcagtgtggatgatgaggctaatgtttggcactcacgtttatgtcatattaattttggcttgatgtctcggctttccagcatgtgtttaattcctaagttttccattgtcaaaggttctaagtgccatagttgtgtgcaattgaagcaacctcgcaagcctcataaggctgccgaggagagaaacttggcaccactagaactcctacattcagatctttgtgaaatgaatggggtgttgacgaagggtggaaaacgatatttcatgacgttgattgatgatgctactagattttgctatgtgtacttgttgaaaacgaaagacaaggctctagactattttaaaatttataaggcagaagttgaaaattaacttgatagaaagataaaaacacttaggtctgatcatggtggagagtatttctcaaacgagtttgacttattctatgaggaacatggcattatacatgagaggacgcctccatattctcccgagtctaatgggattgctgaaaggaagaaccgcacactgactgacttggtgaatgccatgttggacatcgcggagctacctaaggcatggtggggggaggcattgttgacctcgaatcatgtgttaaacagagttcctaatagaaataaggacaaaacaccatatgagatatggattgggagaaaaccatcactttcttatttgcgcacatgggggtgcttggcgaaagtcaatgtaccaataacgaagaagcgcaaactgggacctgagattatggactgtgtctttctgggatatgctcatcacagcattgcctatagatttttaatagttaaatctgatgtacctgacatgcatgttggtacaattatgtagtctcgtgatgctaccttctttgagagctttttcccaatgaaggatacacatagtagttcgagccaaccctctgaaataattcccagttcgatcacaccaccagaacaaactaaacatacacacgaacatgtcactaaggaggatgtcagtgaagctcctcgaaggagtaagagacaaaggacggctaagtcctttggtgatgatttcactgtgtaccacgtggatgacactcctaagtcaatttcagaagcatatgcatctcctgatgtagactactggaaggaggctgtccgtagtgaaatggattccattatcgctaacgggacttgggaggtgacagagtggccctatgggtgtaaacctgtagggtgcaagtgggtgttcaaaaagaagctcaggcctgacggtactattgaaaagtataaggctcggcttgttgctaagggctatactcagaaagaaggcgaagatttctttgacacttactcatctgttgctagattgaccacaattcgtgtgctaccttccctagcagcctcacatggtcttctcgttcatcaaatggacgttaagacagattttcttaatggagagctggatgaggagatctatatggatcaacctgatgggtttgtagttgaaggtcaagaaggcaaagtgtacaaattattgaagtctttgtatggtctgaaacaagctccaaagcaatggcatgagaaatttgacaaaacattgacatctgcaggctttgcagtcaatgaggcagataaatgtgtgtaccatcaccatggtgggggtgagggagttattctgtgcttgtatgttgattacatactgatatttgggacaaaccttgaggtgataaatgaggttaaatcattcttgtctcaaaattttgatatgaaggatttggaagtagctgatgttatcttaaacattaagctaattagaggtgagaatgggattacactcttgtagtcccattatgtggagaagatcttgaatcgctttggctacattgatagtaagccttctccaacaccttatgatcctagcttgttgcttcgcaagaacaaaagaattgctaggaattaactggaatactcccaaatcattggctcgctgatgtacctggctagtgcaactaggcctgatatctcctttgctgtgagcaagttgagccggtttacctctaatccgggagatgatcactagcgtgcgcttgagcgagtaatgtgctatctgaaaggtactatagaattggggcttcactatactgggtatcctgcggtactggagggttatagtgattctaactggatctctgatgtggatgagatcaaagccactagtggatatgtcttcacactgggtggtggtgctgtttcgtggaggtcttgcaaacagatcattttgacgaggtcaaccatgaaagcagaactgacggcactggatactgctactgttgaggcagaatggctgcgtgatctactaatggatctgcctattgttgaaaaaccggtgccggctatccttatgaactatgacaatcaaacggtaattgtaaaagtgaatagttctaatgataatatgaaatcgtctagacatgtgaaaagacgattgaagtctgttaggaaattgagaaactccggggttataatgttagattacatccaaactgctagaaacctggcagatcccttcacgaagggactatcacgaaatgtgatagacaatgcatcgaaggagatgggtttgagacccatgtgagttatacaatggtggtaacccagtctatgtgatcggagatcccgtgaattagaacctgggaagaacaaaccattagtaaactagaggagagtaccaatctataccctctctaagtgaagatgcatgtactctcgtgagctgcaaggtaggttggttatggcttaatgagttctgttggctttaattagcgaagatgttatcctgcagagcattcttgaaagaactcacctttgtaagcttgactattgatcgcagtctatggagattttgggtgaatcttctaggaagcttactaaagacctaggagtatgacttatacgctccacccgaggggtagtctacagacggtatagtactagataagactctgagtgaaacttgcttgcacgagacttgcaattcaaggcgtagtccattgttcaagttgtgagtaagtgtagtttggagttctaggtggatgttcaaccttaatcggtctccatcgaaccgctggtatataaacagtacatttgaaaaggcaaatctcagtgggattttgagatttggtgggggattgttggaattaatagatgggctaagacccattcgaagattaattatttggaaaatcacaaaagcccacctcatgggatggcatgcatgtggagtttacgaccaccttgcttattctaggagaggaggacctccttaaaagggaggatgccctcctagccacttgaaacatgtgtggtggagagaagagggggaacacacgcgctcgcctcgcctcgcctggcagggaagggcaggcgcgtcgtgctcctcatccttgcgcagatgcagcctccttttgcagttttgttttgctgcggaaaattcggatttgtttttgttttggaaacattccgaaaaatccggtgcgtgaaaacggcgtgaagtccggataagttacgcgcgacttatccggttcggttacacggagtagagatcgtgcgggcgccctgatcaagcgacctatctctatataaaccgagccgccgccttcacgtaacatacgcgaaatcaatctaggatttgcctcctactctgtgctgcgccgtcgctcgtagactactccatcccgctcgccggcgtgcaccagcgatcgggagagcaggtctccggaacctctgccttcgacgtcctgcaccgggagaaggcggcaataaagtttttgggaagcgcttcgtgcgactgctccctgttcgttcgctacggctcgccttcctctccgctcgcgtgctgcgcgccttcgtcgactcccgcaaccgcgagtagttcctgctgagcaaccagtctttccaccacctcggtacgtgttcgatatgttgcgcatatttgatctgttcatgttttactgcttagtttacatgtgtagatctaatgatgcgttcatgctagtttacatctgcaatatcatgatttatttatggaataaattaaatcattatgtgcttataatttcaacaagcaaatgtacatgatacagagagaccatttctgaatttaacaaatttagaaaccaatgtagccatggtccagaagaagtcaaagaaccaatctgactgtatggaggtgtagatgggatcgtgtttgctgcaccaatttctggggaggcatgcgaaggaatgaaagggtgcaaaatggaaaatagcaagaggtggttaaacaccatcatcatgttgccgtaagtatgtaattaggatgctaagcataatttagcaaccgacaactgcatgttttcttagggatttctactactctcgagggatctgtctaagcatttaatggctgaggggtttggctaccatacaggtagcctagcaattaaattgggttagtggagtgtatttggatttttcattgtgctctgatttaatctgcactaatagcttcaatttttcacttttgaacttttcaagcaaattgtttgttttcatgcttctatgtaattggaccccgattaattaaccattgaatttatgccgaaagtacatggcaaagattgtgaaaaagaaatggagtagtactatttgtagatttaaacatatataatttataaacaatttatatgtagcctctgtaagttggttttcttttgaattcaggtaaggtttatctctccagtctagacatcagttttgctacactacagtgtattattcctaatggtatatattacaattgtctatcagaattacgatggtggcatattcaataagatcgttgcttgaggagagaactgggagaatccaaaggttcctaacgaataagttagcttgttttttatttactaagataggcatatggttgcctggtagtgatgatggttttgatgggtaggttttctctaagatggaagacattaatgctccataagcacgatgcaatagtattgtatctaatttagttcttaacgatgatgtcgatgctaaggctccagaacataatttatttatttagatttttttctttcttttacgtttttgtgcttaatacttgtgatcttgtttgaacataatgtcagaaaacttttgaaacatatattgttacttttggttgtttgctttacattataaataatgtcgtagcgttagcacggacatattactagtaaaataagtttaactaagtggaagaaacataaagcactctattactattcttctaatatacactcaaatcttagtttacatctgctaatatacaatcatgtggccaataccccctaacagtgtcctcctggtacttcgagagaccaccctgggttggcgagatacttacgacaacctgtcatggccgtccaaccggggctacatatagaggagtaccctcccttcgaatttgtcttaggaatatatactaacgtggagaaatacccatactgagctatcaccatcagcggcccacctctaatgtcctgcaacatatatgcccaattaatgatatttaataatctaagcaccatgctaacattactaaatactactctatagccgtgcacccgacatagagcaactgataaattagacattaaactcgcaccattacacctctctggtaggctacccacacaattcatataatgcagatataaagtaagaccagtactaagactaagcaaagcaccgaagatatataaagaagagtatttcattaatacggaaagtattacagaagagattacaagagctgctagagccataccgaaaactcttccgaagactccgaggactccgaacactattctatactactacacttagcattataccactaatactaatgtatgaagaggaattgagcttgcttgagtgtgttgagaagtgaagtgaactcctccttttatagggtcggtatgacggttactgatatgcgaaatgtcgattttacccctgtaaccatcatcagcaagcaatcttggatatccacgtgtaaggctaggctgattggacgccgccagggttcggccgaacctgggctggcccaacaggcctccagcttcggcagggtggctgacaggtgggacctcatggcgattttggcagttaaggctgtttccggcggttacacttgacatgtgggccctccgtatccatttgcttgtttaggagtgaggttttctccaatttctctttattttatttgataaattcctgcaacatgttattctccaagtacaagtggaaatatattatttgaaaacaaacatgcattgtaagcatagctaattcttcattattttagttctattggcagtcaaatattgtctgtaacaaccgtcaacgaaacccccaagcttaaacctttgctcgtcccaagtaaaggacgaaaggaaaataaacttggttgttgatcaggagttgctaccattgttatatttaaaatgtacaagtgcatagtttgagtactctctctctcatgttaagtaaatgtgcacggaggcttacccttacgcctaaaaattgtagaacacccgcttctcaccaccttaggcaattgagagacagaacagatcaactggagcagggaactttatactttgtaaccattgcctactcataggttgcacaggagaaactttaattttactagatgctagggcgcgccattgcgcgctgcctgcatacactaaaatacgtccatgtactaaatcaatcaattgataaatatattagtaacatcatatattctatattaactctcctgtgtatatcaatgacaccagacttgagtcagtaatccattctatgtaacaaatatcccatgtaactacaaagtaatgggcactttattatcaatgcaaagcatcccctactaaaacctcagtttgttacactattagttcaaacatgaacacaatgctttcattatataaaaaatataagtaattccgcgtacaaattgctttggtacatacaccaagagaatgcattggtgtcataaataattgatgacaaatttaaaggtcataatctttgcaaataggacaattgaagaacaaagggctcgactttccaatattagattcagcatcgcatcacatcctgaaaaatgtaaacaggttgaaatgaaagcaaacattagctaattaaatcacattcaaaagaacctgcagacctgcaggtacatactaataccctaatagtaacatcttatcatagtgcgcacacactaagggaaaaaaggacaaccttgtttctaggcctatcagtgctagaggaacattgatccatggatgtatttttatgaggtagcagcaatatataggagtattttgcaaaatcacattcatcaagttataaaccaaaaaaaaaaaggattttacccttgaagtaatgccattctatcttctcacagctgcagttttgtagccatatacaggatagtgtaagtggagccaaaattgtagcatatctattgtgtcatttgtggaattactaatattagtatccttcaagctgaaagtgagaaaagcataagtaacttaataactaataagtctccaaaggctcatccatcttttactaatataaaaaaacatagtggcggtgatggtagcattctatgatgaataatattgtactatctttttggtaaatgagtgaatcattccattagatactcatctgtatatgcatgaggccatttcatttaacgtgaactcataaggaaatattttagatttggggataccattttttttctagtttagaacttttgatatatttatgacaaccatcgacaaaatactgatttcaaccaagtataacttcccaattttttgctgaaaactaatcaacgtctagcataagatgcagggatacgcaaacatgatttacatatttataaaaatagtcatgtgcagagcacccacacaataccaagtgaccgctggcccttttgaaagcatgaaagagcagggaaaatagatggctaaatccacaatatatacatgcattttttgcgaggattatatacatgtaatccatacacctttcttaaatgaaatacataaacaacttgcaaaccaaaaataaaagcacaaagggacgcttaaatacataaaaagaagatatattgacatttaaaagaaatcttaatcgtatgagtaaaagctagagaaatactacctccgttttttaatagatgacgctgttgactttttctcacatgtttgaccatttgtcttattcaaaaaatttacgaaattataatttattttgttatgagttgttttatcactcatagtactttaagtgcgatttatatcttatacatttgcataaaatttttgaataagatgaatgattaaacatgtgaggaaaagtcaatggcgtcatctattaaaaaacggagggagtatgtatataattcagcatcaatccatgtatcagtattatatctcagtgctgacatgagtaaaaaaaattgaggtagcaaattcttatattaaaggagaaaaacaacactcaccttcctggttaatgggactttttagcccacagtgcacaaccttttctgtaagcttgcaattcatatctacagcaaagcatttgtagcttgcaattcatctgtaggacaggcatataataaaatctgtcagccatcggcaatggcagtgtgagcatttctattttctttacttaccaaacactgtgaggctctcaacagaactggatagggctctctcaatcatttcatggccaaggtacaacaatcctcatctaacttagatgcttcactttcctgattacaagtttacaacatctccttaaaagttttgaaccataagcaaaatttatgtatatgctatatggaaccaaaaccttcaagatcaaactaaaaggtagtctaaggaacaaaatctatgccaaaacggtaacgataactactatatttgaaaaaatacttgataattccaaaaaaaaatatccacgagattcatttgagtaaataatgagatggaaataaaatgtagccttgaaagctattgtaccaatcaacagcattctgtttactcatgttcaaatgaaaaggagcacataccatgcccagagatttggaagtataaaacaactgaagcatcactcaccatggcttccacaatgtccttgactgtttcaaggctgaaatatttttctatagcctccagcctatagtaacacagaacaaatgagatatacatgaacaaataatacatttttcctaatcagtgacatgaacaatgtggatgctatacatacattcacatgaaaattcatcattatttaagaatataaaaaagcatgcaaggtgaccccattctcagcacattcaaagtgcaaccaatgtatattactaccagtcaattatattaccaagcgaacctagctcccaaagaaatatataaaccacagctttacaggtaatgcaaagattcatgaaccacacaaaatagcactcggcttgattaaatgaattaagaactatatgccttataaatatagaactatctattccatatttccatgacagttttgtgtgtctttctgcagaataatgtaattacactgaaatagatgatggtctgagttctgaaatgcagtccaaaacatttttaccaagcaaaggaaagcatcttgattctactataattcccatgctatgtttaaaagaggacaagattatctagcattccagcaacttctgcatatgacatgttaaagcacttaataatacattctcagtttataaattagaaatatatttacttcttatatgtcttacctacaaataatgctattcttatccggatacacaatatcctcatgtatagaaataatgctgtcatcatgctgagagagagagagaggtcatttgtgaagaagagcaatactgattcagaactaatcatcagctgagaaaaataaatcatattatagtttcaggtttgtcactctatttagtaaataatgttgttccacttttttttgttaatgcgtaagttccaatcttagcatacctttgtcgagttaaaatgataactacacaagtttcttctgtctttgacaccttggtctccacagtttcatttcacttttcaaggatgaatacaaattaccaaaggggtccgtgattgagccctcaagagaatcaagacatgtgcttaaaataagtagtaagctctatcttcaccatttcttccctttctttgtcgtttttttattgacagctttgtagttgatttgagacagtgcagatagtatttactttgatggcatgaagaattttgagaatcaaactgaaatgttgttagaatgaatgggcatgtgtctgatacagtttcccgatacctgggactattttctcattctattcatgcatttggttagcattgagtgcatgaagagtagcaaataagtcaccacagataatgctgtagaaaatccatggccttttcataattaaaccaacttctatcctgttttcattttatcatgccaaaaggaaaagaaagaagaaagaaacatcataatcatgtaacactgtgaggtagcatttcaatgcaatgataaatccctgtcacgttttattgctgcttatttcatttcatattagttccaggtaaaatttaaacaggcacactccgctcttcattataagcttatcttctgtgtttttgtgtagttgaaggagaagaattggggagcatacacaacatgcttttgtgcaagtctattttagatctctagaaaggagacgatccatttggcagaaaatcaaaagaaatccaagaagacatggcttctactcttaaaactgaaaggggcacttaaggtttaaatggcatatatcatgtttcgaagagcttgacgttttatttctgggagttcagacttatgacttatgagagcattcttagctctgatcaagtatattctttgcatcatttttatttgcttactaactttactcttctagccttgaactctctcaaaacagaatgagcggagtaaccttgaattttaatcttgcaagacatttcaatgtctggaaattgacctaagtaaacatgttcagaggggaaaaaaggaagaagagagaaacagctggctgctgggttatgcaaatgatctatagaatagttagcagaaactcgtctggggaagcaaattatgtgcatatttcacgcaggatcatttgcacaaggcccagcttgcgaagccaataatctaatgcggtaacccagtaataaattcgaggttcagagagcattgacattccaactcgatgtaatcgaagtaaccaaatcaccaaataccccccatgaaagcaaggacagcggtattgatttcagtattttacaccccaaaatcagaacacgaattcggccacagtaatccagatcttcagatgcatgaggcccgtcaaatacagcagaataaaaattatcatcagaattaatttagagcctcaactgacctgaatatattgatcaatacagcagggcctaatctggaagctcaggacgacattagcatgatgcatgtttgcatggctccaactcctggactcctgagaaaccaaacatggccttagatattttctcctttaaccacatcaaatcattgaagcaaattacattcaaataaaaagaaataacagaaccagccatagaatatatgcatcacatcattagtaattagaagtcatcagaacactgcaacttaaaatgccagagaaaacacatgtttactgctatcaaccaatagcacttggtttcactggatatattggcatgatttaatttccatatagataccaattaatagtgatgttatcgtgtaataaaaatatactgcatatatggaaagcgagtgattcctttaaaggagcagcttggaatatgttgctcatacaattgaagatgattctaaggaacaaaacctctggaccgatacaatgtaaacaagaccaaaaatcatctggctttgcatcacttgaaacaaaataaagtaaatacatagtctgaaatatacacttcctgataatcttgaaaaatctaaggcttgatgacatattttatatccacggatagtttaacctgccatatttatcttcgccctagcttatctgtattccacaaatttatgaagtagaagaagtatatctgcatatctgacctcatagtactgaatacacataggtaaaagagaaatgcattcttcagtcttggtgagacagaatcaacagttaagaagacactacagatggtcgacatataaaaccactcagacattgttgtggcttggattaagaatgtacgtaccctgaaattagtgtcaggttcaagaaaattaccagcataactggtgcccgtcgcaatctgtcaaattcttcacttacaaattttcctcacttccctttctcctctacacaagccatagaacaaataaatttacatacttttagtaaaagaactatagcagccacatcgaacagtacactgggggaggttcggtttggaattgtggcgcttatgacataggtttcactagactactctagaccttgcaacacatcacgagcttgcaaataagcattgtggtagctaaagcgacaacccataagaaagatcaatgttgcagtgctgatcaatttattttcaccccttgatgcaaatcatctaaaaacctggactaccatcatattacctgaagatgaattattgagagctgaagaacatggaaaattctggtatgcaatccaaaggtgtcaaacctgacatgaaaaaggaaaatgatcagatcaacagaggctcatcataccacaccatcctcaattttaagtcaaccaatctcatattatttgcaattgactgaaacctctgcatgaattaattatttttgtctctcttttccttatggctatcaagcaaccatcagtgaccaactgcagtcccattttaagtatttaacatttaagaaacattaagtacagtaaaatgggagattgagattaacatcttttgaataatagtgccaaatataagctcatcctcctaccagttgtactaaaaaaatttgactgccaataaccaatacgctaactactaaaaaaattcatccagtatgtgaagcttctaaatttttccacaaacacactccaaaatcctattctataactaagtcccaagaaaacctaaaataccaagaaaaatactaagaaagagaatagattaatgcatctagaaatgaatcataacagattgctagaagtgattcgctattgattgttcagagggcaacgagtatgaaatatagctaaccaacctggtcctctgtgttttcagatgtcatggcatggtcacagcaagcagaacaaccagctatggtggaggattgatcagagtcgtttatatgatcctcaagcacaacactggaatgaaaaggtgccacatgtatagaaatacaaatctgaaatattaagtaaccatggggaaaaaatggctcactcattggggaagcatgatatattgcagattccttcaaccaaaaaagccgaaaccaccaaatacaaaacaaattttgagacattacccaaatgcattggctctgaagtgaaatgataggcatgttactgcagatttattcgcggcaaaagagtttcaactttccaatcacccctccacaaacccactccaaaaccctattctataactaagccccaagaaaacctaaaataccaagtaaagtactaagaaagagaatagattaatgcatctggaaatgaatcataacagattgctagaagtgattctctattgattgttcagagggcaacgagtatgaaatatggctaaccaacctggtcctctgtgttttcggatgtcgtggcatggtcacagcaagcagagcaaccagctaaggtggaggattgatcagagtcatttatatgatcctcaggcacaacactggaatgaaaagcccagtcaaaaaaacactagaatgaaaaggtgccacatgtatagaaatacatatctgaaatagtaagttatcatggggaaaaaatggctcactcattgggtaattgcagatttttgatgggatgtctccatctctaaagcagcttctagtattagtgcaagactgcttcactatggaagacatataatcctttgaataagcattg

SEQ ID NO: 29161 - DNA, 628 bp, Oryza sativa
caacatactgagcaaagtccggaatattgtcgtcttccactttatcttcttccatttcaacaccgtgctctccgtgggatgtccaacaattatagcttggcatgaaccccgactcaaacaagtggaaatgaatagtcctggatgcagaatactccttctgattcttacacttattgcatggacaacaaataaaacccctttgcctgttagcttcggccactctcaaaaaatagtgcacgccgtcaataaactctttggaccgctggtcagcgtacatccattgccgatccatctacatgagtcaaaaaaaccgcacacaaataattattcttacaataatgacagtcatacaataattataagatatctttattcatacaaaaatcataaaatattacaccaaataattcttaaaaactatttgtaaagttttaaactaattttaatgtgttttacttcttttaattttcattttagtttggtttctattatttaagattaactttcactagagttttccttctcaactattttataaaaccttgttaagcaaatgaaccaaatttctatatatcctttcttccccacatactatttctctctcatcaaattacaactaaattttgga

SEQ ID NO: 29162 - DNA, 692 bp, Oryza sativa
acagtttaataacttccaagatcaggtagactatgccgtacatcatgctttgatcaatcaatctgggatattagtcaatactttgtcaaacatggtgaagtcgatggttgatggttcaatagctgactatcagactacgggaccggtttatcttcaaggaggtactttcccgaattatcggcccttgatcactgataatcagcaagccgtttaatcagttcctcctttgttatatcgcccttagttgtttttcatattgtaatcggttatggtttgccgatgtataatggccgatattgttgtatcgcccttagccgcttttataattttatcaatgcttgtgacattgtaaaattagggggggcacatatatatatgaaaaattgcatatttttgagccaaatatggggtcatattaaatcggcttaaagattgttgagatgagttacataaagagtcagagtttcttagccgattgcaaaaaaatttctaagacctattacataagatatcactaagacaaatattgctggaaagctgaaatagctctttgcctgattttttctacttcttcaatggcatgggcaccttgagcatcggttacagggatgacttttaaaaacttggtcagatcagcaacatttttgatagccgattttagtcttgccttctgctcttaacaaaatttggga

SEQ ID NO: 29163 - DNA, 788 bp, Oryza sativa
ataaaggattacaaatgcagcggaaaaggtaatagcgagctaagcctgaagacttgactcctgcagcgggcgattccattccacaggcaacccttgacggcagcgacgaaaccaacctctctgagacggctccaattgagaagaacttctactctggtgtgggggaaaagagagcaagactgagtactacccactgtactcagcaagtcataccggaagaggaggtatgatgcaggatataaccaaaggaggctagaggttcttttgcataaagctagcatttaaaagcagtagttgaaggcagtaaaacagttgtagtaattaatcaatattaaccaatcactgtccaacgctacaccacgttgcaacaggccgaaccaaccacctgaactacaccagttcattaagctaaactaggggtgagactaatcacggtgaatctggttgatcgcccataaccgcgggcacggctattcgaatagttttactctggccagaggtgtacaactgtacccacaagacacgattccacacatgtcgccatgccccgaagtatcaccatgatactgcaaagggggaaatcgtgacaagaccctccgcataaccctcccctaaccatccacaccacgctaaggtttcacccccacccctcaaaaggcagtgggcggtcccctcttgcgccacggtgaatccggcagctggacaaccggacaccccggccgacccaactccatcacgcccaccctcgccaccggtgcctaggaaagggtcgagctatacttcagatc

SEQ ID NO: 29164 - DNA, 1992 bp, Oryza sativa
ctatagggcgaagtcgagctcggtaccctgcatgcgcgcgggcgggaagggcggaggagtggggcggcgacgtgggcgcgcggcacgggcggagtggggcgtggagaacggcgggaaacggcggcggcggcatgggcggtttctacggcagcagttggagctccggctccaacggctggaggtgggagaccaccgacaggtggggcccacctgtcggcatcccagagagaggagggaggggcgcatgggccggcccaacaagaggaaggccgagcgggagagggatgggccgacggcccaacaaaggaaaaggagggaaaagaaaaaaaagaaaaagaagaaaggatttttcctgagatttaaaattgcactttggtgatttttaattggttaaaattatttccaaggctctgaaaatttcactaaaaatcctgttaatgcattggagcatggggaactcaagaaaaattccaccacactatttctgattattaagtgcatttattaactagggatttagctctaggttaattaagataatttcttcgggcaatttatttaaccaatttttaaagcaagcaaaagggggaaaacttcagggtgtgacaaacctaccccccttaaacggaatctcaaccccgagattcggaagagctggcgaagaggtgcgggtgggtggccttcaactcatcttctctttcccaagtggcctcttcttctgagtgatggctccactgaaccttgcagaatctgattgctttgtttctggtccttctctcgctggtttcaaggatacgagtcggcttctccacatacgtcaagtcttcctggatttcgatttgatccggacttgcctgttcctcaggaactctcaaacatttcttcaactgggagacgtggaacacattatggatgccaagcatgttggagggaagctcaagctggtaagcaacttcacccctgcgttccaaaattcgatatggtcccacaaagcgtggtgccaactttcctttggtttggaagcggtgtactcccctgagcggagtgacacggagatacacataatcccctgcttggaaaacgagctcccttcggcggttgtctgcatagcttttctgccgagattgcgcgattctcaatctttccctaacagctctgactttctcttctgcctcatttaaaacttctgtaccaaacaactggcgttcccctgtctgatcccagaagagcggagtacgacaccttcgtccatacagtgcttcaaatggtgccatctgcaaactagcttggtaactgttgttgtacgagaactcagcatacggtaagcttttgtcccatgctccaccaaagtcaagcgcacaggctctcaacatatcctctaggatttgattgactcgctcggtctggccgtctgtttgtggatggtaagcagtgctgaaattcaaccgggttcccaattcttcttgtaatttctgccagaactttgaagtgaattggcttcctcgatcagacacgatcttcttaggtacaccatgtaaacacataattcttgccagatagagttctgctaatttcttccctgagtaggtagtgtgcaccggaatgaagtgagccactttggtgagtcggtcaacgactacccaaatagaatcatgccccgatgacgtcctgggcaaaccggtgatgaaatccattccgatttcttcccacttccattctggaatctgaagtgtctgtagcaaacctgctggcctttggtgttctgcctttactcgttgacagacgtcacagagtgctacgaattcagctatttcccttctcatgctgacccaccagaacttttctttgaggtcttggtacattttggtactgccgggatgaatggaatattgagtttgatgagcctcggttagtatcaggtcttttaattccttgttttcgggtacacacaatctttatcccatccagattgttccttgttcgtcctcaaca

SEQ ID NO: 29165 - DNA, 3926 bp, Oryza sativa
ttggtgttctgcctttactcgttgacagacgtcacagagtgctacgaatcagctatttcccttctcatgctgacccaccagaacttttctttgaggtcttggtacattttggtactgccgggatgaatggaatattgagtttgatgagcctcggttagtatcaggtcttttaattccttgttttcgggtacacacaatctttatcccatccagattgttccttgttcgtcctcaacaaaacctcgggcttttccaaccctcatgttctttttgagctctgctatttcaggatcacttgcttgagctatgcgaacctgctccaccagtgtgggctgtgcctctagggcagccacgaatccgtgctcaactataccaaggttcagatgttccaaatcacgttgaacctcacaacatagttgctctacccatgcaacattgcactagctcttcctgctcaaggcatctgcaaccacattagccttgccgggatgataatgtattcccatatcataatccttgatcagctccaaccatcttcgctgtctgagattcagatcaggttgggtgaagatgtactttagacttttgtgatctgtatatacctcacaacggttaccgatgagatagtgccgccaaatctttaaagcatgaacaactgcggctaattccagatcatgcgtcgggtagttgccttcatgaggacgcaactgccgtgaagcataagaaaccactttgccatcatgcatcaacacacatcctagcccctggcgagatgcatcacaatagacctggaaatctttcgtctgatcaggcaggattaagactggtgcagacaccaaccgtcgtttgagttcttcaaaactcctattgcattcagcagaccagataaacttttcttccttcttcaatagctgtgtcattggcttagcaattttagagaagttctcaatgaaccggcggtaatagcccgcaagtcctaagaaactccgaacttgagtgactgtccttggtggggtccatttggtaactgactccacatttgctggatccacagctactccttgagcattcacgatgtgaccgagaaactgaacttccttaagccagaagtcgcacttgctgaacttggcatatagctggtgctcttttaacttttcaagtaccagccgaagatgctgctcatgttcttcctcggacttggagtagataagtatgtcatcgatgaaaaccacgacaaacttgtctagaaattccataaacacctagaggatcccctcatgaagaaggcaggtgcattagtgagtccgaaagacataactgtgcattcgaacaacccgtaccgagtgatgaatgctgtctttggaatatcctcctcgcggatcctcaactggtgatagtctgatcgcaggtctatcttagagaacacagtagctcctttcaactgatcaaacagatcatcaatccttggcaaaggatatttgttcttgatggtgacctcattgagtgcgcggtagtcaacgcacatcctcttggttttgtctttcttctccacaaagataaccggagcaccccaaggcgatgtgctcgggcggatgtatcccttctgtaactgttcatcgacttgcttcttgacttccgccaactcgttggctcccattctgtaaggcctcttgtggatcggtgcagttccaggtaccaagtcaatccggaactcgatatccctttttggtggcattgttgtcagatcgtccggaaaaacctctggatactctctgactatgggaatatcctccagcttcttagtggttttctccactgctacctcttgttcttcaccagcagcctggtttaaactgatccctgacttctgcggcactggagactggaaggttaccacctctccttttgcattggtcaacttgatggtgcggctggcgcaatcaatcactcctctgtgtcttgtcaaccaatccattccaagtatgacatctaggtccttggattcgagaagaatgaggttggctggaaaaatcaacccttgaatttcaactgtcacagatgggcagtagtgagttgtggtcatgccacctccaggagtatgaactcgcattggtatcttaagcttcactaaagataacccatgtgcaccagcaaaacgcttggaaatgaaggaatgggttgcaccagaatcaaacaatattactgccggtgtcgagttgacggggaatgtgcccaatataacctctggtgctgactgcgcctcctctgcagatgcatgattaacacgggcctgaacgaacttgggtccagcacgtcttggcttcgagcactttccaaccgtgtgtccgggtttgttacaattgaagcagagttcgggtttttctcccaacctcttgggctgttctggcagagctggctgaactgattgagctggaatctttagtgaactcggagtagggttgaggctgtgctgctcacggttgttgtgactgccactatggtggttcttgttgaagctacccgggtggtagggacggtactgccggataatcatggtggaaggtccaccgtgatgtcccatcgtggaacgaggcttctgactcttcccctggggagtcctgaactgagctgccttcctcttacggtttactttgttacagtgctcctcctgacggatagccttatccaccagcttctcaaagtcctcataatctctagagatcaactggttaatcaattcatcatcaagaccagacagaaacttctcctgcctcttggcatcggtacgcacgtcctcaggggcgtagcgcgcgaggcggttgaactcatgcaaatactctataactgttctggttccttgttgcagggaacggaactctctcttcttttgtgccacaattccctcgggaacctgtgctttattgaaactatgacaaaactctgtccaagtaacttctgccccagttggacgggtcaccatgtagttgtcccaccaaatagaagcgggaccttgtagctggtgtgtagcaaaagcaaccttctcctgctcattgcattgcaaaagattcagcttcttctcaatggcatgaagccagtcatgggcctcgattgggttggtggtgcttgagaaagtgggcggcttgacacgaagaaattctaatagtttggactgaggaggtggaggaccaaactgcaggttctgttgctgctgctgtgcttgctgctgcacctgttgcaacacctgatggtactgttgctgcatctgttgcatcatcattgtcatcatctgagtctgattgtccaacacctgagcaattgttgggttcttaggcggtggggacggattgttgtcagatgcaccgttggcacgtgctccatcgatcggctcttcgctgccactggcattgttggagtcgcgtgaaccattccttgtctccatctgaaggggataggtagaaatatgagaaaaggaagaaaacaggggctcagaaactaatcttgcttatgaatttaagtgcaattatcttaatcttgattaaaacactgaaaaagaggcacgcaactcctaattgaggcagtcataccactgacacatgatatcgaccgccgactaacccacaagcaacaaacctaaacagaaaactagcaagcaaacagactaagaaggcaataaagctaagggcggcgactctgaagctcggagcggcgcttgcgatcgaggaataggactgacatctaaagtagacaagggataggaaccaattcatgctcaaatccaaattaaacaaagcaacaaatgactcaaataaatactcgagcatgatgatttttatgcatagaacatttttcatgaactcaaatgaggatactgatgcaactggctaatcaataaattaatgcataaaataaatgcatagctataatga

SEQ ID NO: 29166 - DNA, 660 bp, Oryza sativa
ttttgggtactccatccaaacacatgattcttgagagatagagctctaccaaccttttgcctgtataagtagcgtgcactggtatgaaatgagcaactttggtgagtcgatccatgactacccaaattgaatcgtggctagatgatgtcctgggcaaacctgtgatgaaatccatcccaatctcttcccatttccattccgggatctgaagaggttgaagcagtcctgcgggcctcttatgttctgctttgactcgctgacaaacatcgcagagtgcgacgaattcagcgatttctcttctcatactggcccaccaaaatttctctttgagatcttggtacatcttggtactacctggatgaatggagtactgagtctggtgagcctcggtgagtatcagatctttcagctctttgtcatcaggtacgcacaatctttctcccaaccagattgtgccatgttcatcttcgtggaaatcccgggcttttccgaccctcatattctttttcagttcagctatctcaggatatttacatgagctgctctgacttgatccacgagcgtaggccgtgcctctagagcagccacaaacccgtgttctacgattcccaagttgagatgtttaagctcctgctgcaattccttacacatgcccttaat

SEQ ID NO: 29167 - DNA, 6557 bp, Oryza sativa
ttgtaagcaaaataagcaatactaaattatctgggtttctatggttgaattatgcatgtgaaagtagagtattgagtagaaaggttataaataaataacttgtaaaatataggcttaaacgatcaaaatgtgtatagtaacttgccttgctcgatgtcctgagattgactgatattatctaatgtgtcataagattcctcaagaccaagggttaaacatgtaaaattcaaattcaaaagggattcaaataaaatccaaaaataggtaaaaataaaataaaatataaaaatagcaaaagtggtctcaaaagatagagaatgattttagaagaattttggttcaagtttcactggaaatgaatctatattttaaaatatatgggcttctaaagtttgaaaatcaaattaaatgttaaatggtattgtgtgtgggtcccaccgatcagtctctccctctcttctcttcttcaacctccaactgttccccatttacggccggcggcgctagggttagggattatggcagtaataaagggggaaaggtgttgcggccgaagaggggaggtagatagggttccccggcgacggcgagcggcgccggaggggttaatttggtgtgtgagtaacctagcggctagggtggcggtgacatggatgagctgagaaggtgatcggggtggtgagagttaggcatggctcagggaaggttcctagagcatctatgaggtgtctagaaggatttaagtagcttgccgacgttcggcaaggtatggaagatacttgctgacttgcgcctccattggcggtggtcgagctcacgtcggcagtcaagagggtgatgttagtgctaaccaattacgaaaatggaatctaaggagtatgtcgatggttaaaatggaagaactcaccgagataggttgaaccgacggattgcgaccgaaaaatcctctcgccagcaaagaccatagcagagcatgggcgccagtgctcgcctcggtgtcactaggtgtcaacccagagcttcggttagcctttagtatgctagaacatggttgaatataggtgttctatgggttggtcagggtagagggtgcatgaagtggtgtgaagtcgctcgcgcacaaggtgttcgaccggcgggccaggatggttgatcagatggattggtaaagcagagctttggggttgtggggttatggttggtgatactcgatgatggacaaggaaggtattggggtcatacttatagggtcacaagatgtcgatgagctcgggcgccatcaacgccattgatgagctcgaaaattgggtatggcaggggtggtagaggttatgcagcaacgggggttcccgatcttttgatgagaggaggataaacttcgatttggggaagggcacgacgttggcggtccgactacaactaccacaggggtgatgcgccttagcaaccggtacaccgactccacgttgttgctgttcttgccgtgccaagaacaaccttgaacctgtaagcaatcgaagaacaagcaagaacaagatgataaggaaacagctcatggcacctatcctttctcaaatgcaaccaaaccaaatcaccaggttcaaaagtaacatgtttctttcctttgctcccagcaagtttatacttaatattcatgcgctctatgttctccttagtggtctcatgcagttttaacatcaattcagcgcgctgttttgcatcaaagttcactctctctgaagttgggaggggcaaaagatcaattggagtatggggcagaaggccataaacaatctcaaaagggcacttcttagtagtagaatgttgtgaacgattataagaaaactcaacatgaggcaaacattcttcccacattttaatattctttttcaaaacagccctaagcattgtagataatgttctagtcacaacctcggtttgtctatcagtttgggggcgacatgtagtagaaaataaaagtttagttcccaacttagcccacaaggttctccaaaaatgactaaggaattttgtatcgtgatcagaaactatggtgtttggcactccatgccagcgaacagtctcatgaaagaacaaatcagcaacatgtgtagcatcatcactcttatgacaaggtatgaaatgcgccatcttagaaaatctatctacaacaacaaagatactgtccctccccttctttgttctaggcagccctaaaacaaagtccatagaaatatcctcccaaggcacactaggaacatgcaaaggcatatacaaactatgagggttaaggcgtgacttagctttttggcatgttgtgcagtgagcaacgaacctctccacgtctctcctcatcttgggccaaaagaaatgatcagtaaggatatccttcgtcttcttcacaccaaagtttcccatcagccctccaccatgtgcttcctgcaataatagcatacgcacggagctagctggaatgcataacttattagctctaaacacaaacccattggtgagaacaaatttgttccaagtccttccctccttgcaatttaacaacacatctttaaaatcatcatcgtgcgcatattgctcttttattgtttacaagccaaaaattttgaagtcaagttgggatagcattgtgtaacgtctagacaaagcatcagcaatgacattttcttttcccttcttatgtttgatgacatatggaaaaaattcaataaattcaacccatttagcatgcctacggttaagttttgcttgacttcgaatgtgtttcaaagattcatgatcagagtgtataacaaattctttgggccataaataatgatgtcatgtttccaatgttcgcactagagcaaacaattccttatcataagtagaataattcaaactaggcccactcaatttctcgctgaaatatgctacaggtttgtcttcttgtaacaacacaccacccaatccaatcccactagcatcacattcaagctcaaaagttttgttgaaatcaggaagttggagtaaaggagcgtgtgttaacttatctttcaaagtgtcgaatgcattcctttgtgctgcagaccaagtgaatgtcacatttctcttggtaagctcatgtagtggggctgcaatggtgctaaaatccttcacaaagcggcgatagaacccagcaagtcctagaaagcttctcacttgtgtgatagttgttggaaccggccagctatgtatggcttcaaccttggcttgatctacttcaattccctgcggagtcataacatagctaagaaaagagactcgatctgtgcaaaatgtgcacttctcaaggttaccaaataaacgtgcatctcgtagagcatcaaaaatagcaggcaaatgaccatgatgatcctctattgatctgttatatatgagaatgtcattaaaatataccaccacaaatctgccaatgaaagcacgtaaaacttcattcattaatctcatgaaagtactgggtgcattagtgataccaaagggcatgactaaccactcatataggccgaatttagttttaaaagctgttttccatttatctcctaacttcatgcgaatctagtggtaaccactacgcaaatcaattttagagaacacaagtgaaccactcaattcatcaagcatatcatctagcctagggataggatgaggatatctgattgtgatgttgttaattgctctacaattcacactcatgcgccatgagccatctttcttaggaactaaaagcacggggatagcacaaggactaggagactcacgcacataccccttgtcgagtaactcttgcacttgacgttgaatctcctttgtttcctccgagtgggtcctgtatggtacacggtttggcaaagaggccccaggaatgaggtcaatttggagctcaatccctcgaattggtggcagccccaatggaacctcctttgcgaaaacatcagcatactcctgcgaaatgttagtgaccggagaaggcaaagaaataggagtatcctcaattggaaataaagtttgtttgcaaaccaaagcatagcaaacaacagtgtcagtgtcaacttcatccaaatctgattttgtttcaatgaaacaagatcccttcagcttaatctcatttttattattttgaatagagttggtggatttcttcttatgcttctcaagttcattagccacaatatgatgctagtatgctcctgtttttttgtttgctagctctagcaagttcattctttaaaataacttaaagagacataggatgtaacacaagtttttttccattatgcacaaaggagtattgattggatttgccaaagtgtaaggaatctttatcaaactgccatggcctacgtaataacatagaacaagcttgcatagacacaacatcatagttgattgaatcatgataagaaccaatggcaaaatgtactcttaccaatcgtgttacctttaccttgccgctgctattaagccattgaatatagtagggctgcggatgtggctgtgtgctcaatgcaagtttcttcaccatttcagcactaaattattgcagcttcatccatctatgatcatgcgacaagagcgttccttgatcacacacttggtttgaaacaaggtgtggcgctgattctgttcagccccttccatttatgcgcttagcactcgctgcaccacgaggctctcatagtcctctgcagcctcggccccaatgtgttcctcatcttggtggggcgcgtcgccttcccctgcattgttagttgcaagcaaagcataggtttcttcatctaaatcactagcggaggagtacccaccatcagctctcacgatcattacacgagtgcttggccagtccttgcgcacgtgaccaaagcccttgcagcgtaggcactgaatatctcttgtccttcctgataatgccactgatgatgagctcttggaagatgtagcagcaacccctcttgtgggttcactcgggcatggtgtagagtttgttgtagagggacgcaacttgttgcttgaggacgatggtgctgctgctcgagttgacggtgcagcagcgttggaaggggtccaagagctagcacgacctgcagaaatgttagtcctgaagccagctcttcgtccctgcacttccatttcagctttacaagcaagatgaaacaaacgatatattgaattatattctttgtaggctagaatgtcctgaatttctcggttcagcccacccatgaatctatccataccagcatcatcattttccaccaatccacagcaaagcattcctgtttgcaaagcttgataatactcttctacagatttgttttcttgtctaagttgttgcaatttatgcaacaaatcacgtgcatgatatgaaggaacaaatctagatcgcatgaatcttttcattgcatcccaggtttggggagtgttatttggattggaacaaacaaattcactccactaaatggatgcaaaatcagtgaactcactagtagcaaccctaacacgtttattctcaggaaaatcatggcaagcaaatttctgatcaatggctaactcccaagtaagatatgcatcagggtcatattttccatcaaagcaaggaatggtaaacttgatcttgcctaaagaatcatcattatcacgtgcctcccgccgtggtggagcgcccatgccatggcgctaccggcactgttgtcttcgttgacgaccaagtacctcctcatcatgctcggtgtcagcagcgtactctagttcttcccttgctgcgatgctgctattagcatcatggccattgtggttgcgcctagccgatccatcatgaccatctttgctcattctctccaatgtattcaagatacctgcaagagaagtgttcacagccacaagggacctctccaatgaggaggaaaacttggagttggtgtcaatttgagcagcctccaattgaccaaggcgatcattggcgaccctatttaggggtaggtatgacggttatacaatgcgaattgtcggaaatgccccgcaaccgccatcaggagatgatcaagaccgtccacgccaaaccccagcctggatggctgagattgtggttcggccgaacctcggctgaacctgggctagtgtcacgcccagaaatttagcccaaatttccagactattttgtgtattaaatccctgtccaggaccagccagggtacacaaaacaataagtaatatacagttccaaacgtaaataaagcgtaaaatacttacagaagatgcacttagtcctcacaccgaaacaaaagcagcagcagtggaaaaaggcgatcctagcggggcttcagctccactccacaggcaaaactcgactggggtctgagccttggtcttctaacctcgtcttcagctcagaagcactacacttctgaaaagggggaataatagcaagactgagtacaaccaccgtactcagcaagccacaccaacgatgcagacgtgcaaggggacacaaggacggtttgtggctatttgcataaaggcagttgtaa

SEQ ID NO: 29168 - DNA, 5169 bp, Oryza sativa
tccagactattttgtgtattaaatccctgtccaggaccagccagggtacacaaaacaataagtaatatacagttccaaacgtaaataaagcgtaaaatacttacagaagatgcacttagtcctcacaccgaaacaaaagcagcagcagtggaaaaaggcgatcctagcggggcttcagctccactccacaggcaaaactcgactggggtctgagccttggtcttctaacctcgtcttcagctcagaagcactacacttctgaaaagggggaataatagcaagactgagtacaaccaccgtactcagcaagccacaccaacgatgcagacgtgcaaggggacacaaggacggtttgtggctatttgcataaaggcagttgtaaaacattttattgagcaaaatactaaaactgttgagtaattaaggtaatattaaatctccactgatcaacgctacaccacgatgaacaggcccaaccaacccacctgaactacagtgcattgagtcgattcattaaggtgggactaatcacggtgaatctggtcgaccgcccataaccgcgggcacggctattcgaatagttttactctgatcagaggtgtacaactgtacccacaagacacagccccacgacacgtttccgtgcgccgacatgccaccacgacataccggaaagaggtcgtgacaggatccttcgcataccctctctagccaagcacaccacacctcaggtttcacccccactcctcgcaaggcagcgggcaatcccctctcgtgcctaggtgaatccggaagcgacagaggccgtcgcagggcccgccccgctccatcacacccacccttgcctggatgcgtcggctagaggaaagctacactacaagcccagccgttgcccacgctggcttgtggtaagtacgagaaattcttccagggtttcccgtgaaccggtccttaattgccatgggtgcgactagcaaaaccatgcacccacagcccacccttcagtcgcattttagttggataattatgaccatgaagcatggccagatgtctcgagcacgcagctcattctgatactaaaaggtctaatattgtaattatcccatcaactgagctagtggtaattaagcatggctaagcatatagttctagctaggtcacataagtaacatgagctagtcgatttattacccaatgttgacaaaggacatatatcaagtaaatatggcacaagcgagcagataggtaaaccctgatcccatgtaattagcaaaacacgcatatttatttgcaaatagtaaaacatttgtaaattgggatcaacatgctaaaggggaatgtgtgacttgccttgcttcttcactttgatcttccgaactcttttcctcgtgaccgcggacttccgaaacgacgagaactacacgctggcacgcaaaacaaggaaaaactctaataaaaaccaagaaaacggtatataaaaagtaaacaaacatgtagagctcaattttagatgaattttgcaagttgaatggctcaattcggagttcgaatgaattagatatgaattttagaaggttttgagccattaaattaatatctataattattaccaaattattgcgcaattattaaatattttcacaaaggaaaaggactgccgctgacgttagcaagagagggggccggcgccgacaggcgggtcccaggcatcagtggctcaagggggctcggtccaccatggaccgggaccacaagggcggtccaccgcccgtccacgggatggacggcccagatcggcccaagccgatcgggcggctgaggagagcggtggccgggcacgggcacagccggggctggcccgaccgaccacagagggcggcggcgcgcagtcaccagcaacggcggggggcgggcggcacagggagcagcggcgcgcagcgcgggaagcggcgagaggaaacggaggcagtgagggagagggaggtggcggagctcaccgaggggcacggcgacggcgagagcagccggcggagggaggcggcggcgctccacaggtcgacaatgagaaggggctcccggcggcggaaggcggcgatcgggcggcggacggggaagagcgggacgcggcgaagccgggggatgcgttgcggcgacagccagggtgaagccgaacggcgaccggaggcggaaaaaggcggccggtagggtggtatggcaggaaggtggttctggtggtggaggggaaaaatggatgggcggccgagcttgccctcgcggtggtaaagctaatggcggccgcggggtggctgagagcagtgaggtgtggccggaggcgacgaccggagtggcggaggatggtaacggcttgggtgggtggtggaggtgatgactcggccacggattggtggaacgaggcagtggccggtgctctgcttggagcggcgaagccgacactggcggtggtgcggcttggcggtggctagcgtggcgaggagagcggccggagttcggcggcaagcggcggagagaggttacatggtggggaggtggttccgatggcggttgaaggaaaccgagtggaggccggcgtgcggcgcgggatggcgaagctgatggcacacgcgatgaggcgcggcgacggcgggagcagcggcggcgcgcggctggagatcgccggcgagcggcggcgatggggatcgacgtggagagctcggtagagggcgtgggggactcgggaaaacggggaaaaaggaagaggaggccacgaggattgattttacagctcaagggggcgaggagagggccggggagcggcggatttcgagggggagtggggcggcgtcttgggggtggtgccggcggtttttcgcgggacggagtgggggaggggagcggggtcgtgggtgacgaggtcccacggtcgggcaggagtggtgcagggtggaggaggtgggcggggaaagcggtgacgtggggcggctcgggcggccatggcggttgcagccggctagccagaggaaggaggaggaggggccgtgggtcccacctgtcggccaaagcaagagggggccggttaggggaggaaaagaggacttgagggagagggaggggaggagctgggccggcggcccaaaggagggaggagggcggccgggccggaggtgaagggggaaagaatttgggccgagcccaaaagggaggaaggggaagattattttattttctttttatttaaattgattaaatgaactttgtattattataattacttcttgagctccgaaaattcacggcaaaatttcagagaatatttagggcacaaagaatattacaaaatattctcgcccaatgatttttaaaggaaatttttaattccctcaatatttcacttgattaaattgctttaacttttatttaatttctggaaaatacattatttaatgatttttaatcccaacgaaaatcggggcgttacagctaggcccatctggcctggctctttgcgcatcttcccccctgaccttctctacctatttctcaggattttgggttgactctcgggtattttgatgaagttcataacccatccttgtatggatacataattctcctcactttagtctagatttcctcccaacatcgaggtttatcacctgctgacggagcatgggggtcctcaccgggagaccgcgcaggcccccctttgccggttcggccgggggcgctaagtgaggttcttcgccctcgatctgaggaacgtccgcgagagaggaagtgcacaagacacgggcgacgtagataggttcgggccgctgggaagcgtaacaccctactcctgtgttctggtggatctgtgcgtgaaggaatacagagagctggagagcgagccagagttcagggtctagcacccattccccttttttctcctccctccagagtcccctttctttttttcttttctcttttctctccagagtcccccccttttaggcctgggcaccctttttatctggtcaggggtcaccacaagggcctccagctgcctaagaaaggaaacatgctttttacaatgagggctagtctacagccggaagtgacctctgacaagcagagcacacgcctcctgccccgctcgcccgcttttccggtggacgcccatttcaaccttcatttaatggccagcgacttccttgccatacttgcgctgaagcctggaatggttctgaccgggactaacataccaactccaggagttagcacgccggctccggctagggacgagagccaggaagctctcatcattccgacgggacggggcgaggcgtgtgacaggccgcctgttgccacctaacccgtgatctgaccggtctgtgaccggtcacacaccgcgactggtcacggaccggataagcgtgcgctgcgtcgcattaaatgcggcgtggcgcgctcgtccaacctgttataaatgcggttaggtgagccccgcagtgctcacctaactcacacacgtggcgccaaaaccacagggggtcggggcgtcgcagccctcggggccgaaacgggggcgccccagccctcagggccgaaacgggagcggcccgacccctcggggagacagagggaggggtggccacttcaccctagggcccgaccccccccccccccgagggggtcaggccacgtgggtgaccgcggctacccaagcctctagtcacgatacccctggccccatgtcaccgacagtagcccccggcgttacgccagggcgatcgcccccctcgagggaagcgctcgggcgtgacgccactccttaggcccggtgacaggtggggccggtccctacaggcgggcagaaacccagcggtcgcaaatcgcgcgcatcagcaagggaaaaccgaccgacaataatgagcggcttctttaagactgctacattactcgagcagcgcgcgaatcgggacgagccggttcgtttcgcctggagacatgatgatggcgcttttcacggttggcgagcgtagttaatgcgcgcacgatctgccccatctcaaccgccacggccgcacatttgccgcgtgcgccgcaaacgagcgagtgggttagtggaggcgtgggcgcgagaagccgggtatagcattggcaagggcctaaccacgtcgagtaaggaat

SEQ ID NO: 29169 - DNA, 1861 bp, Oryza sativa
  unsure (1)..(1861): unsure at all n locations
aacccagcggtcgcaaatcgcgcgcatcagcaaagggaaaaccgaccgacaataatgagcggcttcttttaagactgctacattactcgagcagcgcgcgaatcgggacgagccggttcgtttcgcctggagacatgatgatggcgcttttcacggttggcgagcgtagttaatgcgcgcacgatctgccccatctcaaccgccacggccgcacatctgccgcgtgcgccgcaaacgagcgagtgggttagtggaggcgtgggcgcgagaagccgggtatagcattggcaagggtgtaaagacgtcgaggaagggattcgttcctttcctctcgccactctcccccttgccttcgccacttgtgctctaactcttcgtttcctgtgccctacccttgccgcactcgctcgctctcaagctcctcctccgccggcgtcatggcacggagctccgcaccgctcgacggtagcgtgctgccgccttcccgcatcgtgagcgagaggcaggccgggctgccgcgccgattcatgccagaatccgccaccggccgggaggtggtcgcgctgggcgagggacgcccgacaccacactacccggggcggtccgtcttcttcctctctttcgcaatggcggggctggtcccgccattctctatttttttcatggatattctggagttttatgatctccagatggcgcacctcacccccaacgcgataatgacgttggccatcttcgcgcacctgtgcgagatgtttattggggtgcgcccatctctccggctgttccggtggttcttcaccgtacagccggtgtcgccgccgacggtagtcggtggctgctactttcaaccgcgggggcaggtgctgaaccggtacattctctgcgtncttcngaaaaaagtgggatgacttggaaaagcgantgggtctacaccccccctcgccgaccaagcgcgccctccgactttcgaggccagcccccggcgcaggcctccagctggcgggcgacggtagatctgggagacggctacgacgccgttcttgaccgcctggcgggtctgcgatcccaggggctcacgggggccatggtgttcggcgactaccttcatcgccggatcgcgctgctccagcggcgcgcccggggcgcctgggtgtacaccgggcccgaggactacgtgaggacccaccaggggcgcaaatgggacttggaccctgaggacttcaggatggtggtccaacgggtgctgaatctcagctccgtggaggcatccctcatcccccaaggggtcctccccatctgctgcgatccagagcgcgccaagatcctggccatcatgtaggtggtcggggcgtcggggagcgggccccccgaggccacgatggcgcgggcgggagccgcaggagggaacaatctaccccgggagggggtcgtgcttctgggccccgcgacgggggcccgggggtatccgccctaccgacgcccgggggaagaggaagcaggagggtacccctcccccatctcctccccgagggggcggggcggtgcgtgccagcagcaggcgcccggagggtgctgtgtcgacgccgcagcccgagggggagcgaaagaagaaacggctccgcaagatggggggaccgagccatgccgggagagcctcatctcgcccccgaggtggtcgtttagccgacatccccgcaggttcgtccccgcgcccaccgcgagttttcaaggcgagttttcactcacccgtttctttttgtcttctggtttttcttctgcctaagcgagatcccgtcgcgccctccccgccattccaagtccagccggtctgaggccgaggagacggcgaccgcggagg

SEQ ID NO: 29170 - DNA, 3246 bp, Oryza sativa
tttttcttctgcctaagcgagatcccgtcgcgccctccccgccattccaagtccagccggtctgaggccgaggagacggcgaccgcggaggcccggaggcgggaagctgaccggcgagaagccgcggaccgcctccgggaagccgaggaggctgcccaggaggccgtccgggttcgccaggctgaggaggccgctcgggaggaggctagactccgccgggccggggagtccgtccgggaggcagaggcggcgcgcgcacgccaggcggcctgccaaacccccgacccgactccggccgaggcgacgccgacttccgaggccacccacgacgaggccgcgggcgcgccgctcgggcccgacccctcgggcgacgcttgggacgagccaggttcgggggacgcccccgagtccggcacgtcgatcggcgggccgagccgcgcggcacccacactgaggcggctcttccctctgccttccgctgccccactgagcgcggagcccctcctgcaggccttggccgccgcgaacagcacggtgctggacgggttaagtgcccagatggaggccctgcatgcggagcgggcggagctcgacgcggcgtgggcgcacgtcaaggagggccggcgctcggtggaggccatggtggaggcggcccgcaaggcacaccgccggcacgcctcacagctcgaggcccgtcgtagggacctggcggagatcgccagggaggtggagaagaagcggaagactgccctcatcgccaccgccgtgctcgacgaggcgcgggacgacctccgcctccaatacgggagccgggcggcggagctagaggagaagctcgacgctgcccggggagtccttgacgccgccgctgcccgggaacggcgggcggcggagaacaaggcggcgtcccggcagcgcgaagaggcccttgaggctcgcgccacagcgctggaggagcgcgcccgcgccctggacgcgaaggagagaaacctggcggaccgcgaggccgcctgcgctaaagaggagtccgcactccgcctccgcgaggacgcgctcaccgagcgggggcgaactctcgaagaggccgagcccgcggcgcagcgactggcgaacagcctgttcctccgcgaggcagcgcgggaggagcaggcgcgccgcaatctggaaggcgcccgccccgagagggccgcactggatcaacgggccgctgagctcgaggcgcgggccaaggagctggacgctagaagccacaacggcggggcggtcgcgggccaccgcgacctatccgccccgcttctagccggcgaacacaccatctgcgagctggagggcgcgctggactcgtccgccggggaggtcgaggccctccgcttggcgagcgaggtaaggccccgccatgcttcgggcagcaggcgggcctctggggcgggcggtacgcgaagtacaccgccaaccaggggggcctcgcccagcgcctctcagagatggccggggccctcgagcggctccccgaggagctcgaggagacgatcaagtcatcctcgagggacctcgcccggggggcggtggagctcgtactggcaagctaccaggccagggaccctgacttctccccgtgggcagcactggaagatttccctcccggaaccgaggacggcgcgcgcgcgcaggtccgggattccgccgaccacatcgtccacagctttgagggtacggcccctcggctcgcgttcgccctcgacttcgacgaggagggcggtgacgacagtgcggacgacagcgacgacgaggccggcgacccgggcgcgtcggagtgagcccccaaggccccgccaatcttaataacttttccttcttcttccgaggccttcgggccccctttttgtatagactgatttaatctgcaatcaagtaaagaggaaatttctgcgtcagttctgtttgttgtgtgtataagacgaggatggtctgtgccgcggtccttctgtgtcttggcttgaacaagggctagtgcccaggtcccagcctcaaacggcgcgggtcggggctagtgcctggggagatccacgtgtcgagactggccaggccgggagagcggtgaccgagggttatggatgacccgattgtgggcctttgccgattcccccccggagttcaccacgccccgggaaacggctcggttctgggccccatttggcgattttagccggcccgggccaccgagggcagggtcgagcacgagcgtgctaattcaagccaagattcttcaaaaggaaacgatggcacagacacagtcctcaggaaatcgaaaatgcttttattgaaatacggaagagaaaaaagataagtatatgcatgtggtagcccccggccaaccctgcacgcccgggggggtgcggggttggcccgagcccgagacatgacacccgacccccactaggggtagaagcgacgaaggtgttcgatgtttcacgggttaggcagctctgtgccgtcgcccgtggccagccgaatggagcccggccgggggacgccgatcactcgatacggaccctcccacattggtgagagcttgctcagtccggcacgcgtttggacgcggcgtaggacgaggtcgtcgacgcagagtgatcgggcccggacgtggcactgatggtagcgccgcaggctctgctggtagcgcgcgccgcgcgccgccttcgctctttcaaatagtcgaggtcgtctcggtgaagctgatcttgatcagcctcgcaatacatggtgacccgaggggacctcagggtgagctcagatgggaggaccacctccgcgccgtagacgaggaagaaaggcgtttccccggttgctcggcttggcgtggttcggttcgcccagagcaccgctggcagctcctcgatccacgagtcgccgtgcttcttgaggatgttgaaggtcttggttttgaggcccttgaggatttccgcattggcgcgctccacttggccattgcttctagggtgggcggggtaggcgaagcagagcttgatgcccatgtcttcgcagtagtcaccgaagagctcactagtgaactgggtgccattatccgtaatgatacggttgggcaccccaaaccgaacagtgatgcccctgatgaatttaagcgcggagtgcttatcgatcttgatgaccggataaagcctcgggccacttagtgaacttgtcgacagcgacatacaaatactcgaacccgcccggggcccgcct

SEQ ID NO: 29171 - DNA, 2279 bp, Oryza sativa
gtatggtctgcagggcctgggccggccgatgggtttgcctggcgtggaactggcacgccctgcaccgccggatcaggtcgaccgcatcgttgagagccgtcggccaatagaaaccctggcgaaaggccttgccaaccaaggtgcgtgaggcggagtgggctccacactcgccttcatggacatcggcgagaagctcgacgccttgttcccgaggaatgcacttcaggaggactccgttagccgcgcgccgatagagggtcccttccaccagcacgtagcgcttggagatgcgccggacgcgttcactcccttcgcggtcctcgggtagagtcttatctgcgaggtacgcctggatctcagtgatccaagcaatcaatctaggggagctgggagcgctcccctcgggccccgaggcctggactccgacgggcctcgggggccgttcaggcgcgtccgtctcccctagggggtcgggtcgcgccgacggctgggcaagcctttcctcaaaggcgcccggtggggtctgggctcgcgaggaagcgagccttgagagttcgtcggcgaccgcgttatcccgtctgggcacgtgccgaagctctatcccgtcgaaatggcgctccatatgccgcacctggcgcacgtaagcgtccatctgcgggtcagagcactggtactccttacagacctggttaacgactaactgggagtcgcctaacaccaggaggcggcggatccccagtccagctgccactctgagccccgcaaggagtccctcgtactctgccatattgttggtcgcccgaaaatcgaggcggaccaggtatctgaggacgtctccgctcggcgaggtcaacgtgacccccgcaccggcgccctgaagagacagggaaccgtcgaactgtatcacccagtaggcggtgtgaggcagctgcgaggggcccgagctggcctcgggggcggagacgggctcgggagctggggtccactccgccacaaagtcggcgagggcctagctcttgatcgcgtggcgtggttcaaagcgcaaatcgaattcagagagttcgattgcccatctcaccacccgtccagtaccttctcggttatgcaagatttggccgaggaggtaagacgtaaccaccgtgacccgatgggcctggaaataatggcgcaacttcctcgaagccatcagaatagcgtaaagcatcttctgggcctgagggtatcgggtcttggcgtcccggagggcctcgctaacgaagtatacgggccgctgcacctttcggcggggccaatcctcttcgccaggggccgcatctccagggcgctcttcgtccgagaggccacgcggggcgcactcgcttctgtgccgatgacctcggggtcagagggcgacaggcgcagccttcccgcagtggccccggggccatcctgggggtcgggggcgcctggcaccgtcggacaagcagcggagggccagctccgaccgtcgggggccttgggccgccgttcggctcgggggcctctcctccctgctctctcccgggtcgagtcgacacagggtggggatgcgcggagtgagggttgtcctcgtcgcgctccacgaccaacgccgcgctgaccacctgcggggttgccgccaggtagagtagcaacggctcatctggctccggggcgaccaggactgggggagaactgaggtacgccttcaactgagtgaaggcctgctcagcctcctccgtccaggtaaacggcccggagcgtttgaggagcttaaataggggtagcgccttctctcccagcctcgatatgaaccgacttagggcggccatgcagccggtgacgcactgcacatccctaagcttgctgggggggcgcatccgctctatagctcgtatcttctcggggttggcctcgatgcctcgggcagagaccaagaacccgagaagcttgcccgcaggcacgccgaacacgcacttatcggggttcagctttatgcgggtggagcggagacttccgaaagtttccgctagatccgagagtaaggtctcttggttgcgcgtcttcacaaccaagtcatcaacataggcctcaacattgcttcctatctggctacccaaagaaattcgagtagtacgctgaaaagtaggacctgcattctttaacccgaaaggcattgtcgtataacaataagttcctatgggggtaatgaatgcagttttttcctcatcctccctagccatgcgaatctgatgataaccagagtatgcatctagaaaaca

SEQ ID NO: 29172 - DNA, 671 bp, Oryza sativa
cccctttcggggggcccgcgaagcgccctcgacggcgaggacgtgaccctcgtcgtcggaacgggccgaccccttctttctcctcctgtcccgccgccctgaccgagcggcggacccgggggcggccgaagctgccacaccagaatcggaggagttccaggtccaggcctcctccttttgagccacacggtccgcgagctcaaaaagctgcgcggtggtctggggctccttggaggcgatcttctcgagcatgcggttgcgccgtacgccccccctgaacgcgtagatcaccccgtgtgcggggatgcacggtatggtgttgcggacttgacagaaccgctgaatgtacgagtgaagagactcatcgtcccttcgctgtaccgcatgcaagtccgcttcttcgcctgggcgcggatatatgccctggaagttcatggtgaactgctggcacaaatccttccaagagtggaccgacgcgggtggcaagttcattagccaaccccacgcctgacccttcagggccatggggaagaaattcgccatgaccctgtcgtcacccccggcggcctcgatcccggtcgtgtagatctggagaaactcggcggggttgacgcttccgtcgtatttttcggtgatgggggggccggaaccttggggccaacggacgttcc

SEQ ID NO: 29173 - DNA, 696 bp, Oryza sativa
aatttgatgaacaaggtgtttatggaatttctagacaagtttgtcgtggttttcatcgatgacatacttatctactccaagtccgaggaagaacatgagcagcatcttcggctggtacttgaaaagttaaaagagcaccagctatatgccaagttcagcaagtgcgacttctggcttaaggaagttcagtttctcggtcacatcgtgaatgctcaaggagtagctgtggatccagcaaatgtggagtcagttaccaaatggaccccaccaaggacagtcactcaagttcggagtttcttaggacttgcgggctattaccgccggttcattgagaacttctctaaaattgctaagccaatgacacagctattgaagaaggaagaaaagtttatctggtctgctgaatgcaataggagttttgaagaactcaaacgacggttggtgtctgcaccagtcttaatcctgcctgatcagacgaaagatttccaggtctattgtgatgcatctcgccaggggctaagatgtgtgttgatgcatgatggcaaagtggtttcttatgcttcacggcagttgcgtcctcatgaaggcaactacccgacgcatgatctggaattagccgcacttgttcatgctttaaagatttggcggcactatctcatcggtaaccgttgtgaggtatatacagatcacaaaagt

SEQ ID NO: 29174 - DNA, 512 bp, Oryza sativa
tgctgtggaccacaatgctcgagacattcacccttcctgcgggtacagaggacaaagtgaaaaggtggactctgaagaaaatggcagaacagtttcagagcttcaagggagatctgtaccagaagtatatactgaaggggcagacaccgaacttcgacacattcccaaagctaagggatcactgggacgagttcgttgcatataagacaggtgaacaagggcaggcgatgatggaaagaaacaaagaaaatgccgccaagaagaagtaccatcaccacttggggtcaggaggctatagcgtcgcgatgccgaagtgggagcagatggaggctagcttgattgagaggggtatcgaaccggcaacagccaattggccggaacgatcgaagttctggtactatgctcacggtggaacgctcaacccagctgatggctcactggtcttcggctatcagatacgagaggctgcgcgacgactaacagatgcagtggaagcctcctctcagggcacg

SEQ ID NO: 29175 - DNA, 1601 bp, Oryza sativa
aattgagatccagtgcagtcctaactgtgactgcaacttaggaactacacattatctcagccatccattttttcaatgaacggtctaaatctgatggtacagtgttgatgctatagtagttctataatttttttcggatgtgaacagtactttgtagattttggacccttggatttgcatcaaaaggtcttagcgtgactgcttatgttgcagtcacactaggtactgcaccggattcaaatccgtttttgagatgtcagtcaccaaacatactgatccctgcatggtatagctagctaacgtctggctttttcaatcgactccttcaatgttcaatgtgtgtacccagacacgccgtagtggtttcccttaatgctcctgtttacttttcctctgaatttagtagtagtagagttaatttacggtcgtctaacagatccagtgcagtgctagtatgtgctgtagtacgaaagtaaaccactttaatgaaagatcctgtcgttacaggcttagtatttaaatgatgttcgtcccgtacataaaacaggggtgtaaagaatttggatagcttccgattgatccggaagatttttagaaatggatagtaccccatccgtctccaaaagttaattaatttttcatacaccccacacacacgaaaataaaaacaaaaagacaaataatccactttatcaacccaatgtaattattcccaattttatctattttcaattgtgagacgataggactcaacgcgataatcgtattgataccgatgtggagtatatataggcacacaaccttcctaaatctactcaaccaatttatataaacagaaccaagagagatataaggagattgggccacaaggaaacaaacgatctacatgccaacatatatgcgtcatgctaaccgccccccccccccgggagagcagtcttagcgtcggctggccaaacgttaagactggatcggaattccgaaaacacagtcgagggcaaacccttggtgaaaatatcagcaaactgcgatgtggtaggtacgtgtcgaacacgaacagccctgtggcgacacgatcacgaatgaagtaaagatcgatctcaacatgcttggtccgttgatgctataccaggttgatagagagatacacaacgctgacattgtcacaatagacaagagtagccttcctttgaggagtgtgaaactcatgaagaagttggcgaagccagcaggtctcggcaacagcattggcaacaaccctgtacttagcctcgcactggagcatgaaactgtgttctaacgctcggaggaccaggagatgaggttatcacctaagaacactgcatagcctgaggtagaccaccgcgggtctggacaaccggcccaattgacatcagattaagacaccaggtcaatagtgggacagcgatgaatatgaagactgtaatccagggttccatgaacataatgaatgatgcgcttgagagtagcaaggtgtggctcctgtgggtcatgcatgtgaagacagacctgctgaacatcatatgaaatgtccggtcgagtgaaggtgagatactagagagcacctgcaagactgtgaa

SEQ ID NO: 29176 - DNA, 973 bp, Oryza sativa
cttggctcatttgaccatcgtgtggtcgttgatgaccggagagacaccgagttgtggtggtggcgccgagatacgcggaacacgggcgctgccaggacgcgtggtggcgctgcttggtggaaggagccgcatcaggtcgggagccagtgcagcagcagtcgggaatggagtcgctcgtgtggtcgaagaggcggctggcggcaaagcagaaggcaccgagccaagggaccatgtcccaggggaggcaggtggcccgaggcatgcaggcggcccatgtgacaccgcccacgagctagaagatgctggcagcccaggtggtggcgaaggtggcccgtgaggtcgtggagtcaatggcccacgggaggtggccggcccatgctgtgagccatcgtgggaggctgaccctggttgtgcagttatgcggcgacgcccgatcggacctggtattgttgcagaaaaatcctcgagaaaatcaaggttagtagcatctgcattattaactatctcagcatatggaaacgagtgctcatcaaaccccacatgacacgaaatgtagatcctattggaggaaggaccaaaactcctgtaccctttgtgatccttaggatatcctaaaaatactcacatgatagagcggggggcaagcttgtggggtgtggtggcggataggttgggatagcacttgcagtcgaaaactctgaggtgtgtataggaggggtgtgcaccataaagggagaaaaacggtgtgtggtgtgtggagagtcttggtgggatggcggttaatgagatgggtagctgtgtggagggcttccacccaaaagggcggtgggaggctagcctgaaacaggagggagcgaactatgttattgagggaacatagcatgcgctcaaccataccgttttggggggaggtgtgggggcagaacaaacggagagagacaccgttggtgagaaaaaatactttgggcgctag

SEQ ID NO: 29177 - DNA, 1844 bp, Oryza sativa
gtgccggtcgccaggaggagagccgtccagaacgccgaagtgaacactggatcccgatcagagacaattgacacgggaacaccatgtagccgaacgatgtctgcgaagaacgcgcgtgccaccgtctccgccgtgtaggggtgtgcgagggcgatgaagtgggcatatttggagaagcgatccacgaccgtcaagatgacggtcttgccggcaacgcgcggcaacccctcgacgaaatccatggcgacatcggaccagacggccatcagaatcgggagaggacgcagtaatcccgctggatgcaggtgctccgtcttgttgcgctggcatgtgatgcagccctgaacgaagtcgctgacgaggtggcggtcgttgggcgtgtggaagtcgcggcggaggcggtgcagcgtcttctggatcccctcgtgcccttcctcgtgggcggccgccacgatcgtcgagagccatggcgagcccggtgggacgtagatgcgccgcttgtaggtgacgaagccatcagtgaccgtccacggtgcgccacgtgtaccggcggcgatctcgtcacggagagctagcaacaccgggtcggacgacgtcgccgtgcgcaggtcatggagtaggtcgaacaccggcgtcgtgagagcgaggagttctcccttcggtggtgcgcgacgggacaagtcgtccgccgcggcattctacttccctggtttatactccgcagtaaaatcaaatcccaagagtttgcttacccaatgatgttgtgggatcgtcgacaagcgttgatcaaggaggaacttgaggctatagtggtcggtcttcaccgtgaattgccgcccccagaggtacggccgccaatgtcggatcgcttgcaccaacccgatcagttcacgttcataggcggcaagagcttgatgacgtgtggcgactggtcggctgaagtaggcgatcggcccagccccttggagaagcacggcctcgaaccccatgcccgatgcgtcgcactagaccgtgaacgccgatctgaagtcttggagtgcgaggacgggcacggtggtgagggcgagcttgagccgctggaacgcgtcgtcggccggcggcgaccaggtgaatcgatccttgcggaggagctgtgtgagtggcgccgcaggcatgcaactgtgaagaagtccgggatgaatttgcggtagtaccctgccaggccgaggaagccacgaagatccttgggcgatcgcaggcgcggccactcgacaacggcctgaatcttggacgcgtccatggcgacgccatggagcgacacgatatgccccaggtatgcgatgctggcgtccccgaacgaacacttggcgcgcttgacgaagagtcgggccgctcggagcgcggtgaagatggtgcgcaggtgctgtagatgcgacgtccaagacgggctgtagatgaggatgtcgtcgaagaagacgaggacgaaacggcggaggaacggccagagcacatcgttcatgagtgattgaaacgttgccggcgcgttcgtcaggccgaacggcatgacgagaaactcgtagagcccatcatgtgtgagaaaggccgtcttgtggacatcatcggagtgcattcggacctggtggtagccggaccgcaagtcgagcttggagaagatggtggcgccgtgtagttcgtctaggagctcgtcgacgacagggatggggtatttgtccttgtgcgctcgttgagagcctgataatcgacgcaaaagtgccacgacccatccgctttcttcaccagcagcaccggcgaggagaatgccgacgtgctccggcggattaagccgttctcctccatcacacggc

SEQ ID NO: 29178 - DNA, 782 bp, Oryza sativa
attatacttatatgtagacatacaagacagagggttcctcatgtgtgtaatattggctaacacaagtatttagccctaacgcttcaagagtcattgctgccatgatgcacatattcagggagtgaagatgaaatctccaaattctaaaggtatcagaattcaggtgaaaactacaagaacatagatggctctgaaaaatttaggtgaaatctttgtactactgtatctctgaattatgttcatgtatgtagctacatattcagagttacaagctgccaaagagctacatattcagaattatgtagcatccgatggttcactgtttcggatcaagacatgtgctaaaattagtgagctggtagcccaatctgggcggtgcagcgtgcttacttgcagactaattcgagtgaatcacaggctaaccaggcctatcggtcaacaagtatatgtcaggtaaaaaacatgtagtgctaagggaatactgttcattagctcaaacaacaccatggttaccttgttgatctatgattcaaggttacctcccttgtcattctcccaattctaagtacacccgaaacaaattttgattgcaatcggtgcaaaattcgttaaactacagaacaagcaagctggtcaatcagttaccctcgacttctaagcaactaatggctacaagttcccctccaaatccatcacacaagcaccaatatgcagacaaatcgagtaaatcacagggcaaggttgaaaaaagaaaaacacatataaccaagagatttcatttt

SEQ ID NO: 29179 - DNA, 760 bp, Oryza sativa
gtggtgcctccgcctacacggctggcctattatgccgctgctgttgggcgtctacgtcttcaccgccggcctgcctccgtcgccgccgactggtgcctccgcctacacggctggcctattatgccgctgctgttgggcgtctacgtcttcaccaccggcctgcctccgtcgccgccgagtggtgcctccgcctacacggctggcctattatgccgctgctgttgggcgtctacgacttcaccgccggcctgcctccgtcgccgccgagtggtgcctccgcctacacggctggcctattatgccgctgctgttgggcgtctacgtcttcaccaccggcctgcctccgtcgccgccgactggtgcctccgcctacacggctggcctattatgccgctgctgttgggcgtctacgacttcaccgccggcctgcctccgtcgccgccgactggtgcctccgcctacacggctggcctattatgccgctgctgttgggcgtctacgtcttcaccgccggcctgcctccgtcgccgccgattggtgcctccgcctacacggctggcctattatgccgccgctgttgggcgtctacgacttcaccgccggcttgcctccgtcgccgccgagtggtgcctccgcctacacggctggcctattatgccaccgttgatgggcgtctacgacttcaccggcggcctgacttcgtcgccggcgactggtgtcctcgcctatacgggtggttggtcacaccaccgttcatggg

SEQ ID NO: 29180 - DNA, 1765 bp, Oryza sativa
ttcctaccacccgggggctcgttggatggaccgagtaacgcagggtgctaagtattattcggaataaatcaaaagcatagagataagataatttattttctgctcttaataattgcaaaagtacccgagtagtaaactccgatccgtgaaactttgttccattaatgacgaactcatgtcactcatatgcatgtttgggaagtgcttaggccgactcccagtgcttggtggctatgactagtcgggcagagtgtttaaacgtacagagtcatctgctcggggaaatcaaaattgacaagaggagaaatacatatttataaatattttaaaatacttgattttttctcgagtattatatttatatcagatactactcatcctatatgtttgttctgcaggatccagatccagatatgcataaaagggattcatggctttaagcttatctcttacgctccaggaatggatcagtcagaacatcaccaaccggccgcctcgtctgccgccgactggtgtttccgcctgcacggctggcctttatgccgccgttgttgggcgtctacgtcttcaccgaccggcttgccttcgccgctgccgactggtgtttccgcctgcacggctggcctttatgccgccgttgttgggtgtctacgtcttcaccgactggccgcctcgtccgccgccgactggtgtttccgcctgcacggctggcctattatgccgccgttgttgggcatctacgtcttcaccgaccggcttgccttcgccgccgccgactggtgtttccgcctgcacggctggcctattatgccgccgttgttgggcgtctacgtcttcaccgaccggccgcctcgaccgccgccgactggtgtttccgcctgcacggctggcctattatgctgccgttgttgggcgtctacgtcttcaccgaccggccgccgcatccgccgctgactggtgtcaccgcttgcacggctggcctgttataacgccaactgatgctatcttcttcacggctggctacatcgctgtcactactaataggcatcagtatcttcaacacaagctgcctacgtttgccatggctgccgactggtttcttcacttccatggctgcatgattctgccagtgttgatgggcctattatgccgctgttgttgggcatctacatcttcatcgtcggtcgtctcgtctgctgctgactagtgcccttacctctacgtctggtttagacagctaccactactgatggacatcatcgtcttccgttgccgactggttatgccgccgccgactggtgcttttatcttcacaactgcgcgtcttcgctaccagtttgcttctgttgccgccgactcgtgttcacttcatcgcggcgatgccactttgtcatcatggtggagcgacttcatctttattatcttcgtcactggcaaactctattgctgctacttcgcaagttttgcgggttcaccaaccacgacgtctttgtgcaacctcgacatctcggcatgcgatgctgtgttattttactacaacaagtggctctccaatattcaggatttctacttggacatcttcaacacatatcttcaatcaagcaataactattcgacgacaagaggctacagttctcgactctatgttcagttgtttcccaactaatcaaagagtcgggggctacacaaatacacggctcaaaattcgacaagctttatgtcaagatgaagcaatcaatcaatacgaatcaacttggggagttat

SEQ ID NO: 29181 - DNA, 642 bp, Oryza sativa
ctctctctccctcggattcgtttggaaactttccccctaacctcgccggcgccattaatggcggccgggactcccgcgcccgtttcccccctcctccggccaccccttccctctcttaaccctatataaatcctccccgtgcctccctccaccgtttccgccactcgccgctctctctccccaccggaatcgagctcgcgccgtcgctctctctctccgccgtcgccgccgagctccggtccgccgccgttgttgccccggaccacctctcccctcggcgccgcctccttcggcttcgccgcatcctcgccgacctcgtccacccctccgtttcgcacgccgaccgccggagcaccgtcgaccccgtccacccgagccgcgccgccgccttcctccgctccggtcgccgttcccgtcgtcgccatcgacccggggtgagccgtggaccgccgattcgattcccccttccctcccctctctcggccgccgctccgccgtacctatggccgccgccggcgaccataggggcgcgggcgcgccgcctcccgttggctgtgccggcgtggccgccttcgggcgctccccgcggctgccgtgtggggcccggctgtcagccgtccgcgcccttaggtgcagcagacg

SEQ ID NO: 29182 - DNA, 7523 bp, Oryza sativa
  unsure (1)..(7523): unsure at all n locations
ggggctgtcttgtgggtacagttgggcacctctgatcaaagtaaaactattcgaatagccgtgcccgcagttacgggcgggctaccagactcaccgtgattagactcaccctagcttagtctaatggaattgaatagttcagatcgatggttgggcctgttgcaacgaggggtagcgttgaacagtggatagttaatattgatgaattattacaactgttttactgctttcaactaccgttttaaatgctcgctttatgcaaatgaaccgctctagctatcctttgattataccctgcatcatacccctattccggtatgacttgctgagtacggttgttgtactcagtcttgctccattttccccaaaacccccagagtttgagtacgtgtcagatggtggtttctccgaggagtaggctttgtccgtgtcgtcgaggatgcctgtggagtggcgttcccgctgcagttcaagtcaaggcttagctccatttatcttttattttttccgctgcatttatgtaagatttttatgatgtttgtaagacgtggatctgtatgtcaactttgtcgtttgtgtaccccggctggtcctggatgggggttttaatgcacattctacttggaattctattcgggaatttctgggtgtgacattctgccactgtcaaaacttggcctgattggtacaaaagggtattggctagtaaacaaacccactgagaagaattagggatttcacaatgcttagcccttactctagctaacatggattaggatgagccaatgatctcagctgctacttatttctggtccaataccttgaatgcattcttgttcaatcaaggaccgatgacctcatctgctaatcatgatcactggcttggacatcacctcatctgctaatccaatcagcatgaataccaagaacaaatttaccttaagaactagatccatcggaggttggtcaggtttcattgcccttaatatggggactggccctgtttctgctaaagagcttacaacttttctaatcatgtggctggaaaaatttctgttctgtgggccaagctatggtccaaccaccaactagcagcatatagccgaaactcttgtggataagagacgatttccccttgggaaatatttgctagggtatttgtaccaaactctaaatgctgcatcggctaggatagctgtcgattctgttgttggtgctggtggcccctggtggcttttacatgtttggctaaatccccataccatcaaagtatcacacatatcagacttagccgaagcagatttcccagctctagaaccaactgaagatgatgaaggaaatgaaatcacaactcgccgatgcatgtcttttgggaaagcagcctctacctatagtgaatgagattaatcggctgaattcttctccaattggttcggcaacttctatgatggatttccaagggattctaggatttggtttgcctatgaacactccaacaactttgaacatctagccgatttcagattcgatgagatcaactctgaaaaatatgataaatccagagaagtctttactatggctatttctccttgcatcctttctgtcggcatacatcaaggcaggaatatccaagtatcctatgagttataccatccaataagtgctgcaagacaacttgtaatgggccaactgccgatcggattattgtttgcagacaagatccagactagaggagagattacttcagcccttatgatggacagacttctaaatatcccagggccccctctaggcagcattgaagacattcaacttgccctagtcagaagtgcaaccttcgaccgatggtggattgagtggagaaaacatctctttcatcaatcggcttccatgtacctgaccaacatccatccagaatagattcctcaagtaagcatcttaaccgatcttctttctgcaaactgaaaattcttcaacttcttaaccatcttttcatcttattttgcagaccatagaatcttcgcctccacatgtcagtcaaagtggaatagatatcagatatgctgcaggacttttgcctaacagcggcagattcgctccttcaatcatcggctataatgctcccaagacgtctacactgctccacggacaatctcgcgagccaattccttctgaagctggcaagaggaagaggactaaatcatcggctgttgttccatcattcacaaagaagaaatacaaaaagcaaaaggctgcagctgctgatgatctgcccaatatcgaccctgatgtggagaagtttttaaacgatgaagaaatagaagaggctgttgatgatgcagctgctgatatcagtgaggcaagagaacaaatgccaccagccgatagtcatgctcctcaaagaactccaccgactccaacacacccagctcgtcatctgaaggtatgtacctatttggcatgttgttcttatcttgttctattagaattatgagtgccaatttctaactttgcagaaaaaactggctaccaagaagaaaccaccaactccgccaccattggtaactttgatctttctttatacctttacttgcctatgttaaactaattccatccttttcagcctcctcgttctccaactcctcctcgtcatgaatcaagcgagcatactccatcggctgtgggcagccaccatatcgaagaagaggcagcaccagctcctgctatccctataagaaccctttctaaaaatctataactcatatcagatgttatacaatttttcctaatcagcaatcccaatattgtcctttttaggttttagccgatatgttctcctttgacataaaacaattctttgatcaggaagaagaaatcaccagcctgcccttagctcttttaattgatgatgtcaaaacaacactcttggacattgcacatcggctagggagttctcttgattctcgagttgttgactgtggacctataagagcaaggttcgaggagatccatgatcaaattcctgacgatcaagctagaatcatttcccctgctgtatatcttgaccatcatcggttcaagctggaaaaagcaagacaaaggattgtcgataggcgtgaacgaaaagaacttgaagccacaattcaagctaatcggcaaaccatcaataaagacaaatcgaagcttgataagatgaccgtcgattccatacaaatctacattgatcggctgaagtctcgtagagcagaactcttagctgagctaggaaagaagccgagatcaaagttaaggaattccatcaagcatctgtcagatctgagcaaatccttaaaagtgatccctggaaccgatgctaccgatgcccaagccatagacgatatagaacaaattaggcaatgggccatatcggctattaacaagcttgtatcaagttagaaaccaactgtgcaatacttgtaatgcagacaaaaacatagtttgttctgatattttgctttagaaacccatcattgatattttgcttttgaaatccgtcattttacatatatgtatgcccccttaattttgccatgctgaggacacattgataaaattataattgtgctaagggcgatatgacaaatatcggctatcacatatcggcacgacaccaccgatataacttatatcggccatcatacattggtaaaacacaaccaactatgataaaaacaatgctaagggtgatataacttatatcggccatctaaaggcgatgttaacacatcggctaacatgtatcgacaaaactcagccggtcacgcattaatccaaacacttggataatatttcttcaagtatttcccattgagagctcgtccaaaaacttctccatcaagcccttgcaacatatcagctcccttcaacacaaccttgtatactcgaatcggtcctcccaattcggagaccacttgccgattttgttgtcacgagttcctatcagcagaatcatttccaaaccagctcaccttctgaaaatgacttaggcacaactttcttattgtaatggagagcaactcgttccttatccctcgttactttttccaaagcacgtaatctagattggaccagatcttccgtttcatctaccataagattgtaataatcatcggctgtcaatttatcttgtaaatctattatcctcgagccggtgacactttcccatggtaaaactgcttcatgcccataaacaagtttgtaaggaggaacttgaatcgatccatgacatgccatccgataggatgataacgcttcagctaattttgtatgccattgccgagggaaatcagaaatcttcctcttgatcaatttaatcaaactcttattagatgcttcagcctgtccattagcttgcgcatagtatggtgaagaatttaacaatttaatgcccatgatgtctacaaattggacaaactcatcggacagaaagattgatacctgatctgttgtgataatttgaggaacaccgaatcggtaaacaatatattctttaacaagttgaatcgcatctccagaatcaaccttcttcaatggaactgcctccacccattttgtgaaataatctgttgcgaccaatataaacttatgtccattgcttgaaggtgtattgatctgaccgatcatatcaattccccaacctctgaatgaccatggcttaattataggattcatagccgatgctggtgctctctgaattacttctaatttctggcaatcttgccaacccttatagtatcggaaacaaccttctaacatcgtcggccaaaaatatccaacacgcagaagcaaccacttcattttatgagccgattgatgagtaccacatataccttcatgcacctctcccaacacaaccttagcttgattggcactgaaacatttaagtaacacctcatcaattgtttgataatataattcatcatccaaaaaggcatatttcaaagctttataccgcaactttcctaaagccgattgagaaggatctttcaaatactgaaacacgtcatacctccagtcatcggttgtaatcatagcaatgtcgacctcaatatctttcaccatctgtttatatcctgatgccccctgagccaaatcgttagcttcaacattctgctcctaggagacatgcttcaaattcaccaaccgaaaaccattcatcaattctcggcacttgtcattgtaagtcattaatatatcattcttgcactcatactcccctgctaactgattgatcaccaacaaggagtcacccataatctcaacagcatcggcttcaacctctttcaatagttgaaatcccttgagaactgcctcatactcagcttaattattggtaacatagggcttaatagtataagcaaactcaaaactcgccccccattgttgatataataacaagccgaatgccacaacaatgggtgcaacggaagccataaaaaaataatgtccaaggtattatatcaccggagccgagtgaatcatcaggatgttcacaattgaaatgggctatagcttgtcccttacccgctttagcngattcatatctaagatcaaactctgtcaatgcatatatccacctcccaactctccctttcagaactggagccgatagcatgtatttgacaacattggctttataaactatggtgcactcattggaaaacaaataatgccttaactttctgcaagaaaaatatagacacaaacacaatttttccaccgacgtataccttgtctctgcatccagaagccttcgacttaaataaaagattttcctttccttaccttccaactcatggacaaaaactaaaccgattgacttctcatcggctgacaagtataacttgaaaggtactcctttcagtggagggattagaacaggaggggaactcacatattccttaatactatccaaagcttcctgctgctctgcctcccaagtaaattcctgatcggctttcaatctgagcagaggtgtaaaaggttctaacattccaaataaattagaaataaaccttctaacaaaattaaccttgccgatcaatgacagtaattgtttcttgtcctccagacgttgaatcttatttatagcattaatgctcctctgagatacctcaattcccctcttatgaacaagaaaaccgaagaattgtccagtcgacacaccgaaagcacattttgtgggattcatctttaaaccatacttccttgttctttcaaaaacttccctcaaaccgtctatatgatcgtccacttcctttgattttactaccacatcatcaatatagatttcgaccaattagccaatcagatcatgaaatatataattcatggctctctgatatgtagctccaacactcttcgtaccgaaagtcattacaacccactcatataaacttcctgaaagcagtcttatgaatatcttcctctgccataaaaatctgattgtacccagtattaccatccataaaacatataattttatgtcctgaagcggcatcaaccaactgatcggcaaacggcattaggtattcatccttaggggtagccttatttaaattccaaaaatcaatacaaaccctaagcttaccattcttttttattaccggaactatattagaaatccattcaacatatcggcatggccgaataaaaccagcatcatacaaacgagtaatttcaactttgatatcatcatacatatcagcttgacatctcctaggcggttgttgatatggccgataccctagtttaataggaagccgatgttaaacaatcgatcggctaagacctggcatctcgaaatattcccaagcaaagcaatctctatattccttcaaaagctctattaacttggttctaaattcatatgataaactcttactgatgaaagtcggccttggtctatctcccggacctatatcaacttcttctaaatcatcggctgacataaaaccctgtcctaaaatgccatcgagatcatctatagtatcttttttgtagaaatttgaaccctccacaacgccctcaaagcaataatttgggctctccatcttcaattggctgtatatcacaatcagacacttttagataatatccttcccaaacttttccagacaagcaatcaattccaactatttcccaaacatttaaatcgacactagcaacagtaactgacctgtcggctagcacgatttcaatcttgtcaccttgccattggatcaaactttggtgcatggtcgaaggaatacaacaatttgcatgaatccaatctcttccaagcaacatgctataggagcccttcccatcgatgacaaagaacgtagtaggatcagttttgctgccgatggttagttccacattcagcacccctttattttctgaagggttgccaccaaaatcattaagaaccacgttagtcttgataagatcatctgcattcttccctaattttctgaatgtagcataaggcatcagattcacag

SEQ ID NO: 29183 - DNA, 1711 bp, Oryza sativa
tcttccaagcaacatgctataggagcctttcccatcgatgacaaagaacgtagtaggatcagttttgctgccgatggttagttccacattcagcacccctttattttctgaagggttgccaccaaaatcattaagaaccacgttagtcttgataagatcatctgcattcttccctaattttctgaatgtagcataaggcatcagattcacagcagccccaccatcaaccatcatcttggacatcggcttaccattaacaaaccccttaacgtacaacggtttgagatgccgattctctaccacctctggtttctcaaaaattgctcgctcgggtgacaaaaccaacttggcggaagcttcttccatatcagcagcatcggcttgattagcttcaaattcagcaagtaatatgaaaaccatatttaccgatgaagatgcaacagctttacccttcattaacctttttgctttgtcggcttcaacttcatcggctgttagaaccttactcttaacacgccactcttgccttgttttcttcagttgatggttgatttcctactgtacttcctgaaaacgctccctgttccttatcctctggacccttctcttctgattcttggtgaaaatgccataagggcaccattgcgaattcctgccctcatccttattctgaaagcaatcctgatgtatccgacccaatctctgatgaacaggcaactttttctatcttagccgactttcccttttataagatcggctcaaactccctgcagaatccctgttagattcactacatcctggacagtcttctattgacggtagtctcatctcttcattccaacaaaacctaaaaaattcgtagtcccaatgcggatcaaaaccaccatcatcttcacaatatttttcttcctgtctctcatacctcctctgatatttgttgataatcctaactgagttaagctgtgaattccgatgactcctcccatcggctgctgtcccagatgtatggaccatgttaacaggaaaaggatgatcatcaaccttcatcggcctctttgaatcatcaaactttatcttcccttgttcaatagccgactggatctgctgcctgaaaaccttgcagtcattggtagtatgagacccagtgttatgccaattacaatattttcttttctctaattcatcaaccgatgggattgagtggccagtaggaagttggatctgctttccccgaagtagtagattaaatattttatcagccttggtgatgtcaaaatcatctctcatctttccccgaattcttgaccgactaacatgttaaaaccttcttgtttctcgcccattcggctgctgctgctacttcggagacatcatcttcttcagattcagaaacataaggatattgttaacaccaaaatttggtaagcccgaagtcatcatcggcctagagtcagtatcggtttcagagtcttggaatcgaccgatgggaattatcaagttgctagcagtcggattcttggaggattcggttaaggaaattaatctattcaaggaagcttatccataagggaccgagttcaaggaggatgcggcatggcaatttatctattaattaggcagtatttgttagtttccttttatctttaggaaagtatgtttagtgtccaataaggacattatgttttccttttatctttagaaaagtttcttt

SEQ ID NO: 29184 - DNA, 11946 bp, Oryza sativa
cttcgaagacatcatcttcttcggattcaaaaacataaggatattgttaggaccaaaatttggtaagccccgaagtcatcatcggcctagagtcagtatcggtttcagagtcttggaatcgaccgatgggaattatcaagttgctagcagtcggattcttggaggattcggttaaggaaattaatctattcaaggaagcttatccataagggaccgagttcaaggaggatgcggcatggcaatttatctattaattaggcagtatttgttagtttccttttatctttaggaaagtatgtttagtgtccaataaggacattatgttttccttttatctttagaaaagtttctttcttgtccgacaaggactagtatttccccatgggtataaatatgtacacctggagtcattgtaaaatatatctctcgatcaatacaactactctcagagcatcgccaccctctttaccgaggtttttactaatcttctcatggaatttggcacctgacgcggggctgcatcggttcagtttgatctccggcgaaggggtaagtcctacgttccgctggccctggtgaatctaccggctacgttggtattgttctaggctgcaatgcttcgatctcttggatcgctctgttttggttgatatatttgcctatctgatatctcatttctatctctaattacactgtgtttagatacacatcggtttagttgggactgtctcagttaggtctgacctcctgtcttagccaatatatctcaacaatcacaatgctgatgtaaatagatttgttatatccatcacattagacaaatctgtcggctcatcgagcattagattatcatatacaatctcatgctgcatcggttaggcttaacctactagattgttgttgataatataagtcttgttaagccgattggttcatcctagtgttttatcagggtgctagctgataagttatctggacgttgcatcggcctataaggattacatacaagttgggtttagccgatcgcaacaaaggttttactgtttaatctaatcttgtggattttatgacatcagacctctagccgacgtatgctttaaccttcggatcagtccttattctattatgtcattgctagccaattggtttctactggattatattattgtcatattatatcatcatcagccgattgcctttatattgttatttagatcaagtgtcagatcctacattggacgtatagcggatagctcaaaatcgtatcgctatcggctggtatctgcatcggctggaattactccatcagcttgtcagccgatcggctgttttgtctactatttacagatcttgtcagttacagggtcaatctaattggcacgcctgcatctcaccaagatttagacctgcactggagctaagcagatctcccagggcagtgtgtgtttttcgcatcaacagatatacatgattaaccttcttgaagttctttttggcttctgcaaatctttgttcatgtagtgttaccttttgagccaagtgggccaaactctcaaaatcttgagcagagaatctctccttaattggggttgccaaaccttggaaagcaagatcggctaactgagaatctgtcaaagccaagctataacatctattcctcatgtccctaaacctctgaatataatctcgaacagatccatcatgcctctgtctaattgctgccagatcagaaagtttcatctcatgatttccactgtagaaatatttatgaaattgtttttccatatcggcccaactttgaacagaactatcaggcaatgaagaaaaccatgtgaatgccgatccagataaacacaaagggaataatctaactctcaaagcatcaatagccgatgcctcaccacactgggccaaaaatcggctgacatgctcataagtcgacacattattttgctctgagaactttgaaaaatctggaaccttgtaccgattcggcaatggaaccccctcaaaatattctggatatcggggttgatacaagttcccaatattctttggtttaagaccaaattgctccctcatcacatctgcaatcatatcagcccaaggcttctgttgaggcattccttgcatctgttgttgaatgtggtcaagctgattataccgaggcaagatgtggggctgaggtgatccccctggctgatactgtatctggggtgaataaggctgatactgaaagttcatattaccaccagcataatgttgaggagattgatgcacattatgaacttgctgatcaggaataaactgagcaccaataggctgatgttgctgtacaataggtgtttgctgcccaattggtatttgctgaatcgggtcaacaactgattgcttccccttaaacatagaagcattctattctggggatacttgaggtatattctgccccatgtgctgaggttaaggtctaaccagtacatgaggattaaaccctagctgtccttgtgctgacgttgatgcgcactgtttcccaaaagccgaagttgatgccatcggctgctccggtgctataccagaaacgggttgttgtttgccggtcactagattcctatatggaggaaacacgccatcaggaagaaaagtcggactcttagcttgatgtttggcaattgaaccatcaatcacagacttaatcatgttagttaaagtgttgacaagcacccctgactggttgataaatgcatgataaacaacataatcaatctgatcctgcaagttcttgaactcttgaggctcttcttcttccggtttttcatccttgggtttgtcatgtttgggcttgccatctttggtggtacttgattctaagtcatcattggatggcactttcaatttatacctttggataaccgtacctaaatgagtttgcacaaatgaatgtaaaaactgattctgcaagttgttcatcatctgctcatactctgccttttgttctggtgtaagttgatccattgttattgggatgatattctcagggtcaacctcagtttgcttaatgtcaaccatggtgaaagcgttacaactcgtgtccctctgggcgtgccaaaagtgtgttgatgcgaaaaacacacactggcctaggagatctgcttcactccagtgcaggtcctaaatcttgcttttgggttcaaaggcatgccagttgatttgatcctacaatcaacaagaaagaaaaccaagaaaaacaaagttaaatccataaacgatagccgttcgacaaagggccaatcacatatcgttaaccgctgagctgatgttattggcattagatcagcaatgaagagtaaaacgaaataaagtcaatgctcgatcgactgtagatatcaatgatatgtaatttccttctcaagatataattaaaccaagtgattgggatagatcgaccagctagtcgagacagtataaatcacttatgcttaaaagtactttgagatgaagattatatgtatattcatagcatagccgatcaaacatatctaacatgtatcggctaatactccgataccactctatatcaagatattaaaacaagcaaaatataccaactagtaagccgaatatactttaatgcgataagatcttaatataaagggcaggtttagcatatcaagtaaacatgtagggaataatgtagctaaatcaggtaagatcgggtaaaaccccgatactatccctatcgataatcataaaacaggttagatattgtatttatggatattaattaatagatcgaacttaaacgatgcagcattaagcacaatgataatcacaagatctaggccagttgatgaaaatctatatgagatggtagatatgttatataatctagatcaataacgatatctaactctatctgctgcctctaactctatctgctgcctccgagtaacagatgctggccgatttagggttagattataataccgatagagattatgtagcatatatgataactcaacaatttacataaccaagattagagtgtcactaatcccgagaacgcaagctgccataacaagttttttacgtcttgttgaagatcgaaaccgatgcagctcaacccgaacgcaagaactcgtcgaaacaatgaaaaaaaggatggcgatgcgccgaaagtgttattgaactgtcgtttgatgtttacatggtctcggtcatatttatacccaaagtacataatgtattcttgccggacgagaatctaaaactattacaaccattaagatgcgaacaagtctcttaggtagactcttgccgataaatatctctaaagaaagtattcaaaatatcctaattaatagatacaattgcctatccgtgagcttatctcaatcgtggcaatgcttgcgcagcacgttgatcaatcccggagatgattatataaccaccttggcgagatcggctgcatcggctgtcttctgtccgatccatcattagccgatgctatcttcagccgatgcccctgtagccgatgcatactctgttttcgagaacatctcctttgccaaatccgcttcaatcttaaccttgaatctgatacttgctctaaccaaatttggttgtcaacacacatttgttttcctttttaggaatcctaatcctattcggccaccgcccctctctcctgttcacgcgctccccgcctccccttggcccatccgagtcggtctcccctccctccccctgccgactctctcccctccggcccaacctcttttatcttcacccatatataagtcaccctacccctgtttttcctattttctttttgttggagttctagcctagctgccacctcaacatgccgccgtcgcccttgcactgtccacggctgccgtgtcacgcccagaaatttagcccgaaatttccagactattttgtgtattaaatccctgtctaggaccagctagggtacgcaaaatgacaagtaatatacagttccaaacgtaaataaagcgtaaaatacttacagaagaggcacttagtcctcacaccgaaaagaaagcagcggcagtggaaaaaaggcgatcctagtgtggcttcagctccactccacaggcaaaacttaactggggtctgagccttggtcctctaacttcgtcttcagctcaaaagcactacacttctaaaaagggggaaataatagcaaggctgagtacaaccaccgtactcagcaagccacaccaacgatgcagacgtgcaaggggaacacaaggacggtttgcggctatttgcataaaggcggttgtaaaacattttattgagcaaaacagtaaaactgttgagtgattatagtaatattaaatctccactgatcaatgctacaccacgttgaacaggcccaaccaacccacctgaactacagtgcattgggtcgatttattaagtgtgagactaatcacggtgaatctggtcgatcgcccataaccgcgggcgcggctactcgaatagttttactctggccagaggtgcacaactgtacccacaagacacaatccaccgacatgtcaccacgtcatcatgtacctatgatgaacacgtcaccacgtcgagtgattgtgacaagacccttcatataactcttccgtaaccatccacaccacgctaaggtttcacccccaccccctgccccggaggtgggcagtcccctcgtgtgccgtggtgaatccgacagctggacaaccggacaccccgcccaacccaactccatcatgccccccctcgccacctatgcctaggaaagggtctagctatacttcagatcaggcagttacccactcctgcttgtggtaagcactgtaagtcttccagggtttcccgtgaaccggtccttaattgccatgggtccgactcgcaaaactatgcacccatagcccaccattcagtcgcattttagttggataattatgaccatgaaacatggccagatgtctcaagcatgtagctcattttgatactaaaaaggtctaatactgcaattataccatcaactgagctagtggtaattaagcatggctaagcatatagttctagctaggtcacataagtaacatgatgtcacatcctgattttcgttttaggatttataaattatctaataaattattattagaatttatattaaatgttcattaatttacaagtgaagttaaatgtgggaaataaaatttcctaaatttaaagcatggatggatttaatttttattaaattctccatgattaattgcactctctgaaattttctcggatttttcagagctcaattcctaaatgatacaaagaacagttcagtaattatttgatcaataatgatctaattataattgttaagagtttttccttgtttaaaaaaatccttaaattataaattgttgtttaaaaggaattattagaaatgatcttaaaagcctaaaagagaagatctaattttaatttgttaaatctcaatataaaattgggctagataaaattttgttaaatactttgcttaattctataattcctagatttttctgggatttatttgagctaaggaagtatttttaataaatggaattgcatttaatgaataatttaaattgaaaaaggtttttaaaagtctcttttggctttgggccgaaagtcggcctaaaacctctctctttctctctctcctccccgacccaagccggcccgcatccgaggcgcgccccttcctcctttttctcagtcgctgacaggtggaccccacctgtcagtcttgtcttcctcctcgcgccgccgccggccgaaccctagccgagccgcgccgccgccgctttccaattcgctcgcccctttcccgatccggtgaaatcaatagtggggaaatgatcatctcgatctcctcttccttttctcttttggaaacatcgcctaattcggtttggaaactcgtggattcgatctcgaatcggattcatctctctctccgaaccctaacctttccttctcgccgccggtcgccgtgggccttcgtcgccgctcgctagcccctttataagcacccccgagctctcctctatccgccgccacctttgccttagcccgccgtcgcgtctagcgccgcctccgcgtagccctagccgtcgccgttgttgccgtcggttcagccgcgccgcgccgccgttgcagcagccgtcgtcggtcgccgtcgccaacatcgggttcgcgaggtcgtcgccgtccccgtccaccgcttcgctgccgccgaagaccgccggagcaccgccgtcgtcgtcgacccgaagactgtcgccgcttcttcctcatcgccgccgccgtccgttgctcttccgccgtggttttggtcaccggtgagttcgccgcgtcgccctctacccgttggtgccctccgttcgcgtcctcgcgccgtcgttcgccggcgagcatgcgttgccgagccgccgtcggtgctgacgtcatcgctgacgtcatcgtcgctgtccccgtagacccgacgtgaaccgatcgatctcggctgtccgttttggatagggtcgatctctgtcgcgtctcaaaacgactctaaaatacatcctcgaaattatgcctagaataattaaaatccatgtgaaagcctccaacaattaaaatgtgcaaagttaaaagtcaaataaggcttggaggatttttgtatatttcctaaaagcctaaaatgcgtaaataaattttagtggaattttcagagcacaaataataattattaagaaataaacaaagttaaaatggttttataaaaagaaaagttctaaaaagtcctttttcccccctccccctcttgggccggctcggcccatctctttccctctctctcctcttccccgcagcccattcggcctcctccccgcgcgcgcgccgctgacgggcgggcccgcccgccaccctcgctgacgggtggggcccacccgtcatccccttcctccgccgctcccgccaccccggcagcgccctagcgccggcgccggcgccgggaatcccgcccgccccgtccggcccgcgtgcaatcaagaggggggaaatattccccgggatcccctccccctttccccccatttttccctctctctctccctcggattcgtttggaaactttccccctaacctcgccggcgccattaatggcggccgggactcccgcgcccgtttcccccctcctccggccaccccttccctctcttaaccctatataaatcctccccgtgcctccctccaccgtttccgccactcgccgctctctctccccaccggaatcgagctcgcgccgtcgctctctctctccgccgtcgccgccgagctccggtccgccgccgttgttgccccggaccacctctcccctcggcgccgcctccttcggcttcgccgcatcctcgccgacctcgtccacccctccgtttcgcacgccgaccgccggagcaccgtcgaccccgtccacccgagccgcgccgccgccttcctccgctccggtcgccgttcccgtcgtcgccatcgacccggggtgagccgtggaccgccgattcgattcccccttccctcccctctctcggccgccgctccgccgtacctatggccgccgccggcgaccataggggcgcgggcgcgccgcctcccgttggctgtgccggcgtggccgccttcgggcgcgccccgcggctgccgtgtggggcccggctgtcagccgcccgcgcccttaggtgcagcagacgcgtgggacccacggcgccggccggtgcgagcccgggtgcgcccggtccaccgtgggccgtggggctgccgcgtgggccccactcccgtggacccagtccgtgcgcccctcccctcggctgacgcaataaatccattttaaattaaaatttaaatgaagaaattcgcaaatattcatttaaagagcatataaacttcaaatggccataacttggccatttgaactcggaattggaccgttcaagtctctaatttttccttaagaagtcaagaacccatttttgtgctttgtttctgcttgttatacggagtttattagagtaaaagccttttcttttccgttggtcgtgtagacgctgcagcttcggaagatccgctcttcgtggaggttgaagccgacgtttgggaaagcgagcaaggcaagtcacatcatctttgaacatattgaatcctagtttataaaattatgttgctttaaattattgcattatcgctttatttaaattcccgcgttatcactgttttatctagccatgcctatttacctttgttatgaccttattattgttattgttattatttccttgttcaccctagaataaacaaaaccccaactagtggacactctactcatgataccactagtatgattttaggtagattcttcgctatttaattaggtaacattaggtggtttttcaactctatactttgggaatattcatatcacctggacactatggaatggtttgattattgtggaattggattcacacctccccctctattcaaaaccctcaaaatggttttaggctgggttcggggtgcatggttttgatagtagcacctcggccatataaggaccggtcttcgggcctctgttgcaaagcactaccgtacttccacatgtctagtgggtaaggcttagtttgtggctcagtctggttataaacaaaagtacacggatggagatggacgaagtcgggggtcgatggacatctctaggataaatgaaggctacacgagctgcggcccggtagtcgagatgtcatggcacagggccggtgtcctgttgctaggggctcagtcctgcctacctgtcccgggggttccggccgtaggtgggattgggtcggtactcttttctatggctaggatgggttggaaactatgtcacgtcttccgtctgtataccgtggtggtatgtggcacgtggttgcacgtgaggaagatgtgtcttgtgggtaaagatgtacacctctgatcagagtataatctattcgaatagccgcgccctcggttattggcaagccgagcaatgtacccaagttagtgttttaattcttaaaacctgcttaacaactaaaaggaggaatggttggcctgggttggcttgggacgagctgggacccaaggtcgggttgccggttcggtctgaatcatcgtaggccttgggttaaggcaggttcgtgtgggttcacggccttgataaataatattgtatagttctagaatcgtgtttacaaaatagctttgagcaactaagtgtcttttaatgctgtttactgcaaccctaaccctttatattataactcccttgtactcccttgcatttattatgcacttgtgggtgtgtcttgttgagtacggtggttgtactcagtcttgctcaatttttcccaaacccagaagaggagtttccggaagatgaagattttggtgtctagctcgtgcctgccgtcaagcgcctgtggtcgtcgccctagtcttccgctgtttctcgtttgtctttgtgtgtgctgggccttcgctgcccatgtaataaattaactatttacgcttccgcttgttgaactctgagctgtatcaacttttggtgtaccttgcctcctgggacaaggaataatgcacgcacgtaaggaacgcccgttgggttatttccggttgtgacaagttggtatcagagcccccttgaccctaggacgagccttagatcccaagccttagcaatattttcaaaactaaaaatcctgtcttaattgtgaaaaccctctagtctctctctgtcctgctgcttcatttatcgccaaaatctgacttttaaatgttgcttttctttttgtttttgtttgtagatggccggcagcatcagccgtcgtggtctggacctgactggtttcgtcttggagctgcggggcatgtgcgttgtcctggggtatccgcatggagtggactaccagggcaggccgctcccggagcaggagggtgacgatgcagagccccacgctgcttgggaggttactgcagtgatcctcactggctcacccgagaggacttcgttggcagtcaccgcgggtggagattctttctccgccgcttgccagaacgccactctcctcgccatcggcactcttcaccagcgctacccggacgagttgcagcactcgcccttccgctaccaccctcgccgcggaggagcccgcgactacgccaccttccgggatgctagctcggaggatgacgctaccatcatgcacctggcgcgcatggtggaggcgtacgacgcggctcgtatcgacttccatcagatggtgcgccgtgggatggtcgagaacaacatgaagatcctggagctgcgtcaggagaatctgcagctgaagaaggacctagacgcagtggaggcgcagctgcatcagctcaagatcgcccagggagaggtctgtcgccccaagcgtcgccgcgtctgccgcagccagaagatcaccgcccgcaagagcacctccaggcccaagcttgttcgtcagtccctggcgtggacttgcttcgttgagacccctcgtgccgagcccgcgcctgtggttcctcaggagggggaagcctccggcgttggtagcacggaggatgcgctgttgctcaccttccgtcctggcccgtcgcagcggtagacgagcagttagtaggcttgcgcgtgtgttctttctcgtttgtcctcttgttggagtcgtgtggggcatggttatgccggtgtgtggcataactgtgtcggagcctgtctttattttatttgcttaagcaacttgaactttaatgaaccaatttaatagcagtaataaattcaagaattatagtagtcgtggatggttagctttagggtaccgagctcga

SEQ ID NO: 29185 - DNA, 4709 bp, Oryza sativa
ccaccaccaccagacaccaacgccattctcacccaaaccctcgcccagcaggccaacatgatgactgctttcctccaccacctccaaaatccgccacaacagaatgctccaccaccacccccacaacactttaaactcgccgagttcctccgcatccgtccacctaccttctctagctccaacaaccccgtggatgcgttggattggttgcatgccgtggggaaaaagctagacaccgtgcagtgcagcgatgaggagaaagtcgtcttcgccgcccaccgactgcaggggcccgcatctctatggtgggaccatttccaggctacgcagccagaggggcagcctattacttgggcccgcttcaccgccgccttccggaggacccatgtgcccgccgaagtcatggcccttaagaaaagggaattccgagagttgaagcaaggcaaccgctccgtgatggagtatttgcatgagtttaacaacctggcccggtacgccccggaggatgtacgggaagatgaggaaaagcaggagaagttcttggcaggaatggaccctgagctgtccgtgcgtctagtctccggtgactatccggatttccaacgtctggtggacaagagcatccgcttggaagccaagcacaaggaactagagtcgcacaagcgccgcttggcgaatttccgcaatcaacagggtgctaaccaaagggtccgctacaccaatccctatccagggggatcgtcctcgcagcagcaacagcagcaacaacctcgctccgcgccccgacctcaattcgtggtgcgcgtcccacagccgcagcaacagcagagtcaacaagggactcgtgcgacccgtcctcctatgccagccgtgcagcctggtcaaggccgcagggacgttcaaggtccgcagcgtctgtgcttcaactgcttcgagcccgggcactttgcggataaatgcccgaagccgaggcgccagcaaggccaaccgcctccccgctccaacaacggtggtaaggatgtcattcgggatcgtgtgaaccacgtgacggccgaggacgtgctgacaactccagacgtcatcgttggtacgttcctcattcattccatccctgctaccattttgttcgactctggagcttcccactcgtttatatcggtgccattcgtggggagaaatcagttgggggtagaaaggcttaggaaccctctgctcatcaccacccctggaggggttatgacagcaaagtattatagtcctgccgtccctatagaaattcaggggattccttttccctcggatctgattcttctagacaccaagaacttggatgtgatccttgggatgaattggttggctcaattccaaggaatagtggattgtgcaagacgcactgtcactctgtaccgagggccggaacaaccggttgttttctttgcacccccaacctctatcagtagttcagaacttcatcagataggactgtcagaaatccccatcgtcagagagttcggagacgtgtttccggaagaactacccggtatgccgcccaagcgagagattgagttccggatagatctttctccaggaaccactcctctgtacaagcgaccctaccgtatggcagcaaatgaactggccaaagttaagaaacagttggaagagttgaaagaaaaggggtatatacgtccgagtacttccccctggggtgctcctgtgatttttgtggagaagaaagacaagacgaagaggatgtgcgttgactacagagctctcaatgaagtcaccatcaaaaacaagtaccctcttccccggatcgatgatctgttcgatcagcttaaaggtgccacggtattctccaagattgatcttcgttccggatatcaccagttgcgcatccgtgaagaagatattccgaagaccgcattcaccacgcgatacggactgtatgaattcacggtgatgtcattcggtttaaccaatgctcctgccttcttcatgaacttaatgaagaaagtgttcatggaatacttggataagtttgttgtggttttcattgatgacattctggtatactcacaatcagaggaagaccataagcaccatctccgtctggtgttggggaagttgcgggaacatcaattgtatgccaaacttagcaagtgtgagttctggttgtccgaagtcaaattcttagggcacgtgatatctgctaaaggagttgctgtggaccccgaaacagtgaccgccgtcactgattggaagcaacccaagacagtcactcaaattcgcagtttcttaggtttggcaggatactaccggaggtttatcgagaacttctccaaaatcgctcgacccatgacacagttgttgaagaaagaagagaaatttgtgtggagcccgcaatgcgagaaggcgttccaaactctcaaagaaaagctggtttcctcgccagtgttaatcttgcaggatactcgcaaggacttcatggtgtattgtgacgcttcgcgccaaggattggggtgcgtgctcatgcatgacggtcatgtggtggcctatgcctcacgccagctacggcctcatgaaggcaactaccctacccatgatttggagttagccgcggtggttcatgctctaaaaatctggcggcactatctcattgggaatcactgtgaaatatatactgatcataagagtttgaaatacatcttcacccagtcggatctgaatcttcggcagaggagatggctagaactcatcaaggattatgatgtgggaattcactatcatcctggtaaggccaacgtggtcgccgacgctctaagtcgaaaaagccattgcaacactcttaacgtccgtggcattccacccgaacttaaccaacagatggaagccctgaatctaagcatagtgggtcgtggattcttggctgcgttggaagccaagcccaccttgctcgatcaaatccgcgaggcttagaagaacgacccggacatgcatggactcctcaagaatatgaaacagggtaaagccgctggtttcacagaggatgaacacggaaccctatggaacggaaatcgggtatgcgttccagataacagagaacttaaacaactgatacttcaggaagctcacgaaagtccttattccatccaccctggcagtacgaagatgtacttagacttgaaggagaaatactggtgggttagtatgaagcgggaaattgcagagttcgtggccctttgtgatgtgtgccagcgtgtcaaagcagagcaccaacgaccggccggacttctccaacctctccaagtaccagaatggaaatgggatgaaattgggatggatttcatcaccggacttccaaaaacccaaggtggatatgattctatatgggtagttgtggatcgattaaccaaggtagctcgatttattcctgtgaagaccacctatggagggaacaaactagccgagctctacttcgctaggatcgtgagtctccatggcgttcccaagaaaatcgtatctgataggggaagccaattcacctctcacttttggaagaagctccaagaagagctgggtacccgattaaatttcagcaccgcgtatcacccgcagacggatggacagaccgagcatctaaatcagatcctagaagatatgcttcgcgcatgtgtcctagatttcgggaagacctgggataagagtctcccctatgccgagttctcctacaataacagctaccaagccagtatacaaatggcaccttatgaagcgttgtatgggcgcaaatgccggacaccgctcttgtgggaccaagttggggaaagtcaagtgttcgggactgatatcctgagaaaagctgaagcgaaggtcagaaccattcgggataatctaaaggtggcacagtcccggcagaaaagttatgcagataaccgtcgccgtgacctggaatttgcagtggacgattttgtgtaccttcgggtcacgccattgcggggtgtacacaggtttcagacaaaagggaagctcgcacctcggttcgtgggtcctttccgtatcattgctcggcgcggagaagtcgcttaccagttggagctgcccgcctccttgggcaacgtgcatgatgtgttccatgtgtcgcaactcaagaaatgtcttcgagtgccatccgagcaggccgactcagagcaaattgaagttcgcgaagacttgacctacgtggagaggccagtgaaaatcctggacaccatggagcgcaggaccaggaaccgggtaatccgtttttgcaaggtccaatggagcaaccacgccgaggaagaagctacctgggagcgtgaagacgagctgaaggcagcccatcccgatctcttcgctagttcttccgaatctcggggtcgagattccgtttaaggggggtaggtttgtcgcgtctcaaaacgactctaaaatacatcctcgaaattatgcctagaataattaaaatccatgtgaaagcctccaacaattaaaatgtgcaaagttaaaagtcaaataaggcttggaggatttttgtatatttcctaaaagcctaaaatgcgtaaataaattttagtggaattttcagagcacaaataataattattaagaaataaacaaagttaaaatggttttataaaaagaaaagctctaaaaagtcctttttcccccttcccctcttgggccggctc

SEQ ID NO: 29186 - DNA, 4831 bp, Oryza sativa
gtgtgggtccgggctttgataaataatattgtatagttctagaatcatgttacaaaatagctttgagcaattaagtgtctttaaatgcttgtttactgcaaccctaaccctttatattataactcccttgtactcccttgcatttattatgcacttgtgggtgtgtcttgttgagtacggtggttgtactcagtcttgctcaatttttcccaaacccagaagaggagtctccggaagatgaagattttggtgcctagctcgtgcctgccgtcaagcgcctgtggtcgtcgccctagtcttccgctgtttctcgtttgtctttgtgtgtgctgggccttcgctgcccatgtaataaattaactatttacgcttccgcttgttgaactctgaactgtatcaacttttggtgtaccttgcctcctgggacaaggaataatgcacgcacgtaaggaacgcccgttgggttatttccggtcgtgacaatctcggccgttcgtttccgtgagccactgccgtgcacccggtccaccgcaaaccctagccgctgacgcaataattcccttttccttttcaaaaataattcattattgcgtcataattcaattaaaatctatataagtgttttaatccgatttaatctttaaaaattcataactaattctttgtaactcagtttaatgtggttcaagttgcaaaaattatataaaataaagatgtacatattaaaattatccataaattgaattaaatttatttaattctttttaaatgggctttaaatagatttaatctcgtaaaattcataataaattcatttgaagtcagaatgaggccgttcaagtctcataattcatctaaaattatgatctacatgtttgtttactttatatgtattgtttatttgatttttattagtctttttcctcattttgcatgttagcttgtcgtttccgtcgttgcgaaggttcgcgagtgcgtcggaagtgttcaagaagattaattgaagaccgattattgcaaggcaagtcacacagatcctaaacacaattcctttgagcatgttgatcctatatttaaattctctatttatttcaactgtgcatttattttcgaatgtcaccgggtggtgtgaacttattcctttgttatggccaatttatattgattactttattccttgataccttgggttattataacttgactagttgagctttatatattggttcagctagatattagatatgattgcttagccatgcttagaaacattagcacactattgggataacttatgactcattattatttaatgatggcttaatgatagttcacgatggtcaatcgtgattggttaattaattacttgccaactaaaacctgataatggtgggttgtgagcacatggttttgagagtcgtgctcatggcaattaaggaccggttcgcgagctactgttgtgaaacattaaccgtgccaaccacaagccagcgtgggcaacggctttatcttttgtataacatgattcattgcggagcaccagactgagaagtggcggagataagcccacgggggtcgctggggagtccatgccttgttttataagggggtgattatgatccaggaatggtgcgctgtggtgagttgtgttgtgcagagggtattgtcacagcctctattcgggtactttccagtatcgcgacgcatggtagacatgatgttgaggctgtgtcttgtgggtacagtggtacacctctggccagagtaaaactatttgaatagccgtgcccgcggttatgggcgggttaagcaatgttttccgtgattagtctcacacctctcacaataattatggatgttattcctggtaataatttgcttagctcctggtttggagttagatctgtccacccgggtatggttattcaggatggttgggcctgtgcagcatgggtgtgttgctcagtgttgattaaaatttctgattaattactccactgttttacttctcttaaatgttttgctaaaggctacttttgcaaatgagcctatattatgccatcctttggtatccttgtgcacttgcatatttgctgtgtggcttgttgagtatgtcatatgctcattcttgcaataatcaatcaacctcagttgaagaaaaaggatccagaaggagaagacgtttggcttataccccagttgagctgcctgtgggagtggagccggagcttcgctagattttattttccgctgcagttttcttcatgaagaggactaagtgcctcataagtaagtatttatcgttatagttaatttgatggatctgtatattaaattgtcagtttgtgtacctcggctgattcctggacgaggattttatgcacaaataagttcggaaattactagtgaatttccgggcgtgacacatgagctagtcgatttatcacccaaggttgacaaaggacagatatcaagtaaacatggcacaagcgagcagattggtaaaccctgatcccatgtaattagcaaaacatgcatatttatttgcaaacgggaaaacatttaaaaaataggctcaatatgctcaaggggaatgtgtgacttgccttgcttcttcactttgatcttccgaactcttttcctcgcgaccgcgatcttccgaaacgacagatactacacgctgccacgcaaaacgaggaaaaacactaataaaaaccaagcaaacagtacataaaaagtaaacaaacatgtagagctcaattttatatgaattttgcaagttgaatggctcaatttggagttcaaatgaattaaatgaatttcaagaattattaatgatttattgcacaattattaaatattttctcaaaggaaaagacaatcgctgacattagcaaggggcggccggtgccgacacgcgggaacggcagcgagcggcggctggaggcacggcggcgagcggcggagcatggggtcacgcggggagcacgagagagggcgcgaggagctcgggtaaatgggggaaacgagcgaggggaatgcggggaggagttttatagcgctcaggggcgacggggaggccgggcgagatggatttggggcggcaaccgctggcgacgtgggcgacattgtgggcgaagtggagctcgatcctggcgcgatttttgggggaaacgtcgggagagtgtagaggccgatttcactcggtttgggcgcgagggtgtgagcgggagaggcctgaatcgggggcgacgtgggcggcaacggccggccatggtggcttatgctctggagaccgaaggtagaggaagggcctgacaggtggggtcgccgggcccacctgtcggggagggagagagggaggagccccaaggggaggggttaagcagacttaggggtggaggggagccgagctgggccggcccaagagaaggaatggggcgcgctggccgcgggagagaaggaaggcttgggccgaaaaaggcccaaagagaggaaggaggattttatttgtttttctttttaattaattgattaaatgatctttgtgcttattaaaattatttctcgagctccgaaaattcacggaaaaatccggagagtgtattagggcacaaagaatattacaaaatattcttggccaatgatttttaaaggaaattttaattccctcaatatttcacttgattaaattgctttaacttttatttaactagtgagcgtgcacgtgcaaggcacgttattacataaaattgaagaaaatataattagtgtacatcattaaagaatcgtagtaggaaccaagtaaaaataatattattgtaagcgatacattggtaattcatgaactaaaccttaattgtttattcattacatgataaccaaatgcaaaaaaaagtaatatttgtttgtcattatcgatttcagttcacttccaaatcaatccctctcaggagatgaggtagtgccagcttcgctcggttctaggttgattgccctacatattaaggcaatcttcacctgatcatggaggacgatatcgtttattaggtcgtctcgaacatctggatatacatgtatataatatgatgcatttagtattatgttagtctgtacattgagcagaagaaatgaaatacgtgtatgtacctagaagaggaccgtacatcccattgtctggccagtttattttaggcattataaaaatccaaagagctaatgcaatagaggttaattgacgacaattgtaaaatgtaaaaaagatacttgtatgatgacgcactgtagaacttgtgctgaccaaaagtcgtagaatcaaaaaaaatatatataataagcaagaatcatctcttctaaaaaatctttgcatgtaattattcttcatgccatcgttacatcttatctaacattgtatcatatagctttccaaaggccattttgacctgggcttagataatagggacatactcacatacacatatgaattagctaccatgcctgatactatagttgacattgaagatagcgctgcattatccagttttcgacaagattgtaatagtcgaattagactcggttttctgagctagagaattggtccggaactcaaggaaagaagctgcaatcaaaattcattcccattttccttgactggaatttaacaatgggcacaaacacaagaatgcctatggacaataaagatataagctggaaggagataacttctgttgtctaaaccagaagctaacaatgcaaagtaccacgtatgaagttttgtatcatattttacacgagaaaactggtttcataaccgaaatcctttccttccaaa

SEQ ID NO: 29187 - DNA, 10281 bp, Oryza sativa
cgatgattggcgcactcgagggttcggcggaggtcgacattgtcgaaggtggagttgtcgccgcaagggggttcgcctgcgaagtcgccggagaactcgaggaaatcgccggagaagattggggaaagtttcggttggggcggtgaaaacggaagtgacgccgtgaaaatttcaaagcagtggttactatttaaaagaggcgcgataacggccgaaacggaaaggaaaccctagattcactcgtaaacgaaattaagcaaaatccgcaacattacgaatatagcagacttggggggcatttgttgacgaccaaatttggttagagcatgtatcagattcgaggttaagattgaagcggatttggcaaaggagttgttctcggaaacggagtatgaatcggctacgggggcgtcggctgaagactgcatcggctaatgatggatcggacggaagatagccgatctcgctaaggtggttatataatcatctcctggattgatcaacgtgctgcacaagcattgccacgattgagataagctcacggataggcaattgtatctattaattaggatattttgaataatttctttagagatatttatcggcaagagtctgcctaagagacttgttcgtatcttaatggttgtaatagttttagattctcgtccggcaaggatacattatgtactttgggtataaatatgacccgagaccatgtaaacatcaaatgacatttcaataacactttcggcgcattgccatcctttttttcattgtttcgacgagttcttacgttcgggttgagctgcatcggtttcaatctttaacaagaggtaaaaaacttgttatggcagcttgcattctcgagattagtgtttacatctttatgacactctaatcttggttatgtaaaccgttgagttatcatatatgctacataatctctatcggtattactcggaagcagcagatagagttagatatcgttattgatctagattatataacatatctaccatctcatatagattttcatcaactggcctagatcttgtgtttatcgttgtgcttaatgctacatcgtttaagttcgatctattaattagtatccataaatacaatatctaacctgttttatgattatcgattgggatagtatcggggttttacccgatcttacctgatttagctacattattccctacatgtttacttgatatgctaaacctgccctttatattaagatcttatcacattaaagtatattcggcttactatttagtatattttgcttgttttaatatcttgatatagagtggtaacagagtattagccaatgcatgttagagctgtttgatcagctatgctatgaacatatctatataatcttcatctcaaagtttttttgatgggaaacaacaggagagactcctactgtgctatattataataataaataatttacaggggtatgtacaaaatcttcatctcaaagtacttttaagcataagtgatttatactgtctcgactagctgttcgatctatcccaatcagttggtttaagtatatcttgagaagaaaattatatatcattgatatctacagccgatcgagcagatttaactttattttgttttactcttcattgctgatctaatgccaataacatcggctaagcggttaacgatatgtcatcggcctttagtcgatcggctatcgtttgtggattttactttgtttttcttgttttcctttcttgttgattgcaggatcaaatcaactagcatgcctttgaacccaaaagcaagatttagggcctgcactagagtgaagtagatctcccaggccagtgtgtgtttttcgcatcaacaatatggtgttgttttaggaaaagaatggaaacggtcttgcgaaagaaaatggacacggctcgctatgcaaaacaaaaccgcggatagagaggggagtgaattgggcacgattcatgatcaaaggtgtgagagaaaaaaattaattagttcaactctcgacaaattaatttaaaaacattaactccgatgctctgaaaattctgctttaagtcctgttagcgattttagagcaaagaaaatttgaaaaaaaattctccctgacaattcctattattaaatgcattgttaatttgggttttctcctaattaaccaaagtaatttctttaaaccaaagtaattgagccgcagaagtagaaaaataaaagaagtaattgattttgaatgtattgttttacctttgtccccctagcggtcacaatacctttggattttttccttcccttatcctctcccttccggcttccccctatcgtcatcttctctcaacggctagggaggtactccctccgtttcaagttataacaaattttaacttttagtcaaagtcaaactactacttcaagtttgactaagtttatagataaatataataatatttttattaccaaattagttttattaaattagtaattagatatattttttataataaatttatctttggtcgaagatattactattttttataaacttgtcaaacttgaagcggtttgattttgaccaaagccaaaacatcttataacctcagaacggagggagtagcagagaggagcgacgacggagaagtgagggttagaagcgacagcagcagcccgcccaagcgatggcggcggcaccgcactaggaggaagctacagcggcggctcagtgtggggtagaggcgatggtggtgacggctctgcgcgaggaggctgtgaggggaagaagcgatggcagcagcccagctaggcaatggcggcagcacagcagctccgcgcgaggaaacgacagcagcggctcggggtggaggcgatggcggcgacggctcggcgcgaggaggaggcgatggcggcggtggctcggtcaggggaaggagcggcggcgcggcggctctacgcgaggaggaagcgacagcggtgactcgttggggcgacggcggtggctcggtgctgaggcgatggctggcagcggctccgcacgaggatgggtcggaggtagcttgccacgggttggagatgacagtgacgagcgggccaagaggcgatgacggtaacaacacactaagggtacaaatgtcttttcgtcaaatgtttaacacctttagcctgtccatccaaagtagttgtaatatttagcttcgttttaaaaaagtaggggaaaaaataaaaaccctaaaatacaagggtaaaatcaatattaaatatgaaagtaggggtaagaacgaaattgcctcaaaaaatttcgaatcccggtcggtcaggaactcactgccatccaaaaaatttctactttgtaaatatttgtaacaatttgtaacccttatttatatattttaatatattgcattagaggctctcctcctgtttcccgtaaaaaaaaaagggaattcactgccatcgttattatttggacacaatcggcgtgaggaacaagccgcccacgagaaggtccaggaaattgctcagcgtagagcgtcctattaggtggataaaaatttgactgtacactactgtacgcatgcaagtatagcacagactagtttattggagaatgctgtgtttagttcacgctaaaattggaagtgtggttgaaattagaacgatgtgatgaaaaagtttgaagtttatgtgtgttggaaagttttgatgtgatagaaaaatttgaagtttgaagaaaaagttgggtgtccgcccgcctcttctagcgtgtactggtggtctgattggttcttctctactaatctgagtgcacgtctggtgcccgcccgcctcgcttcacctcttctagcgtgtactagttcattgcttattcacatatttttttcttctttcaatattttcctttagaataattatacaatttacgattcaattgcaccgtcatatttcttgaattaaatatttataacaagacctcacacgtttctatttcgatgaaaaaattgtttcacccgttaaaaaaaattatttcagttcacactataaaatgttttagagatatgcgacatttagaaaatactaaatgtcgcatatctctgaacgagtgagacattaaaaaaaagttgaaaaatacaatttatttgcaaatacttaacattattgtaatatttgtgtatcacatacttttcaaatattataaaacattaggtgaacaatgcaaacaacaacattgcaatatttacaaattaattagtagctaaaatactagttgaaacatttaaaaaaactatgtgcaacatttaaaaacactcactagtagctaaatttatttttcatcataatataatcatatgcggtcctgttataaaaatttatttataacagatttaatggtataatcggattgtaaattggatatgtaatttaagagaaaaaatagtttaaaattaccaaaaaggacttgaaccaacctaagcaaccctgctttattcttatactcagtgcatgcatgtagagtttttaactagcatgagtgttggttttgatgtgcacctgaccacctataccgacagaggcctgggtgtggtgctcgatccatagtagcttcgggatagagcgcccaataaaaatcagattgtacactacatgcatgcaagtataccatattttttctcctaaactacttattcaatctacgaaccgatcatcccgttgtatttgtcacaattaaatctttacaacaatatattatatgattatattctaataaaataaaaacatatgtttcaaatcattaaggctgtatttagatggtggaaaagttgggaagttgggagaaagttggtagtttggagaaaaagttggtagtttatgtctgtagaaaagttttcgatgtgatgtgatgtgatggaaagttgggaattagggggaactaaacacggcctaaaactcaatgtttcaatgtgttttattcggtgtgttctatgaaattcactgaactacctgccactactctctgtctcctctcttcactctatgcatgcattttagcgatttttaaaatgaattttctcccaaactatttatccaatctaagatccgatcaaaccgttgtattcgctgtaattaaatctttacaataaaatatcacatgactatattttggcgaaagaaaaacataagtttcaatcctttaacactcggtatttaatacatgatagtgatatatttcaacgtgtatcttcgtcatgtttcataaaatttgtaaatgtctcagttgctattttttttatttcaccatactttatgtttcatgtatttgtcaactgcaacatttgaccatccgatatttttttaaggaatcgggcgaccgatccgtagtttccttctttctagagaatgattgctaaccgaattcccagaaattaccatgaaactgcaggctatatatcataaatagcaaaagcttaaagcattatttatgtcataaatggcaaaagctaaaagcattatttacctatctcagctatccctggggaaattaaaaaaataaagagaagaaataaaagagtggccggtggtcttactatatatgcaaagatatggagtatataccaggaatcctgccgctcgggcgaccgacgcaaaaaatgtttcacctaggtactcacaatatttcactatgtatagatctagtgttacagtgaattaaaatattcttttgcaacaaattacccacatattttggaaaccctctattaacggaattcgtttcatttctagttccataaaaaatgtttcacttagtgtactcacaatgtttcagtatgtatagatctaatgttgcagtgaattaaaatattcttttacaacaaatcacctacatattttataaaccctctattaagggaattcgtttcaatttttattccaccaaaaatgtttcacctagcgtacttacaatgtttcagatgtatggatcaaatgttacagtgaactgaaacattctttcgctatttgctgaaacattattttatataaggtgaaacaacacccgatttaacgattgaaacgttttcaatctacttagtgaaacaattttgatatacttggtggaacatcgtgcaacatttaaaaataattcaataataagctacattttttttcattggaatataaccttgtgtgatcttgttttaaagattaagttgcaatgagtttaatggtgtaatcggatcatgatttggataaataatttaagagaaaaattgtttaaagtggttttgcacgcatgcgtcatgccctcaaatattttttaagaagaaaacgttcaaattatatgcttattaatatttgttgtttcaagatgtttacagtataaataatagtgagatatgcactagacacaagtatattcgaactttgattagatctaagatcgatcataaataaaaaaattgtgcaaagtataaaacaagcatagtaaattctataaattagtaacaataaaatgtgcaacttatgggtgatggaattaaaaattccgcatctgattaaaattttaatattgataatattttaacattatcatgactttaaatcgtattgataatttttttaaataaaaatggaattagaaatacggtgaactttttagtttcagtttctctatgttgtaataatcacaaagatgaatttgtgcccatctgactctctctctctctctctctcggggatcccatctgactctcagtttagtattttattgttctatttccaaaattcaaaattaacaatttggaattaatgaggactatttttttgaagtaggctagtattaaaacacccgtgaaatggaggggttggtgactagtataaattaatagtaagccctaacaataaacatcggacaacaaaatgagtgcgaaatacatagatgtaaataatgctgacttcctcggagttgtggtatggtactataggaatctggttatgaccctttgtttcaaaataagatcattttcccttctctttatccaagataaatttgttttttaagtagtctaacaaatatacgcattgatgttagtatgacgcatatatgttggcatgtatatcgttgtttcctgtggcccaatctccttatatctctcctggttctgtttctatagatcgattgagtagatttaggaaggttgtgtgcctatatgtactccgcatcggaatcaatatgattatcgcgttgagtcctatcatctcacatggtatcaaactcctcgatccaccgcttccgctcctaaaccctaaacttctcgccgcggccatgtcgaccgccagctcctctctctctcatgatgcgctcgtcgacaccatcaccacggcagtggccgatgccatccgcatctcctaccagtctcctcccggcctcacggtggacgacgcagttaccaagtccatcgccgactctgctgctgacaaggcctccgctgccgtgcgcgatgcactctccaaggatttgccatcgccaatagccgtatctgatctcccagcaacggaaaccgcttccgttgcgccccaggattccccgcccatcctcccagagatcgcggcgctactcgcccgtctctgtgtcggtcttccggctccaacttcagccaatggcaccactgccgacaacaccaacagcttgccgcctccgcaagtcttggacgccgaagttcgcaacgtccttcacacccaagctgttgctgtcctcaacgtgaaggcactcgtcccgctgacgctcaacctcgccgctgcaaaccattctcgatggcgcggcttgtttctcgtgattctcggcaaatatgccttgacggatcatgtcacctccgatgtgcctctccttgatcaagccgactggacgcagatgaagtgcgtggtgctcgcctggttgtacggaataatctcccaggacctgcttcaagaagtcatgtcgccgacggcctccgctcgcatggtgtggcgtgatctcgagttccaattcctcagcaaccgcgaactccatgccgtcaacctctccgccgagttccacacgttatagcaaggtgacctctctgtcacggagtattgccgccggctctgaaccatggtggacaacctcacggatctcgggcgaaccacagagcgactgcacgcttgttctcaccctcatcaatggattgagccctaagtatggaaatatgtaatctctcgttcccatgcaagtcccatttcctagttttctccaagctaggtcgcagcttctgctcgaagaaatcacgagaggacaccacccggtgtcagacacggcaatggcattcgttgcatccactgttagtgcttgcatcgtacccaacacctcctccaacacccaaggcggcggcggcaactccgacaacaactcccgcaatcgccgctgcggtcgcggtagcaatgaaggacaaggcggcggctcgtaggtaggacacgccacaggaggtgagcaggccggtcagcaagctgatgccactcgcccggcctagcagtggcccaccccattcaatccatgggctggcaccatccagatgttgccaggccacccggcctcccttcgcggggcctatcttcaacgggctccctctccaatacaatggtgggcagggccaatacagtgcgggtcagcccatcaacttccctccgcagactggactgccctctcttcaactgcctgggccggcggcatattctgccccccctccccttcggtggtccctccagcccatcttgcgcttccaacactgcaatggcccgatccgtctcagtggaacccacaatcgcttgcaagctccttaaacaccaccacactgactacaccgacttcaaatgagtggtacatggattcaggtgcatcttcccacatgagtgctcatcccggtattcttactgcatcccatcaaccatcccactcactgccctcccacattgttgtcggtaacggttctcttatacccatcacagccactggcaccgcttatttacattaccccaatcactcctttgagctcaacgatgtcctagtttctccacatatcattaaggatcttatctccgctcgccgttttgctcgtgatcattggtgtgctgttttgcttgacccttttggcctctctgtcaaggattaccaacccaggattgaaatcgccaggtgcaataactccagagacctttacccctctctgcggacaccctaccattggcaacctccgctcaagcatttgtcgccatgccctctaacaccgatctttggcattgctggctcggccaccttggtcacgaggccctcactcgcttatctcaggcttctgttatttctcctccgaagagcgccacctctctttgtcacggttgttagcttggccggcacgtccgccttccttttactatgagttttactggtgctagagcaaagtttaagcttattcattgtgatctgtggacctctcccattgttagtgtgtcaagttttaaatactatttggttatctctgatgacttctctcattatgtgtggaccttccctttaaaatttaaatccgacaccttttctaccttgtctcaattttttggatttgcgaaaacccagttctccaccaccatccaaagcatccagtgcgacaatggtcgtgagtttgacaactctagcgcccaaagtattttttctcaccaacggtgtctctctccgtttgttctgcccccacacctccccccaaaacggtatggttgagcgcatgctatgttccctcaataacatagttcgctccctcctgtttcaggctagcctcccaccgcccttttgggtggaagccctccacacagctacccatctcattaaccgccatcccaccaagactctccacacaccacacaccgtttttctccctttatggtgcacacccctcctatacacacctcagagttttcgactgcaagtgctatcccaacctatccgccaccacaccccacaagcttgccccccgctctatcatgtgagtatttttaggatatcctaaggatcacaaagggtacaggagttttggtccttcctccaataggatctacatttcgtgtcatgtggggtttgatgagcactcgtttccatatgctgagataattaataatgcagatgctactaaccttgattttctcgaggatatttctgcaacaataccaagtccgatcgggcgtcgccgcataactgcacaaccagggtca

SEQ ID NO: 29188 - DNA, 1501 bp, Oryza sativa
gatttttcggcacaagattcaggtggatggttctctcgaccgctgtaaggcacgatgcattctttgcagctgtactaagtgccccaacattgacatcgacgagaccatcagtccggttgtcaagccagccaccgtccgcacagttctgagcttggcagtttctcgggactggcctattcatcagcttgatgtcaagaatgccttcttacatgggactctacaggagacagtgttttgctctcagctagctgggttcgtcgatgccttcaaacctgacttagtgtaccatttgaacaagtcactttatggtttgaagcaagcaccccacgcttggtacaatcggttcgccaacttcctcctatcctttggatggtacagtcagttcgccaacttcctccaatccactggattcaaagaggctaagtccgacacctcgctgttcatctatcgtcacgggcccgctgtggtttatctttttctatatgttgatgatattgttctcactgcttccacttgcgatctcctctgcttcttggaaccctgcaccactttcttggagttcgtgtcagccgcattccgtctggactcgttctcagtcagcgtcagtatagtattgagattcttgagcgggctgggatggctaactgtaagccttgctccagccttgctccactccagttgacaccaacgccaaactgtcttcccctcatggcactcatgttgccgacccgactgattttcacagtcttgcaggtgctctctagtatctcaccttcactcgaccggacatttcatatgatgttcagcaggtctgtcttcacatgcatgacccacaggagccacaccttgctactctcaagcgcatcattcattatgttcatggaaccctggattacagtcttcatattcatcgctgtcccactattgacctggtgtcttaatctgatgtcaattgggccggttgtccagacccgcggtggtctacctcaggctatgcagtgttcttaggtgataacctcatctcctggtcctccgagcgttagaacacagtttcatgctccagtgcgaggctaagtacagggttgttgccaatgctgttgccgagacctgctggcttcgccaacttcttcatgagtttcacactcctcaaaggaaggctactcttgtctattgtgacaatgtcagcgttgtgtatctctctatcaacctggtatagcatcaacggaccaagcatgttgagatcgatctttacttcattcgtgatcgtgtcgccacagggctgttcgtgttcgacacgtacctaccacatcgcagtttgctgatattttcaccaagggtttgccctcgactgtgttttcggaattccgatccagtcttaacgtttggccagccgacgctaagactgctctcccggggggggggggcggttagcatgacgcatatatgttggcatgtagatcgtttgtttccttgtggcccaatctccttatatctctcttgg

SEQ ID NO: 29189 - DNA, 4566 bp, Oryza sativa
aattcagaggaaaagtaaacaggagcattaagggaaaccactacggcgtgtctgggtacacacattgaacattgaaggagtcgattgaaaaagccagacgttagctagctataccatgcagggatcagtatgtttggtgactgacatctcaaaaacggatttgaatccggtgcagtacctagtgtgactgcaacataagcagtcacgctaagaccttttgatgcaaatccaagggtccaaaatctacaaagtactgttcacatccgaaaaaaattatagaactactatagcatcaacactgtaccatcagatttagaccgttcattgaaaaaatggatggctgagataatgtgtagttcctaagttgcagtcacagttaggactgcactggatctcaattctgacattgtacagatcagtacgacggcgcaattaatggtttatttcgacaatcaaatgtgggtataagttttatttacactgtcatactctctttcttacactatctttaaataaaatcctctgtttcttggtgtactggcctcatcctcaatttcttggtttattggccgtagccaatatttgaatttgggtatatttaataaaaggtcatttgggggtcttaattgaagtctttttgccatccttggtttttaaacagttaagcctagtgatgtaaaagttttgtctatccgtggttgctttgtttatttctactgcctaccaaccgcagctcaataaaaattggcatgatttttataaaaagagcgctagccatataatagaatgttggaaaaactataagacttaaagaaatatgtaattcttaattataagcatttgtctagtgaaaatatacagtgaaaactaccaaataaataaaatcccgtgaaaagtcaaaaccttaactagcagagtcagagacaaattacttgcatgaaatgattaaaaattattttggaaacatatttggtttaggaacacatatttgattggttcttcaattttggttttatatgtgttttttgaagtgcctttttacgtgttgatggctggggtatgatcaatgtggtaagatatttatatccctttttgcagagaaatcccaaacttaagcatcttcctcatagcataaagatatccctacactgccagctctaagaccaaaattgccccaaaattgcatctccctcctgcttggagctgtgttcccaacctccctctctagtttactgtgcgtacgcttttcaaactgctaaacggtgcgtgttatgcaaaaattttatatagaaaagttgctttaaaaaaccatatcaatccatttttaatgttttttaagctattaattaattaattacgcattaatctattgctccgttttccgtgttgtatgggagttcccaaccctcacctaagaacattagtattgtctcgtgttgcagtattggaaggtgtttacacccaaatttggcacctaggttcaaattacgaaaaaattgccaaaatttggaagagcacccggtgtgttggacggtcagacctctacttgtaggccggtctgaccggcgttatgtggccggtcagaccggtagagtctgatcccgagtctgttttcgtcgggtcttgggatttcttattcggaagggtatgtttcgggtttccattggtttatatcccgagttggatgtggaggtcagtggcggacgcaggtttaaaatatagatggggcggcaaagctagccctaattaggtgatggcataatgcacacaaaccatagtcgctagttcacagcattggcgcaacagtgcacggcacaaacatcgagaaagttaacaacaaagattggtagtcgaacaaacgtatatgacttatatgtagagagatgaaaaaaaatgagaaatgttgttagacaataaggggaaccactttcaatagttcgggggtataaaacgagatgaaaaattatttaggggtttaagtgtgtcagggttatggataccacatacctaatagtagttgactaaatctcgggatgacccaccacataccatgtcctatacggaaacaacctgcgaatataggaggagttccggataaggaatgataaccagagttctatatggaaacgacaaggactactcggattgtgtccatattggtttccctagttctacttggacaaggggatacctattggtataaatacaagaccccctaggaggagaggggacacacccaccatagaagacacggcacaacagaagccacaacatacaagccaacatacgccaagacaagccgctggatatcaacattagagatatacccagatcgacccaatccagtaccttcagagaccggccgtagggatctagcgctttctctgatctggctgggcacggatttgaggaggaagactaccctgttgtcgactacgagtcagaccttcagaccgccatgtcgacaacagttagataggctaccctaaatattgtactggtgtgattatggtgaataagagcaataccggcttcggccaacagaatgtagggttattacctgacaatttaggggcccgaacctgtataaaaatccctgtctctatctcttttacctcaatatcgcatataccctagtaccaacgatccccatactatgcaaatactggaatcgcgacatcaaacgtcgacaaggtgcttccccaaaatagttcaagtgaataaaatggattttttataaatatatcaatttaactatttactgtagactgtattatatgctaaagaaatagaaagaaaattgaattttatgtatggccaaaattagaaacggtcaaaatggtactacttatacacgaattttcataaatgttttggtttctacttaaaatacttgatttatctgattattcaatagtagactgatgactaatgtgttagaaataggactaaaatgaggtttgaggggtgtggggcgacacgaaccgtagctggcccgatcgacccaccctgcccaatgggtgtgtccgccactagtggaggaggacacgaaggaggcaagaccaacccctatatgaggaaagaggccggtataattggaaataaaacaatctacacacaatccaatttatccaattgaatcgctttttcaatatttcacctagttctagcctagttcatccatctttgtcgatttgcactgtaaatcatctaccttccctgcgagtgtgcgaaatccctttgtaggtttgttttataaaccttctttttgcccatgagaccggtatttataacttgttctacctaaatcggctccgctagcatgtttaatccatcaaaacccatcctgatctagcttttgctagtttggagtggttagcgactctatatcaccgcaaggcgtttaggtttcctgatcatgattgtcttcttgtagcaagttccgtagatgaaaccattaacgctactttcaataataaacttgaacatgatatgggttcttattttgacaaaagaattgaatctttagtgagttccaaattaagctctcttacagccgatttgccacacaattctattacaagtactagccaagcccctattcaccacttatatagcaaaaccgatggagcgactacgcaatatgccaggagcaaagctaaccctagctctgaggctagtatgaccgcgcccctggttggtctgaccgactctccccacatcggtttggccagcccacacgctggtctgacaatcttgaccaacggtcccaccggccctcaagctggtctgaccacatcgacctatgatctgactagccatttggttggtccaaccgcaccactgaccaccagtcctactaggttctcgaccggtcagactagcacaaatctgcccatgcaggaagtagatccaatcaccaataattatattttgcaccattttcatgtacctaatcatctagtagctccggttaatcctcatattcctccatagatacctaatgcttataatgatcctaatgttgggtgcccttaagatgttagatatggccaatataacagtattgcaccacgacaaccttttaggccacggaattcaccaaggcctaaaaatatggaggaccatgtgaggaatatcattagggaagcttttggaattgtgccgatgaatcgtgctagggtttaccaaaagtcatatcctgattattttgatgatattccatatccttgtggttttagggttcccgaattcactaaattcaatggtgaggatagtagggaccacatgggaacatataggccaattcttagcataatgtggtgagctagtaacacgtatgctttcaaattgcgtttgttttctttatctttatccggtattgcatttatatggtttacttctttactggcaaattctattcatactttaggtgtccggattttgttgatttatttgagtgggtcatcatgactttgggaccgaagaatgccggcgcaacatatcaaaaagcaatgaatttgatttttcatgattttctggggattatcttagaaataaacattg

SEQ ID NO: 29190 - DNA, 8143 bp, Oryza sativa
tttttttatttttaaacttttttatttttttcatattaattaatagacattttcaaaaagtatttctaaatctgaaccttttggtcacgctagcccgtctgacttggccaaataactttgtcacgccactgtgttatcctgtcacaccagcctcttgccatgccactgtggctggtggggtaaaacaacgctgtgtggtcaaaatgttcggttttcggaaatattttttggaaatatctattaataaaattaagaaataaaaaaaatctcctgcatatgataggcgatttgttccgatgattctggacaactcaacaaaaaaagttaatgtgagaccaaaccatctgaaagtatactccataacatttctaataagtactcatgagcctccataatcctggatcagcagctatgtccatttaaagtttggactatccaaaaagttttcggcagttttctaggtaaaaaaatattcaaatataactatagtataattctaatataattacactgtaacttgagtgtgactataatatatgtacaatatatagcttgagtgtaattatgcttttttccgtttgacaaatgttgtaggtagcgtactggtagtatgctctttgtgccaccatggcagatattggattcaaacttccaccgcgggattgcaaaagaaaaaaaaaagaattcctctcttccactagcatgaatcgtaaaccacattcttccactagcatgaatcgtaaaccacatgacatggctacattcttccactagcatgaatcgtaaaccacataacatggcttaaggaatgctatggcttgctctgcagtcgttgtcattattcatccacgcattccgtggacacacactccccattccttcacttatgcaagtacttttgcacatgacaataaaaaaaactcatggtatagtatttttttttgcttgaatctatagaatctatctatctatctatacctatactaattgggcactctaaagaagctaccacgttaatcagaaagatccgactattgattaagtgtgtcatatcacaatcaccgtagattttcattattgagaacctgcgttaaaatagattgtgccgcttctcagcccaaccaatgaaccatacgagcccatccaatgtatacgtacatgtatcgatcttttctcaggttacaattaactctgttaatttcagcaatccaatagatgggcacgcaaacatgtttgaggtcttcgctcgagagagacacaccgattccctgttcctcacatctgttcttggcatccttaattctcaatttttattgtcgaggtgaagagtgtggaacaagcctccagtcaccgagatcgatttattgttgtgatccacgttcctccggtgttgaatccatgatttgatttattttctcctccacggcacttgcattgttttttttatctagatatgattcgtaatataaattttgtttggttcgagtgtccatgcggcatcaacgctcgaattcgatcgatcccatcatcacgcatcatcatcatcaccagatctaatgtgccgtttcttttcaatgcccctgatccagcaccagatgcaatctgtaacttttttctattggtccacagtgatttttaatagatggtgcttggatcaagcggccacacagcatcaacaacttactgaaattcaatgccacgcatcttcaggttgccaaaataatcgctggaatcaaatttcaaactgatctaaatttagctcattagctatgtgggtaattaactgttgggatacgcgtaggctacgatagcataaatcaaaattttctatcgcgtaaaccagggaccatgcaagtattagatcatagatcgttaccactcgacgcgctgcgcactggaagaaggcgctaagaagtcgaaggaattctcgcgaagtagtgcgcgtcgatgtagaggaagtagtcgatcgcaccggctcgaccttctcctcctcgtgcgttctcctcgccgtattcccatgccgatcagcaccgcaaaccagtggtgcctctaccggtatccacacgtacagagacggaacgccacacgcagatgtgctagcactcgtgcgcagctagggttttgctcggggaggggagtgacggctagagtttctcacgtgatgcaatacctccgccggtcacacccctcacgaatatataggatccatcactcgggcctccaaggctcgtaggactcctattcggatccctatccgaattaagctcatattggatctccatccaatccccttattccggcccattaagcgtgcgaccctgtagtttcatgtacactcggctgtaacccgaaaactcattttcggtccacgcgtcaacagcagcccctagtagaacgtattgacctaccaggcatacataaagatcatatcggctgaacctctagtgtatacttgtatgaacccctttgcctcacgatatcgattaagctcaaggctagatatgtgccatcctctaatagctcaatcattcactcgaacctgttttgatagattatataacttgtgattgactcctgaatcacctttggcatagccatacacttccataatctacaacatcgaggggcctagagatatctctccataggaggggcaaatcccatcttgattattcctatctcactacatgtttcatagcatacccgaaaactatttttataactacccaattacggagtagtgtttagcagtccctaagtaagctactacacatgttgggaaccatgataatctcaggtctaaggattcaacaccaacactaaatgagattactgatgacacaacacatatgactcttgcaatggctcatgttgggtctatccaacaacatgttcactaacatgtgtctatattattaatttggtatctctataccatgatccatgagacatgatcattaattaatacatgtgctgatcatctaataatttttgttccacatataatatttgatcagggatcctttagaaatagcaacacacaatatacagagtctcgtgaaagaatcatatattcattaaccactatttcaaggagcaaagtcggataaatatgtaaacatactatgttatacaatcatctctatgattgcctctagtgcatatcactaacattaacatactcatgtcattttgttctctatgtattatataatagttagcagtcagagtaaaacaatggcatatatctgtgccagctaatcgagccatatgtttcacgtaaattccactcctaataacaatgttcagcgatataacttatgattttatctggcaatatattccatgtatctttaagttttttcctataggatatatggttattgccataatgcaattacgaaaatattaggtggattagtatggtctaatataattttcatgttctgcttatttcctcttatggatgcaaaattattggtcatgccttcactgcattatatattatgagctcaatctttagtccaaatcgatgtatctaaatttcattaataaatatgaagttgtatccatcttgaatatttcattttatttatttaataacgaaattcaaagttaccaattggtaacatatgattacatttttaaattttataatacaaagaaattgcataatttagtatttataatatataagtgatatatagcccgtgcaaggcacgggttggcggctagtgtaaatctaatataaaaagcatgcaccattagttgatcaagatagccataatcatatcccagctggtcctcatcacaaaaagataggtgctcaagggataaaacttcatagtttgtcgcacattttggataggtaagagtagtttaaaccatgagttttattttttttgcacatgacaataaaaaaaactaattgacataagagcagtttcaacgctttcttatatgacattcattgtacaaatcattagagacactggtcgagaacccctttttagccccagcttgcaaccacttaagtcccaggtagcaaaccggggctacgaatacaaaattaaagatctctatatttagtctcggttaaaataaccaagactaaagatagatctttagtcccggttggtgtctgttgatgtgaaaattaaagatgatggatcggctactcaatctccaaggacctcctctgggcatcattgaaaatatagagctagcaaggttcagtagcaaaaactttgacagatggtgggggtgaatggaagctacatctgttccaccaaccagcctcaatgtatatgacagatctttttcttgatgtcatacctcaggtaagccttaatcttattaattgtatttgaacaattgtcagccgattcataacttgactaatcttatcttctgttttgcagacaacagaatcttcccctccacatcaaagcaatagtggcagaaataccgaatatgccccaagtctgattcctaatggaggtggaccatctccccctatcatcggctatcatgcccccaggacttcaacccttctccaagggctcatcagagaaccagctcatcggctgtggacacatcagctccagacccaaagaaaaagaccaaattaaagaaacccaagccaaccgacgatctgcctgccctggacccaccatcgaacaagctctggatgaagaagagatcggagaggatgttgatcaagccgtagatgaagtatgtgatactgaaagaactccatcggcttcacccaaacaaactcctccgactccctctgctccagctcacttctccagggtaactatctctctctgtttcctttaataactatttatcctcaaccaatcactcattaattttgtctttgcagaaaaagagaattgttgtgaagaagaaatcggcagcaccaactctcaaaccggctccaccagtaagatgttcttaattctttcaccagttgacctcagccgatcttgtctaatacttgtctcttttcagcctcctcctccttctcctgtccagcaatcatcaagcgataaaactccatcagctgcagggagtcaccatgttgaagaagaagtacaaccagctactcctgctatcccagtaagtttcttttaaacaccaagtcttagatcggctatatttgtttgtcatctttgtcctttaaatttctcttttgttgccttagccgatctgttttcttttgatatcaaagattactttgatgagacagaagaagaaactacaagcaaggctctagcccctttggtcgacactgtcaagaaaacacttgaagacatatccctttggctagaatcttcgctggataatctggtagctgattgtggttcgatctgggcatgatttactgaaatccaagcttcaattccagacgatctagcaaacaccatcactccagccgtgtatcttgaacaacaccaatttaagctggagaaggctaagccatagatagccgatcggcaagaatggaaaaatattgaatctactatccaagccaatcggcagcttgtgcatgaagagaaagccaagttagatcaactctctgttgggccgattcagtcgaatatagatcggctcgaagctcgcaagatttatttaatagctcaactcgaagaatgcaacgccgagctggatctggaaaagcaaaagctagccgatcttccaaatgccgttgaagatcaaaagtccagattgagattggctatcaagaatgtggctgacatgaccaagtctctcaagatcatccctagaactgatgctcaagatgcccaagccattgaagaagtagaacaaattaggcaacgggctgtttcggctatccagtgttatttgtctcagtaacattctgtgtaatagaatctaggaatttttgtaattgtctaagaaactctgactctttatgtaactcatcttaataactcttatgccgattcaatgaaactccacattttgctcgaaaatttgcaatttttcataaaatttgcaatttttcagatatacgtgcccccctaattttacaatgtcaaaagctttgataaaattataaaaactactaagggcgatataatcatatcggccattgtacatcggcaaaccacaaccgattacaatatgaaaacaactaagggcgatataaccatatcagccattgtacatcgacaagccacaaccgattacaataggaaaacaactaagggcgatataaccatatcggccatctcaaggcgatgtaaatacatcggctatcatgtatcggcaatatcagccgatcatgcattaacccaaacacttgggtaatatttcttcaagtacttaccatttagtgctcgtccataaatttctccatcgagtccttgcaacatgtaagctcccttagacacaaccttatagatttggaacggtcctttccaattcggcgaccacttgctgaatttgttatcccaagtcccaatcagcaaaatcaacttccatacatgttcaccgtccgaaaaagtcttgggcaccactttcttattgtaatgtcgagcaactcgttccttatccttggtaacctttgcaagggctcttaatctagattgaaccaagtcttccctttcatcggccatgagattataatattcattggctgttaaatcattttgtaactccgttcttcttgagccgattctaacctcccatggtaacacagcctcatgtccataaacaagcttataaggagggacttggatcgacccatgacaagccatccgataagaccacaatgcttcatccaatcgagtatgccactgccgaggaaaatcagaaatctttctctaaatcaatttgatcaaactcttgttagatgcctcggcctgcccattagcttgtgcataatatggtgaagaattcaacaatttgatacccatgctatcggcaaactgaacaaactcattggacacgaagatttaaccctgatcggttgtaatggtttgaggaataccaaattgatggattataagctcttgaacaaaccgtatagcatcccccgaatcaactttcttcaaaggaattgcttccacccacttggtaaaataatcggtcgccaccaatataaacttatgccctttactcgatggtggattaatcataccgatcatatcaattccccaacctctaaacggccatggtttaatgataggattcatagtcgacaccggtgctctctgaattgctccaaatttctgacaattttgacatcccttgtaatatttgaaacaatcttccagcattgtcggccagaaataccccgcacgtcgaagtaaccacttcatcttatgagccgattgatgagcaccacaaattccttcgtgaacctcaccgattgcaaccttagcttgattggcactcaaacacttaagcaacaccccatcaatcgtccgataatagagctcatcattcaacaaagtataattcaacgctttgtaacgcaatttccgagaagccgattgagatggattctgtaaatattgatatacatcatatctccaatcatcggctattaatgcagcaaccttaaccttgatatctttgatcatcggcttatatcccgacgccccttgggccaaatcattagcttcaatattctgctatcgcgatacatgcttcaaagtaaccagctgaaattccttcattagctctcgacatttctcattataaaccattaatgtatcattcttgcactcatattctcctgccaattgactgatcactagccaagaatcccccattatctcaatagcatcggcttcaacatccttgagtaactgcaaccctttgagaactgcttcatactcagcctgattattagttgcataaggtttaatagtgtaagcaaactcaaaacttgccccccgaggggaaattataatcaagccgatgccacaaccatgagtgcatactgatccatcaaaaaactaaatccatggcacaacttcaaccgagccgattgaatcatcatgatgttcaacaataaaatcggctatagctttccctttgaccgccttcggtgactcataccgaagatcgatcaccgttaaggaaaatatccactttccaacccttc

SEQ ID NO: 29191 - DNA, 662 bp, Oryza sativa
attttttcataaatttgcaatttttcagatatacgtgcccccctaattttacaatgtcaaaagctttgataaaattataaaactactaagggcgatataatcatatcggccattgtacatcggcaaaccacaaccgattacaatatgaaaacaactaagggcgatataaccatatcagccattgtacatcgacaagccacaaccgattacaataggaaaacaactaagggcgatataaccatatcggccatctcaaggcgatgtaaatacatcggctatcatgtatcggcaatatcagccgatcatgcattaacccaaacacttgggtaatatttcttcaagtacttaccatttagtgctcgtccataaatttctccatcgagtccttgcaacatgtaagctcccttagacacaaccttatagatttggaacggtcctttccaattcggcgaccacttgctgaatttgttatcccaagtcccaatcagcaaaatcaacttccatacatgttcaccgtccgaaaaagtcttgggcaccactttcttattgtaatgtcgagcaactcgttccttatccttggtaacctttgcaagggctcttaatctagattgaaccaagtcttccctttcatcggccatgagattataatattcattggctgt

SEQ ID NO: 29192 - DNA, 735 bp, Oryza sativa
cgatgaatatccaatgccagtagctgatcagctggttgatgctgcctcagggcattagatattgagttttatggatggaaatgcggggtacaatcagatttttatggctgaagaagatatccataaaattgcctttaggtgtcctggtgcgatcggcttgtttgaatgggttgtaatgacttttggtttgaaaagtgttggagcaacatatcaaagagccatgaattatatctaccatgatttgatcggctggttggttgaggtctacattgatgatgtggttgttaagtctaaagagatagaggaccacatagccgatttgaggaaggtttttgagaaaaccaggaaatatggcctgaagatgaatccaacgaaatgtgctttcggtgtatcggctggccaatttttgggattttttgttcatgagagggggattgaagtaacccaaaggagtgttaatgcaatcaagaaaattcagcctccagagaacaaggcagagttacaggagatgatcggcaaaataaattttgttagaaaggttatttctaatttgtctggaagattagtacctttcacaccattgttaagattgaaagccgatcaaaagtttacttgggggcagagcaacagaaagctttggatagtactaaggaatatctcagctctccttcagttttgattcctccacagaaaggggtaccggttagattatatctatcggccggtgagaagtca

SEQ ID NO: 29193 - DNA, 3557 bp, Oryza sativa
attcacaccgctccctctattcaaaatccccaaaatggttttaggctgggctcggggtgcatggttttgatagtagcatctcggccgtgtaaggaccggtcttcgggcctctgttgcaaagcactaccgtacttccacatgtctagtgggtaaggcttagtttgtggctcagtctggttataaacaaaagtacacggatggagatggacgaagtcgggggtcgatggacatctctaggacaaatgaaggctacacgagctgcggcccggtagtcgagatgtcatggcacagggccggtgtcctgctgctaggggctcagtcctgcctacctgtcccgggggttccggccgtaggtgggattgggtcggtactcttgtctatggctaggatgggttggaaactatgtcacgtcttccgtccgtataccgtggtggtatgtggcacgtggctacacgtgaggaagaggtgtcttgtgggtaaagatgtacacctctgatcagagtataatctattcgaatagccgcgccctcggttatgggcaagccgagcaatgtacccaagttagtgttttaattcttaaaatttgcttaacaactaaatgtggaatggttggcctgggttggcttgggacgagctgggacccaaggtcgggttgccagttcggtctgagtcatcgtaggccttgggttaaggcaggttcgtgagggttcacggccttgattaataacactgtgtaactctaggatcgtctttataaaatggctttgggcaactaagtgacttttaaatgctgttttctgcaaaacttaacccctatattattaccccttgtatccccttgcattaatcatgcatctgccggtgtggcttgctgagtactgtggttgtactcattcttgctcaatctttcccccccttcagtaagagaagctttggagaagaagtcttaggtggagtcctggcttataccccagttgagcgcctgtgaagatggagccgtaggcccgctagtccgctgctgtttatttttgattgtcaggccttaagtgcctttgtaataatgtaaatattatcgatataataaagatgtgccttttataccatgtttgtgtggtgtaccccggcttttcctgggacggggattaatacactagcgttcgggaaaatgtatttttctcggtcgcgacaagatggtatcagagccatctcgactgtaggataagccaagtggataaaacctaaggacatattttataaataaagctatttgcgaaagttccttttttctccttcccctaatgctatttgcaaaaggtttactcccttcttccttcttcggatttcaactagtactagatggtcaggtcagtgaagaaaaagacatcgtcagttgtttgccgaagctccggaagactgcaggatccgctagcgaagtggaggaagcagtgaagccagctgtgaaggagtgaagatcttcggaaccagtcgtagaacctaagccgtcctctaggatagtgttgttagtcgtgtgtttccttgcttgtgtgtgtagtgcgtggtttgcatcggtgggttgtgatgtgaccatgctaggttgtttgcttaatcaacttgcagaataagcaaaacaaacaacacatcaacaaaaagagttagttcctttaaggtctggtccctagttctggtctattctttcctggcttgtttcctctctcacctcaatccctgtcacagatgtttaacagagaaaaaggaaagaatgtcagcgggtatgcctcaagtaactcaagttttcaactcaatccaccactggcctcaagagagttaacaagggcacacccttggtccattccaagcatgctgcttagttcacagctaccattggttggaagtcaagaccaaaatcagtatgtgtttgatcgagcatttgccacccaggtcaatgagctttcaatgccagaagagcatgtccccttttgtcatgattgtagagagcaaggacactatgccctgaattgtccatgggtatatgccaaagaagccccttcctttggtttagccgggcagacatcgctaaaccagcctcctcgcaccaagtcaagcttgcaggctagtgtacaaagtagagaacccaatggagagaatccattgaatccaaggaaatgctttcctcctagcctttcgtaccacgtggggtcacgtactaagcaagccaaaggcaagaagagtaagaatcagaagagaaaagcgctgatgcgaactgaagaagaagtacgtaagatgactattaccagcaccgaatggcctccagcagggataactattcctagacgtcaaagaggaaataccttccgaggtgcacgacagttgacccagcacctcctaagccatggtggcagagtatctgatagtgaagggtcagatcaagtctcctcggatgatgaagatgagtctccccgacatcttggtgaggaagagatggaatcaaaggcatgcacccgttgtggagaaattggacacgttgctagcaggtgtctcacactctgccctcattgtgaagaagaccatccacccggggagtgtcccacccgcaaggtgacatgttttctgtgcgaaggtacaaaccatgtgcccaaggattgccaactcagtgtgttgttgaccaagaccgcagaaatccaacgaacaaccctacgattgtctcatcagctagtcagctccaacagcaacatcgacgatatcatccacagcaccaatgctcctcctgctgcacctgaccctgcaataaatcatagcaataatatcttcagcaccaaccattctctacaccgacagcctcaacaaagaattgtcgtcgatggaagaagttgtgtctctccccgacctactccaggccgagcaaagggcaatcaacctcaggagggcgataccaagcaaaagaccgtcatccgcttcaaacagcaatcagaaggaagcttctcctgtgaatgatagcaatatgcagtcctatcacatcatcacagaaccaatcaaggatgcagtcactagaacaatgccagctatatctctccagaatcagaatgagtatccatgtttgtgattttcagttcgctacttatcactgtaatcgggagtttgcagcaatcatgtaataaataaatatattcatgttttttgctatgtttatggatgattcatgttgaggatgcaatgtaccgatgttaagcaccttccctttttgtttaaggtagggccttgtattcatgtaataagggagaaatgtgtaacaaaaacaagttctatgaggactctttcggaagatgctgatatgggattatgtgtataattgtttactgtcaaaggagacctagggtctcatttcagaggaaccatgttctaacctcgagttaataaccaacctgctgatggaaaagaaaatcaagcgagtaaccaaagagacatttgtttggactaagagtttcagatgtgtctttttcggatcaaaggcaacgatagttagtatagcttttggcgaaacacttcaaggtttcactgaa

SEQ ID NO: 29194 - DNA, 584 bp, Oryza sativa
ggctgcagtgaatctgatgccttatgctacatttaggaagctgggcagaaatgctgaggatctcatcaagacaaaaatggtgctcaaagattttggtggcaagccatcggaaaccaaaggagttttgaatgtagaactaacagtcagcaacaaaactatccctacaacattctttgtcatcgatgggaagggttcttacagattgttgcttggaagggattggattcgtactaattgttgtattccttcaaccatgcatcaatgcttgattcagtggcaaggcgacaaggttgaaattgtgccaaccgacaagccagtcaatgttgccagtgccgatttaactctttgggagatggatggtcttgattgcttatctgaaaaagtttgggatggagattttttaaaagtgtccgattctgatatacagccaattgaagacagagagcccaagctattattttgagggcgtcgtggagggttcaaacgtctacaccaagaacacagcagatgatctcgatgacaagcaaggacagggtttcatgttggccgatgatttggaagaaaatgacataggtctaggtgat

SEQ ID NO: 29195 - DNA, 678 bp, Oryza sativa
tgatatttggcacgccccttcgtcttcctcgctcatccccaactgctctttgcttccggcgatttagggttttgctctcagggtaaatccaacaaaatagccccttgattctccgctcctccagccattctccgtcttcctcctctgccatgtcccagtcaacagcggaattcgtgccaatcctcaaccaaactgttgcctgggctccgtttacagtaatggcggggaatctggagaaggtggtggcggagggatacctcccctgcaagcgctcatcaactggtgggaggacgtcgaggaagatttccccactccaaacaccaatgagattgtagtcttcctccccttcttccagttcagacttgggctaccgaccggcaatttcttccaaggtctgctacacttccatggcatcaatgtccatcatctcaatcccaactccattcttcagattgccatattcaattacatgtgcgaggggtattatggtatctacccgcattttgccttcttctgctacctgtaccaactgaagccccagcctggcaagaagaatcccactgtggttgggggaagcggaatctagatccggccagataggaagtcacatctcgtgggttgtgtctactagtttcgtctccctgtctcctccggggatgtccaactcgagatcctcga

SEQ ID NO: 29196 - DNA, 13134 bp, Oryza sativa
cccattgacataactatttatatacaatggtttaagatgccgattctctgtcccttccggcttctcgaagactgcttgttctggtgataaaatctacttagccgattcttcttcaacttcagtgacatcggcttgtttgaccccaaattcagcaagcaatgtgaaaaccatgttaaccgatgcagtcacaacacttttccctttagccaatctctttgcttcatcggttgtggcttcatcggctacaggagcttgattcttaacacgccactcctgcttcggcttcgtcttctttagccgatgattgatttcttgctcgaccttctaaaagcactccctgttcctcaacctctgaacccttatcttctgattctttataaaactaccagaaggacaccattgagtcttcctatctttattgtcttcttggtcacaatcttggttcactgggcccattctttgatgaacaggaactcttgcttgccttagccgattgcttctattatacgatcggcttgaacttcctgcaacattagtgcaccaaggacaatcctcaatagacggcagcctcataccttcattccaacaaaatctaaagaattcacatccccaatgaggatcaaaccgccatcatcttcttcataacacccctcctgctgtttgtcatacttcttctgataattattaataatcttggccgaattcacctaaaaacctcttgcacgacctccatcggctgttcggccaactatatgcaccatattgacaggaaaaggattgccatcaaccttcatcggcctcttagaatcatcaaatttgattttgcctccttcaatagttgcctggatctgctgcctgaagatcttgcaatcattggtagaatgagacacaaaattatgccacttgcaataccttctcttgcccaattcttcagccgatgggattgtatgaacagcaagaagttgaatatgtttctctcgaagtagcaaatcaaaaatcttatcagccttggtaatatcaaagtcatatctctcttcttttccagaactcttcacccattggcatggtataacctttttgcttctaacccattcggctgctgctatttcagagtcatcatcatcatccgatccatatatgtaaggacatacataattaacctttttaaagttcttcctggcttctgcaaacctctgttcatgcaaggttaccttctgtgcaagatatgacaaactatcaaagtcttgagacgagaacttctccctgatcagagctatcataccctgaaaagccaaatcggctagctgggcatcagccaaacttaagctgtttattcctcgtctctttgaacctctgaatgtactcatgcataggctcatcatgcctttgcttaatcgctgttaaatcgaacagtttcatctcatgaatcctactgtagaaatagctatgaaaatgcttctccaaatcggcccaactgttgattgatccacatggcaaagaagaaaaccaagtgaaagccgatccagacaaagacaatgcgaacaacctaacccttaaggcatccacagccgatgcttcactacactgagctaagaatcgactaacgtgttcataggttgaaacgctatctttccctgagaattttgaaaactctggaaccttgaatcaactaggcaaaggaactctctcaaaccacttggggtaaggatgccgatacaaatttccatcatcttttggcttaagcccaaactgttctatcatcacgtctgcaatcatatcggcccatggtcgttgctgaggtactccttgcgcttgttgtggcataggctcgaattgattgtattgaggaacaaactgggggtgagccagtccttcttgctgatattgaacttgtggcgatggaggctgatactgataattcaaattgcccgcctggtaattttgaaagtttggctgaatattgcgcaccaaatgtttgggaacaacttgaggtacgaccgtctgatctggttgcacatgatgaaccaaatgttctgggacaacttgattcgcagcgtgctgaccttgctgctgaatcggctgaacaacctgttgcctcaatggcatttgctgaatcgactgcacgacctgctgcctttgtggcgtctgttgaatcggctgcaccacctgctgccttggtggcgtatgctgaatcggttgcaaaacttgctgccttggtggtgtttgttgaatcggctgttgctggattgagtcaacagtaggttgaggtggtaagaacaaagctgcaacctgatcttgcgttagccgattcacattctgtcaactatgctgtggttgctctctcaccaacaaccgaggattaactaattgacctggtgccaatgatggtgcagcaggtgcaggagccgatactggtgccgttggttgagccgattgtgcattgggaggaattggctgaactgctggctgattatcagtgattaacggccgatagttcaggaaaacacctcgtggcaaataaaccggtcctgtagcttgatattcagctatcgagccatcaaccatcgacttcactatgtttgacaaagtgttgactaatatcccagattgattgatcaaagcatgttgcacggcatagtcaacctgatcctagaagttgttaaactttagctgtaccatgttgccatcttgattaagatttccaccttgaaatccctgagaaccatcaccttgaattccatgagaaccaacaccttggaccccttgagagccatcaccttgaaccccttgagaaccatctgcaacacttttatcacttggttgagctgcaccatctggagcttgttgcacttctcgatccttggaagaacctattccgggaacatcagcaattacttttactttatagttctgaacaactgtccccttgcgggtctgcatgaatgaattcaagaattggttccgttcttgctgcatcattgcttcaagatccttctgctgctcaggtatcaacttgtccggagtgatggtcacgatgttcaggtgtcaacctcagataaaccaagcttctggatcttagatttaaaagagccatctttaccagctgaagacggcaatgctggtggattctcatccatgaggaaacgtcgttgtgattctgacttctaatcggtcccgccaggcatgccaaaagcgtgttgatgtgaaaacacgaggcctgggagatcttcttaactctagtgcaagtccaaaactcgccttcgggtatgctagcgtgccagttgatttgatcctgcaatcatcaagaaacaaagacaaagaatccgtggttaaatccataaatgatagccgatcggctaggtgccgatgacgtatcatttatctttgagccggtgtcatatatgcatcgatcggcagtcataaataaataagaaagaaccaaatctacttgatcggctgtagatattaacgatatataatctctatgtcgatatatacttaaatcaagtgattgggatagatcggtcgccatgccgagacattataaatcacttagatcgaaatatatactaagaacaagattatatatgctcatagcatagccgatcacatagatttagcatgtatcggcaaatactgcaataccactctatattaagatattaaagcaaatagaatataccaaacaaagagcctaatatacttaaatacaacaagatcttaatatgaagggcagatttaacatgtcaacaaagcatataagataaatatggttaaatcaggtaagatcagctgaaaccccgatactaccctaatcggcaaccaagaagcaggctagagattgagattctaatcacgactcataagatcaaactcaactgatgtagctataagtatgaaaagaaggacaatatctagacaatcaagccattggaagtttcatagagtggtggatatcatatataatctaaatcaacatcggtatttaacctaatcggctgccttctagtagcagatgttagccgattgtaggttagatagcgatattgccagagattatgtaagatatatgataattcaacgaattacataaacaagattagagtatcataatgatgggatcactaatcccgagaacgcaagccgccataacaagttttacctcttgttgaagatcgaaaccgatgcagctcaacccgaaagcaagaactcgtcgaaacaaaacgaaagtaaaaagggtggcaatgcgccgagattgtattaaacgtgtgttagtttgattacatggggttcgggtctatttatacccgagaaatacaagatatgtccaaatcggacacgactcttatctctaacaaactctaagataccataagtccttgcggcaactttttgcccaaacatatctgtaagaaaatcacataaaatatcctaattaatagatataattgccttctcaggactttatccatgcgtggcaagcatcatgaagcacatcaacctaaaccgacaacgtatgctatgtcatattgtcgggttcggctcaatcggctaaccccgtccgacctgaactctgccaaccttagccgtagccgattcggacttcagctgatcctcactcgatttcttctcgatttcttcttcatctccgatccttggattactaaatttggtcgttaacagtgtcataccaactaggactaaggtttttttctttctttttcattgttcttttgctatttgcatattgcgcaaatcattacagatcgaatgaataaaataaacaacgaaatccatgtccatgaaaactaatttatagctacacttcttcacatctacaataacaaaatcatccatgttcttgaaaactaattcataggctacatttcttcacaactacaacaacaaaatcatccatgttcattacacttcttcacaactaaaacaacaaaatcatcttcttcacaattacatgcattcatcaaagaagaacaatgcattcatcagagaagaacaaacaaaaagagagcgccgaggggagaacgacgccggacgctggccgccgccgccacttcccccgacgaagccgccggcccccaccgccgccacctcccccgatgcaaccgcctgccgccagccgccgcctcccacccggcgccgacggccgctgcccacccgcagccccagtcaaggaagtgtagagggtggagtagaggggtagtggaggaggaggacgaggagaagaagggagaagagataaggagataaggatcgtggggtctgtgtcctgcgcgcgaggagataaggattgtggggtaatagatatttaccccggttggtattaccaaccgggattaaggatcattggtgccctgacaactattgaaccgggactaaaaataatattttgtcccgattggtaacaccaaccgtgactaaagattaataagtacagctaggctttttaaccgggactaagaatgtttttagtgccattttttttcatcaaccgggactattttggtttttgggcaacccatcaaagatggtttctctagtagtgagaggtttcgacttgttcgatatacgctctacaaatcattcccacatgcgcaccactcatccaaactatatgatttgcaaccaatggtgtgaaaacatccgcatatacagataggatacactagtggggtttcgagcagtttgatacacgtagtacaaatcattgtcacatgtgcaaaaccgacacaagagccattttaagcgctttcttatgcacggttagtcatgtaaaatataactattacaacaaatgatatcaaaatattcccatacacataaaattgacattaggaagctttcaagtgattccacacgcggactacaaatcattcccacatcggcatctacttgtgtaaaatataatttatctaacaattggaaccaaaacaaaagtcactagtacaaaaaagtgatttttgatttttgcagatggccaaaagaggttttcgcgtgcggtagaacaacccacatgcactagaggatctatgaaaattgctatcgttgcgtgcgccgggggggggggtcacccgcacgcaaaaatcgctactttcacgtgtgggtgcttatgttgtctacacgcaaaaataaaaatcacgaaaaaaaccctctgccgagcccgtccgctgcccgtcggccgaccgccttccacacacggaggagggactcacccgtcacttgcactccgccgccgcacgaacgctgtctgccgaactccgtcgcgtgcccatccgtgcgccgctgcctgcccaggactgagtttgtggaggaggggaggtgagatagagagagagagagagaggagagaagataagaatgacttgaaaattttaaagtgctaggagggaaaaagagaaggtaactcggtaactcagacttctgggggaatttttaagggggcttcctacgaaaatatattttcccatgcggtcccttaagaggcgtctggaaaaatagtgtaacatcctcaaattttaaactaaaatttgattgcatcatgctggcttttcattaatttagtgtgttctaaaaatttatttgattcttaaatggttcaagtattacttctttagaaccctactaatttccaaaccttagtgaatttgagcaaattctctcaaatttcaaactatagattatttccctagtttatcctaatattgttgagaattttatatacttcaaaccctagtgaacctttccaaattcatagtttaaattcaattttctctagaaaaaatattcaaaagtcctgaaaaacactgttcattgcactcaaggtgctcgatgaaatgcccagcccagctagaacagcccaacacccatccaaccttgcacaaagtttaggtttggaccttggggaccacatcccactcaaaaaccatggtttagttggccttctcctccccttctcgcgcgctgcctagcgtcctatcttgccgcgcgctgcgccgcagcgcgtaggcctcgagatcgcttgtgcgtgcccgactgccttcgcgcgccatcgcccgtccgacgccctcagaccgccgccgccgcaccaatcttgacgacgacaaagccaggacgacctctgccgcaagaaatcacagctcgacgccgtgcgctcccgtccaacgctgccgccgagtccgattttgattctacccgggatgaatcgcgccaattcttgccgcaaggttgaattgaagatagaaggtggtttcccctctcacaattcaaaccaatcacacccgagccggccgttttaaccctcgccgccgccacgcgtcacgcccggattggcgccaacacgtcgccagccatttctacccgcagtcaagccaatccttcacaggtaagtattcaaacatggcctcccgccactcaaattgatcttgcccgccccctcacagcctctgccacctttgccatatccaatccttgagctcatccatggcgatgatggtgtccgagctcatcctttacttttggccctataaataggaccccaatcccttccttgcccatcatcgatcatcaacaaccatagccccgcaactccgaagctctgcttcaccaatccattccatcaaccaccctcgcccgtcagtcgaacaccttgtgcgcgatcacctccacacccctccatccatcctccaccttaaataccccttaaaacacctatatcctaccatgttttagcatactagatcctaatcgaagctctacgtcaagttttacctcgccgcaccaagccgagcactgccgcccccacgctgctctgttcttcgccactgtaaagtttttccggccgcaacccatcgtttcaattgatctcggtgagttctttcgttttaaccatctatgtactccctagattctattttagcaattggtttgctctaccatgccaccctctaggctgccgacgtgagcacggccactgccaatggaggcgctcgtgggcaagtatattccgcaccttgccgaaggtcggcaagctacctaaacccttctaggtaccttgtagatgctctagaacccctccccaagccatgtctaactctctttaccctgatcaccttcatggtttaaccatgccaccgccgccctagccgctagcttagccacataccaaattaacccctccgccgccgctcgctgtcgccggagaaccctagctccctcccctcctcggctgcaacccctttccccctctagcgccgccacaatcccaaaccctagcgccgcctgccgaatttagggatcgactggaggtagaagaagagaagagagagagagactgacaggtgggacccgcacatagtgctatttcacatttaattgattttcaaactttagaagcccatatcttttaaaatatagatccaattccagtgaaacttggaccaatattcttctaaaatcattctctatcttttgagaccccttttgctatttttctattttattgtattttctctatttttcttatttttttagattttatttgaattccttttaaatttgaattttatatgcttaaccctaggtcttgaggattcttctgacacactagataatatcaatcaatctcaagacatcgagcaaggcaagttattatatatccttttgatcatttaagcctatattttacaaattatttatttatagcctttccattcaatattctattttattatgcataatttaatcatagaaacccagataatttagtattgcttatttcgctcacaatctggttaaaatatcttatacttagattgggacagtatgttagaattggatgatttccgtgtggctagaactgtctcgatcgatatagttattaccaggtacttatgtcgaacgaacgggtacgaccgcagcttctagaatggggacagacctagtaattatgttaattagcaatatggcacctctgtacagtggttcttatttttaagtcctcgcgcaggaggcaactatagccgcgaagggcaacttttaaccattaccatgtacaatggtttgtgatactcgagtataaattatatggtatatttgtaaaccctgatcgagatgacgtggtgtcatacgattagttccccttaaatacctcgggaacaccaaaactcctcttgctgctgttaacattacgttcagagcatatgaggatataagttcatggaacaggtgccacaattgttaataacttaatactgggccatgactaaagccgatgattatcagcaagtcgtggactgcgggtaaagcgtacatctgctgcagtagaatatctttgaaactattcgaatagccgtactcatggaattgagtaccgggactcatatggtaccctggttagaaatttaaagtctacatttttataaattcttgctataacacttccagattgtttattactgcttttatacctccctagtcagaatgtatagaaacttccgccgtatattagatctacgtaggattaactatgtaagtaactattattgtaaaacctttagtattgtaaaactttaatgtatgcaatgaagaactagctatattgtatgtatcaatatttactgatctagggattgatacattaatctagtcagatccaagtaattagttctgggacccgacaaatagccttattttcccgtgcggttgcttaagagggctgcctacgaaaattgatttttgcatatgggtctcttaaggagccgtatacgaaaatgatgggtcgatttttgtagacgaggacacttatggtccgtctcaacatattgaagagctcgtctaggaaagtcattttttagtagtgagagatattagaatggtttcgagcgattccattttttaccagtcatgccaacatacgcaaaactgacataagagcagtttcaagtgttttctcatatccacaagaccacaagtcgtgtaaaataggagtataactttaattttgtaaccagtggtttgatattagagggatttcgagcagttcactacgtgcactacataagacagattttattttgggatgaattttgatctttataaatcaacttgtttttactacttactagttgggcatgaggacagttagtaaagggaggctgcttatgagaaaattttccggtcgagatgatgtcgagaagctccaggatctagcttcttctttctcagttcttgcttatgttctttggttgtggttatagttatacagatcctaattaatgtgctaagactgtaatagctttaaacggaagtagagtacattagatttttttttctacacaacaaatggtacaaatgaaccacattagccttttactactacttttaagttaatactccctccatcctaaaataaattcatgtttcacccatcccgcatataccaaaacaaaaccaaggctctatcaaataaaaatgcatttatttcccgactttatttactcccaatgcaattattcaactgctagagaaagcatatttattcccgtttgcaaccccttttgtcccgggtatgcaaccgggatctcgaatccaggattaaagatgagtatctttagttacagttagtaacaccaaccggactaaaaataatttcgccaggtggctggcgctggcactgctatcttaggattctttttttcattgtttttagctgcttgcatattgatttcccgagttcctctctacatccccaaataagttgctccctacatccccaaatcaaagattcacacataacatcacaaagcacagataacataacagattcacgtcaccaattcttaacaaaaaaaacataaaaaaatctttaaaaaaatacatcacaaataataacatcctaaattcacatcacaaattctaaaaaaaaaagaatgaacataaaaaaaatccggctcgatctggcgctgccgcctaccgtgtcccctctagcagaggggagggcactgccatctcccgccacccgcttgagaggggagaggggaagggggaggagtggacgaggagggcgccgccacccggcgccgcccgctcgaaggggaagagtggaggagggcgcccactagagaggggggagggatagggaagggaaggagtggaggagaagataaaaaagatagaaagagaacaagagtagaagacaaagtataggagaagataaggaagagaaagagagagcggcgttcgagagatatatttagccccggttggtgatatcaaccgggattaaatatatgatctttagtcccggttggtgataccaaccgggactaaattttgttggggacctaacatctattgaacctagactcaaaatgatcttcagtcctggttggtaacaccaatcgggactaaagatcaaaatgtacccctgggctttaaaaccaggactatagatattttttactcccggttcttactcgaaccgtgactaatgtgattttagcctgagccagcaaagatcacttctccagtagtatctctactttcacaaacacaaatgcaatgattactaaacatgtacttattttaggataaattggatgagtaaacaatgattattatagaatgaagggagggagtattgtctccatccctaaaatgacctttcttctggtctcatagagacatagtagcattactttcatttttattgtagcaacaaaggttggttcgtaagtagtactagtacatgtcaaatctaatactccctacaccaaaatataagagattttaagtggatgaaaaatttcctagtactaagaatctgaacaacttaaccagattcttaggactaggatatttcttatcaatttaaaatttcttatatcttgggtcggagggagtatagactgttttcggtatggtaagttgggaactaatcattcggaacgaaaaacagagcaagtcattagcataaaattaattaagtattatcttagaaaaataaaaaaatgtattaatatggtttttttaaaatgacttttatgtagaattattttttacaaaaaaaaatacaccatttaacagtttgaaaagtgtgcgcgtgaaaaggagaggtacaagataggaaagggaggaaagaacatagcctagattgctaggccctccgtcccataaaaaattaggcaaattttaccacatgatatcgtgactttgcggttttagttgtaggacacctcgcgaagtgacttatgggggaagacactctcaaaagtgaaatttgctggtgaataccgcacccaccatgcacccatgatgaggaaggcggcgccggagtatgggtcttccatgatgccatcaggaggcgccgtggtgtcaggaagcagggcaaagaagagcagggcatgggggtgcggggttcggaggtcgtaagcggagacggaacctggagacgccacgaggaggcggcggcggcggttgtttatggtggtgtcgtctacagcggcggcgatcgtcttctgttgctgtcgcgtgctgcgccaccaccacgacggcctctactctgttttcacgtggccactgctccgacttcacgtcggccgccgctcctgcatgtgtgtgccaccgtgccgcgcaccgcgttgccggccgctcgcatcacaccacacagccaccgtgagccgcgtcgtcgctgggctcccgagccacattcagcgcgtcaagggagagagatgagggagagagaggaagagataaggaaataagataggaagacaaagagaaaaaaggggcaatttggtcaagccatgtaaaaaagtgggacacttctcgcctggtcagcacgaaaacaataatttaatgggtttggtgtcctctagcaaataaccatattttcagagtgtgtttccccaaaagtgactccgtgcggtgtcttaccgctaaaaccatgaaattcctatatcctgtagcaaaatttgcctaaaaactatggtcaattgctcagttgaccatgtttcgaattctaactaccagtctaatcctactttttctactttgctaatttgaccccgtttttcaaaatcaaacgtaccatttgaccctatttgcactacactcataggg

SEQ ID NO: 29197 - DNA, 12112 bp, Oryza sativa
ctatctctcccacggcatgagcagtggcagcagcgctggcacgcggagagagggtgcagcttcacgtgtggagggagggggtggtggtggcaccggcgcccagtgggaggcggcagcaatggcacgcagaggaaggcagcactggtgctgcgtgcagacggagggaacggcgactccggcgtgcggaggaagggggcggtggcagcacaagcaccgcgtgtggagggtgttgacattataggcatataatgatttaatatatttcataaataaatcatgacattgcagatgtatactagtattaacgcatcattagatctacacatgtaagcttagtaaaacatgaacagataaaatatgcgcaacatactgagcatgtatcgaggttacgtaaaaatcggttgctcagcagggaatactcgcggttgcaggcgtcggcgaaggcgcgcagcacgcgagtgaacaggaagacgagccgtcacgaacgaacagggagcagtcgcgcgaagcgcttcccaaaaaccttattgccgccttctcccggtgcaggacgtcgaaggcataggttccggagacctgctctccctatcgctagtggatgccggcgagcgggatggagtagtctacgagtgatggcgcagtacatagtaggaggcaaaacctagattgatttcaagtgtgttgtgtgaagatggcggctcggtttatatagagaagggtcgcttgatcagggcgctcgcacgatctccactccgcgtaaccgaaccgtataagtcacatgtaacttatccggagtccacgccgttttcacgcacaggatttttcggaacgtttccaaaacaaaacaaatccgaatttccctcagcaaaacaaagctgtaaaaggaggttgcatctgcgcaaggtgaggaacgaattttggcggaccattcgacgcgtacatcatgcacgcgcgccgcctgtcctgccctgccaggcgaggcgaggcgagcgagcacgtgtgttccccctcttctctccaccacacatgcttcaagtggctaggtgggcatcctcccttttaaggaggtccccctctcctagaataaccaagatggtagtaaactccgcatgcatgccatcccatgaggtgggcttttatgattttccaaaaaaataatcttcgagtgggctaaggcccatccattaattccaacaatcacccaccaaatctcgaaatcccactgagatttgccttttccaatttactgtttatataccagcggttcgatggagaccgattaagattgaacagccatctagaactccaagtcttgtgtaagcaagtttcactcagagtcttatctggtactagaccgtctatagactacccctcggatggagcgtataagtcatactccttagtctttagtaagcttcctagaagattcacccaacatcttcatagactgcgaccaacagtcaagctcacaaaggtaagttctttcaagaatgctctgcaggacagcattttcgctaattaaagccaacaaaactcattaaggcatagccaacctgccttacagctcatgagagtacatgcatcttcacttagagagggcatagaattgtactctcctcaagttaactaatggcttgttcttcccaggttctaattcaaaggatctccgatcacatagactgggttaccaccatagtataactcacatgggtctcaaacccatctccttcgatgcattgtctatcacatttcgtgatagtcccttcgtgaagggatttgccagctttctagatgtttggaagtaatccaatgttataactccggagtttctcaatttcctgacagacttcaatcgtcttttcacatgtctagacgatttcatattatccttagaactgttcactttgacaattaccgtttgattgtcacagttcataagaatagccggcaccgatttttcaacaataggtaggtgcattaatagatcacgcacccattctgcctcaacagtagcagtatccagtgccgtcagctctgcttatatggttgacctcatcaaaatggtctgtttgcaagacctccatgaaacagcaccaccacctagtgtgaagacatatccactagtggctttgatctcatccatatcagagatccagttagaatcactatatccctccagtaccgcaggatacccagtatagtgaagccccaattccatagtacctttcagatagcgcattactcactcaagcgcatgccattgatcatctccccggttagaggtaaaccggctcaatttgctcacagcaaaggagatgtcaggcctagttgcactagccaggtacataagcgagccaatgatttgggagtattcaagttgattcgtagcaattctcttattcttgcaaagtatcaagctaggatcataaggtattggagaaggcttactgtcaatgtaaccaatgcgattcaagatcttctgcacataataggactacagaagtgtaattccattctcacctctaattagcttaatgtttaggataacatcagctactcccaaatccttcatatcgaaattttaagacaagaatgatttaaccttatttatcacctcaatgtttgtcccaaatatcagtatgttatcaacatacaagcaaattaaagaataactccctcacccccaccatagcgatagtacacacatttatctacctcattgattgcaaagcctgcagatgtcaatgttttatcaaatttctcatgccattgcttaggagcttgtttctgaccagacaaagacttcaacaatttacacaccttgccttcttgaccatcaactacaaactcatcgggctgatccatatatatctcctcatccagctctccattaagaaaagatctcttaacgtccatttaatgaacgagaagaccatgtgagattgctagggaaagtagcacacgaattgtagtctatctagcaataggtgagtaagtgtcaaagaaatcttcaccttctttctgagtatagcacttagcaacaagccgagccttgtacttttcaatagtaccgtcaggcctaagcttcttcttgaacacccacttgcacccaacaggtttacacccatagggtcgctctatcacctcccaagtcccgttagtgataatggaatccatttcgctacggacagcctccttccagtagtctgcatctggagatgcatatgcttttgaaattgacttagaagtgtcatccacgaggtacacaatgaaatcatcaccaaaagacttagccgtcctttgtctattactccttcgaggaccttcactgtcattctcctcagtgacatgttcatgtgtatgttcagtttgttctggtgatgtgattgaactgggaattatttcagagggttggctagaactactatgtgtatccttcattaggaaaaagttcacaaagaaggtagcatcacgagactccataattgtaccaacatgcatgtcaggtacctcagatttaactattaaaaatctataggcaatgctgtgatgagcatatcccaaaaagacacagtccacagtcttaggtccaagtttgcgcttcttcgttattggtacattgactttcgccaagcacccccatgtgcgcaaataagaaagtgatggttttctcccaatccatatctcatatggtgttttgtccttatttctattaggaactctatttaacacatgattcgaggtcaacaatgcctccccctaccatgccttaggtagtcccgcggtgtccaacatggtattcaacaagtcagtcagtgtgcggttcttcctttcggcaatcccattagattcgggagaataaggaggcgtcctctcatgtatgatgccatgttcctcacagaataagtcaaactcgtttgagaaaaactctccaccacgatcagacctaagtctttttatctttctgtcaagttgattttcaacttgtcttataaactttaaaatagtctagagcctcgtctttcattatcaacaaatacacatagcaaaatctagtagcatcatcaatcaacgtcattaaatatcgttttccacccttcatcaacaccccattcatttcacaaagatatgaatgtaggagttctagaggtaccaagtttctctcctcagcagccttgtgagacttgcgaggttgctttgattgcacacaactatggcacttagaacctttaaaaatggaaaacttacgaattaaacacatgctggaaaactgagacttcaagccaaaattaatatgacataaacgtgagtgccaaacattagcctcatcatctacactgccacaaatatggttcatgacttactgcagaaaatcagaaagggaaaagcggaacaggcctccgcactcataacatttaccaataaaatatccatgtttagacaggactattttattagactcaaaaaccaacttaaatccatctctagttagacgggagccactaacaagattcctgtcgatagtagggatatgctgcacgttctttagctgcacgatctttcctgaagtaaatttcagatctaccgtgccaacaccatgaacagaagcatgtgacccattccctattaggacggtggaaccccgtgcgacctgataagaagaaaacaatgagatgtcagcacaaacatgtacattggcccctatatcaatccaccaattagtagactgattaactgaaaaaccagaaggtaaattatcatacccgcttccgtctctagtgttgccaatggtcacattagcagacttagaagtctgccctgcaagtgccttcatccccttgcgttgtggacacttcctggccagatgaccaggtaggccacacacaaagcaagtcctctcatcctgattaggattgttgttcttcttcttcttcaagttggtggtctgctgagctttgtatttccccttgctcttgttctgggccttgtgcacaacattggcgctggattgcccaccatcgcccttagacgcagagtctttttcccgagttttctcctcaacatcaagagacgctatcaacccctcaacggagtattcctgtgtcttgtggttgagtgcagtaccaaaacctctccaagatggaggaagtttcgcaataatgcacccggccacaaattacatgggcctgctcgagtttcttagccatggtctgtattacatgggcctgctcaactacagaacggttatcagccatcttgtagtcatgaaacagctccatgatgtacagattattgctagcatcagtagcaccgaatttagcaatcagtgcatcccacaactccttagcgtcggtcatatgtatatacacctcgaccagacgatcgccaagaacgctaagaatgcatcccacgaagagagtagtggcctcgtcgaattctttctgctggtcagcattaagaacttccataggcttgccagtactcacccagaagcatttcatagctgtcagccacagagtgatcctgatctgccatctcttaaaatgcacaccggtgaatttatccggcctcagtgcattggcaaaccagccattgtaaaatcacagtgcctataataaggtttttggattgttgagattatagacatataatgatttaatatattccataaataaatcatgacattgcagatgtatactagcattaacgcatcattaaatctatacatgtaaactaagcagtaaaacatgaacaaatgaaatatgcgcaacatactgagcatgtaccgaggttgcgtaaagatcggttgctcagcagagattactcgcagttgctggcgtcggcgaaggcgcgcagcacgtgagcgaataggaagacgagccgttacggacgaacagagagcagtcgcgtgaagcgcttccaaaaaccttatcgccgccttctcccggtgcaggacgtcgaaggcagaggttccagagacctgctctcctgatcgccggtgcacgccggcgagcgggatggagtagtctacgagcgacgacgcagtacagagtacgaggcaaaccctagattgatttcgtgtgtgttgcgtgaagacggcggctcggtttatagagagaatggtcgcttgatcggggcgcccgcatgatctccactccacgtaacctaaatggataagtcgcgtgtaacttatccggactccatgtcgttttcacgcaccggatttttcggaacgtttccaaaacaaaacaaatccgaatttcccgcagcaaaacaaaactaaaaaaggaggctgcatctgcgcaaggtgaggaatcaatttcagcggaccattcgacgcgtacatcgtgcacaccggatttttggaacatttccaaaacaaaacaaatccgaatttcccacagcaaaacaaaactaaaaaatgaggctgcatctgcgaaggtgaggaactaattttagcggaccattcgacgcgtacatcatgcacgcgcggcacctgtcttgtcctgctaggcaaggcgaggcgagcgcgtgtgttccccctcttctctccaccacacatgcttcgagtggctaggaggccatccccttttaaggaggtacccctctctagaataagtaagatggtactaaactctccatgcataccatcccataaggtggtcttttgtgattttttaaagaattaatctgagtgggctaaggacccttcattaattccaacagaggaagggaacgacggcgccgacgagcggaggaagggcacagcagcggcactggtgcacagagagaggggtggcggtggcggcagtctgcggagggagcggtggcagaaccggtgcacgacggcagcggcgactgtcgcgcggcgtcagtggccgctgctgcggtaggaggccgtgaatttgtcgttggatattaatctctgttggatttgactaagatttgtgtttctgcttcatcgtgtgccatttgggatccataaaataggacaatatgccgtaaaaaaactgtaaaaatttatgtcaaattttttttacttcattttgttaaaaatctatcaaattagagtcaaatttgttaaattgattcaaatgtttagattgatttgaattttaaaaattcaagccaattttgtcaaaacatccaaatatatacacattttgatataacatgatcaagaagtaagggcaaaagagtattcgttcattagttaaccctgttaactcactttaacggaatagggtcaagcttcatcttcgattggtaattagacttccaaacagggttaaatatgcaattaccactaaaactaagctaatatcggatgtggcacattctattaccattaatttagatggatatatttttttctaggatatatcacatccgatactttgaatttttttagagcgggtatacgtcccactaacacgctttttaaactgctaaacattatgtttcgtgctaaaacattcaatataaaagttgctctaaaatattaaaattaatctatttttaagtttgtagtaattaaaactctattaatgatatattaatagtatcttgatttacgtaaaagactttatcttcgtattcatttaacagagaaaataacaccacctatatctcgcgatcgagtattgataagagaaattcatgcgtcactaggcctgccctacagtagagagccagtactgtccactgacgacaggactgatccacgcactcaccaaaccgaaaatcgcagcaagcatgatgaaatagtctaagtccattattatgcccatgagagttacatgatgaaaaaaacatactccctccataaaaaaagccaaaccccaaaccctaaattttcgtgtccaacatttgactgttcgtcctatatgaaatattttttataattggtattttcactgttgttagatgataaaacataattaatactttatgcgtgacttgtctttttaatttttttcataactttttttagattttttttagagggagggagtacatggatttgggagccagtaataggcactggtggagtgtcattgattcatcaaaaaacctgtggctggctgactggctggtagtactgaggatatgtcagtgatgatctttaaagtttaaactgacactgagaaaaaggcaggatgcatgcatgacctttttgagggataggtgaaagtgatcagacagaagaaacgcattaagtatttgaaaagcctgagcaaaccacagtacggcgccattgaggccatcattattgtcattgtgggaactactcctaggtaaagaaatggctgtctagtctaatggtaaaatcattccataatactccatgctcctcatatctcatgggtgtaatgtatgtatgtgttgcgaacagatattatataaagtgtcgtatagtatgtttgggcactaataaaaaactaatttacagaatccgtcagtaaaccgcgagacgaatttgttaagcctaattaatctgtcattagcaaatatttaccgcagcaccacattatcaaattatggagtaattaggtttaaaagattcgtctcgtaaattagtcgcaatctgtgtaattagttattttttttagctcatatttaatattttatgcaggtgttcaaacattcgatgttataggatgtaaaatttttaggtgggatgagaacatgccctcacttgaaacttttgcttgaaccttatgcatattcatggtgaatactccctgctcctcttttgtgccatcatttggccatcctacacagtcaaatcacaatcaacaaagatgtgtgcatgatgcatttctacacagtcaaaagtgcaggtttgggagtttggaatttggattttggcaaattcagtgggcccacaaggacataattttgacgattccaaaatttagggctaatttacaaaacactcccacacaaacgttgccaaaccaaaattttggtattgctaacaagctgtttttataggtcaattttgacataatccaaactaatatttttgatagtgttaaaatttgtccatccctttgcgctaccgaaaattctagtagcgtattaaaccaaaccagccttatacccagagagattcaaatatgcaattcaattttacgaataattaaattaatctctaatttttatattagtaagacattattggctagaattaggaattaatccctccattattaaatgtgcgatgcgagtgtactaatttatattatgcataaatattaacatatttggtactgtgaaaaccacatcaatagagtatttatggctagtaatctggttttcctttatggtgcggtagtgggctccataaaaatatctccgagaagacaacacctagtggaaaaagtaagtgtcagtgttaattaagggcaataattaaattgaggctacgcgtcaagcctaggtctatacgagatatgagaatctatagctgtgtttagttggtgtgccaaaatggacgtatatttgaaatattaaacgtagactaataataaaataaattagattctgccttgtaaactgtgagacaaatttattaaacataattaatccatcattaacaaatgtttattgtagtatcacattgtcaaatcatggtgtaattaggcttaaaagattcgtcttgtaatttacatacaaactgtacaattgatttttttcgtgtacatttaatgctgtatgtatgtgtataaacatttgatatgacggagtttttagaagtttaaagttaactaaacactgcctatgtatatctaccgttcctgtataattgtccccattagttgtgattttaggcagccaaatcaccttatttatttgaggcattagattgatgtcaaacttcaatagaaaccgttagatttatattatgtctacctgctgctgacttaattggcttcctcctgccactgctcgagaaacccacggtagttcggtttgtaaactctttagtcctgggttataaaccgagacctgaatccgagattaaataacaccaaccgggacaaaaatgatgatagtgccaagtggatgtagtcttgtgtcaccatgaaagcacttttttttactagaaactgccaataacaattcgcgtggctaatctcaattattctatcataaaactctcctgcaattcttatcctatcttactataaatataaagttatcccctactaactccttaagcttaatatgcaaagataccacatcatcatccactaacaagatgccacatcatcatccactaattaacaagatgacacatcatcatccactaacaattatcacatttaaacatcatgcaaacatactatatttttatagtttttataatttaagagcttttcaaatataaacttgttaaattatcatccaacataattcacacaatattttaatgtatatcctatatacttatatagttcatcctcacttactgcttaaatgattaatctatggtccaaattatctttctcctttttttctataattaagtcatatcacattaattgtttttagtctttagatgattaatctacagtccaaactatctccctaattttcttcttccataaagtcataccaccttactttttacgtttgaatcaccatttacatactatttaaatttaaattatcatagaccatattaatttacttaatctgatgttatctagctatcttacacgttattttttttgttatcatactaaattctcgcagcaatgcgcggggtttcacctagttatataattagaacggtcctcacacaccattgaaatcctctatcttatataagagctggcatatcgcctttgtcccttcccgatcgatgctaatcacaagtcggccttcggttcatttcatggaacacattaatttttttcaattatccgtagtctataggatactgtttctttttttttagggcagtactacatagtttcttagtcagaaaaagtatgaattacccctcgaactatcgtggtcgtccgaattaccccccaaaccacaaaaccgggcattcttcatcctcaactacacaaactggacaaattacccccctcgacccaatccgcggtggttttagtccacgtgacgtacgcgtggcagcccagtcagtcctctatttataaaaaaaaaagagtaaattgcatcttagggctactatttcttacgtgtgttgtaacttggactagtgtaaaataaaacttttcactttggaacaagtatgtttacagaaggttttaatttggactatcttcttgttcctccagctccctttcttcctctcttttctctgtacagctcacggtctctttctcgatcaggcgtagtgcatgagaagtcaagaaggaaaacccttcacagggcagccacccaccgaaattgagctcgagctcaaatgtaggcggcactgggaaggcggagcttgagcactgcaaaacttgctgaagtgcgagcggcacatgtggaaatttagcgcaggcgcgcaacacgtatagcactagcggaggtcgagcatgagctttagcgtggctgtctgctactccctccgtttcataatataatactttctaccactgcccacattcatatggatgttaatgaatttagacacgcatatatatctagattcattaacatccatttgaatgtgcgtaatgctacgaagtcttatattatgaaatggaggaagtacttggcttagttcttatagtcagttcagaaagtagcagcaactgtatgtcattgccggccagcttcttcatatgctacttgctaccagtaggaatacttgttgtgcaccctctgctttccttgaaattaagcaacaagcactagctagttgatgattgaaaatgcaaactaccctttgaattctttggaagactttacagattgaaggagagagaggaggaagagagttggaggaggaagaagggagtccaaattgaaacatcatgtaaagatatctggcccaaagtaaaaagtttggctttagtctagtccacattgtaacaatggtaatcaaaggtggctcaaggtgcaattcacataaaaaaaattt

SEQ ID NO: 29198 - DNA, 1186 bp, Oryza sativa
cctccccggcgttccgccccgcccacccgccgccgcgtcctccttggcactccgcccccgcccgcacgcagccgctgcatcctccccggcgctccgccaccacccgcacgccgctgccgcgtcctcccccgcacgccgccgccgacccgtttgagagagagaggaagagtgagagagtgaagagagaggaagagatgatgaggagatgataggtgggtcctatttttttaaaaaaatggagtgctgactggattgccacgcgtacgccacgtggaccaaatccatagcggattgggtccaggggggtaatttgtccggtttgcatagttgagggtgaagaagaatacccggttttgtggttcgggggggggtaattcagacgaccgcgatagtttgcgggggtaattcgtacgttttcctttctagtcccatattctatacccaggtagcaaatttcaaatgcttccttggtccaattttctcaaattttcttactctgggccgacatatgtatatagaggaacaaattttactaatagcccactgaatcatcatgccaaactagacatagaatcattctatgggatagcaaacataatttttactatataattgtcttcctacggttccaatataataaatgctatgttggtaaaattaatttcaggttacatattacctactagctaataatagttttgcaatatctgtttgcttttataaacaaggctttcgcaactcattccactatacctaatttttgtaaggttattgttagacggatatctattttctatttgtacaaggggttttctacatatatacctatatatatttgggtctagtgcttcttagatgaatacaagtgctaattcttaagccagaactaggttagacttctcatctccctagaaacgatttttttcctctctccaataattacctgcttgaactttgtgtggaacactcctgcctcttcatctttgaagccatgaggttcctgttgatttagcaaaacatagttctcacccgtcttcgctccgagtatgagtcgatttgtgcacagttgcttgctcggcaccccccgtgttactctcatggaagctctcaaggagatttgttctgaggagattcatcttcgagaagcgggtattctagcacatccttcttcagtattagcttttcg

SEQ ID NO: 29199 - DNA, 771 bp, Oryza sativa
ggcgaattcgagctcggtacccggcggtgaagtcgtagacgcccaacagcagcggcataataggccagccgggtaggcggaggcaccactcggcggcgacggaggcaggccggtggtgaagacgtagacgcccaacagcagcggcataataggccagccgtgtaggcggaggcaccagtcggcggcgacggaggcaggccggcggtgaagacgtagacgcccaacagcagcggcataataggccagccgtgtaggcggaggcaccactcggcggcgacggaggcaggccggcggtgaagtcgtagacgcccaacagcggcggcataataggccagccgtgtaggcggaggcaccagtcggcggcgacggaggcaggccggtggtgaagacgtagacgcccaacagcagcggcataataggccagccgtgtaggcggaggcaccactcggcggcgacggaggcaggccggcggtgaagtcgtagacgcccaacagcggcggcataataggccagccgtgtaggcggaggcaccactcggcggcgacggaggcaggccggcggtgaagttgtagacgcccaacagcggcggcataataggccagccgtgtaggcggaggcaccactcggtggcgacggaagcaggccggcggtgtaaatgacgatgcccatcaacggtggtgtgaccaaccgaccgtgtaggcggggacaccagtcggcgttgatggaggcaggccggcggtgtaaatgacaatgcccatcaacggtggtgtg

SEQ ID NO: 29200 - DNA, 1552 bp, Oryza sativa
gccgctccggggctgggcgccgtactttctgccaaatgggtcgggcacccggccgcacagcgaggcggtgctcgatcacctccctaggaccccgggcatatctgacggcttccatgcgaagacgtcggagttcacccgcaggaaggagacgagcgtgcttttctatttggcgtccaaggtaccgtcaatcttggcggttttggacggatcatcgccaagggaaatatccttgacggggacctcgtcggccgaagcgaggcgcttcttcgaggcgcgggacgctgaggactccgagggctgcggctcggtggctgccaccaagttgtcggcgcgctgctccgcgcaggccagggcgaccttcacatcgtcaaagacagtgatggggtcactggggcccggcatcttcatctggaggtaggcggccatgaacttcaccaacgagggcctgcccaggaccgcattgtatggcagattgaggtccgccacgtcgaagtcgatccgctcggtgcggaagttggtggagtcaccaaaggtcaacgggagctcaacgtgacccagaggccacctatgtcccggggtcacgccaatgattggcaatgacggctggagcttcattcccggagccttgagagcgtcaaaggtagctggggagatgatgctgaggctggctccctcgtcgaccaggacacgcttcatcttgacgttgtggatggtgggggagaccacgagggccaacttccctccccgagtgagcactgtcggatggtcgctctggtcgaaggtgagtttcacctccgaccagcgcgccttccgtgccgcctcgtgagttgggacggcggccagaagctcacgcctcatggtcttgaagccgcggcgggaggtgtgagcgcaagcccccccgtcgagagtggcgacggttccctgatgtatctggaattccagatccttgctgtcatcgccgtcatcagcgggggccttcttcttggcctcccctcgccggtcattggcgggggtcgcgggggctttgccctcccatcgactctgccgcttctcctcatcggccttccggaaccgctcggccaagttcttgaccgagcggcagtcggcgaggctgtgccgataggtgttgtgcaccgagcaccacttgtctgccgaccgaccctcgccggagggagcagtggagctcggcttgtcgccggtggctttttccttgcgcgggagccgtgagggcccatcggccgcaaggacgtggccctcgtcatcggagcgggccggcttcctttttcccctcctatctcgtcgcttaggacgtggccctcgtcatcggtgctgggcgagtttcaggcccatgcctcctccttccgcgccaccttgtctgccagctcgaagagctcggcagtggtcatgggctccttggaggcaatcttctctagcatgcggttgtgccgcacgccattccgaaatgcataaacgaccgcgtgggccggaatgcatggaatagtgttgcggacctggcagaagcgttgtatgtacgagcggagggactcatcgt

SEQ ID NO: 29201 - DNA, 638 bp, Oryza sativa
tcgcttcaatagtgccgcgtagtaatatgcgaccaccaccaaaaaatagcaagaaatttatttgagattaaaaatcaatatgataaataatgataaaatccagattgagtttccccccgactgatttggatcaagtcagagaaaaggagcttgaagaagtggtcgacggaaagaaagtgaaaactccaaaagcgaaagcgaagtcggcgactcatgaaattgattccatcgtgctcgttgataggaaactcgacgcaccccctacctggcgcgccaactgtcgaaacatgaattcggcaataataaaacggggtagcgcacgagacctaaaagtggatggatgtggagacaaaggatttagacaggttcaggccctctcaatgagaggtaataccctactcctgtttggggaattgaatccgcccttttagaccaaggagaatttaacaaaaattctccggaccacattcgaatttttctggcatgtattttagtgtttgtcaatttcttttcgaattttaattaattctattattccttttagaaaatgatttttattttgggatgaatttatcaggacgtgacaaatccaccccccttacaggaatctagtccctgagattcgaggagcctagcaa

SEQ ID NO: 29202 - DNA, 2639 bp, Oryza sativa
ctgtcacctttagtttgtcaaagtttattagggtctatgactggagatatatccttaaatcaatgtcatggttgtaaacttggtaaacagatacaacttccctatcatcctagtgagtttgtgtacaagcatccttttgttcttggttattctgatgtttggggccctgctccctttacttcaatacggggtcatcactactatatctgtcggagatatgggcctgggggtatgcaaagtgaggggatgttaccttcccatccagccacgtgactctatagcctggccctccccccgcgcctcgcgagtcgcagaagcagccggggggcctcggggtgccacgtcacgcccttcgggccctcgcgctgcctcgccccaaggccctcgcccaactgtcatgtggcggggggagcgtgcgggaaggagacctaggctgaaccgccatcaatgcgcgcggcgccccaactgtccctcaccgcgtttaatgctgtaagggcagacgtgtggtgccgtccgactaacccacgtcaatcgagtgtgaccagactgtgacaggcctgtcaccggtcacgtccgattggatgggtggtcgtgcccccacgttcgcctctgtcttcagcggagtggaggcaggtatgtcccgtcccatcggagcattatccggagttccctccacgtgaggaggaccgccacaagtcttcactcatttaagaaggaatgacagggttgtcccctgtgtcaggcggggggcggcgctaggtcccactcaaggacggactgctcttagcttccgggcgaaggcacggatcatggtccagtcaaggtaaagtgggtccccctcccgtcaaagagtaagtggaagcggcgcatgtggtatccccttgaattacaaaaggaggaccttgcccaccgagaaaagggacgacactcagtaggcctgagctctagaaggagaagatcaagagcgctctccggagttcaggaacctttgtaacactcaaccataaatcccacacacaggagtagggtattacgctccatagcgtcctgaacctatataatcttgtcgcccatacgcgatctagaaaccctcagggaggatacacgatctcgagaggcaaaccctttcccccggccgaactcacaaaaggctagagaggatcacttctcgacagctggcgcaccaggtggcgcttcaaagagaagtcgttttcttccgccccaagtattcctccggcctcgacgatcatggtcgaggtcttgaaggaagaagtggtggtgcacacccccactcccttcgggagtgaggatgctagcgggagccgcggcccccatcaccgtcgccgcaactctcggactccgccccgccgcgacccctcgcggagggaggatcccacccggtcgggtggctcagccctctccccgcctccgggcagggggaagccatggcgcatcggagcgcgacaccgcctgacatacggcgacagcggctcgccccgaggcgcgcttcggacagcgggagcccttctacggcatcctcccgtgaactcggagccggagacccccgtcaggcgatggttggacgacgtcgccaacctggtcaccactacccagcggtagctggctgtgggtggccgttccaccgccactggtatgtcacgcacccccccaccatttcctcatcggtgaaaaggagcgcccgtcggtcagccatgacctcgaggcggtccacggccccaacatcgtcgggggcctcgggaaatcagaggcatcacgatggcctctacggggagcaggacgctcggatcaacatcgagcgacgccaggacgagcgccgtgctgcccgcatgggagaaggcgcatcctcctccagagtgtagtgttcctccttgcgaggcggcccgccccccacgttcacccctggatggactggttgtaggggcttcgttgtgagtctccagaacgtccggtggcccccgaagtttcgtcccaacctcacggagaagtatgatggcagcattaatccctccgagttcctccagatctacaccacgatcatcacggcagtgggggggcgatgaacgggtcatggcgaattacttccccatggccttcaacggtcaggcgcgcggctggctgatgccccagccccccgactccatccactcctgggtggacctgtgccagcagttttcatcacgaacttccagggcacgtacccccgcctaggagaggaggcagagctgcatactgtgcaatggaaggacgatgagtccctccgctcgtacatacaacgcttctgccaggtccgcaacactattccatgcattccggcccacgcggtcgtttatgcatttcggaatggcgtgcggcacaaccgcatgctagagaagattgcctccaaggagcccatgaccactgccgagctcttcgagctggcagacaaggtggcgcggaaggaggaggcatgggcctgaaactcgcccagcaccgatgacgagggccacgtcctaagcgacgagataggaggggaaaaaggaagccggcccgctccgatgacgagggccacgtccttgcggccgatgggccctcacggctcccgcgcaaggaaaaagccaccggcgacaagccgagctcca

SEQ ID NO: 29203 - DNA, 1467 bp, Oryza sativa
taggtggcctctgggtcacgttgagctcccgttgacctttggtgactccaccaacttccgcaccgagcggatcgacttcgacgtggcggacctcaatctgccatacaatgcggtcctgggcaggccctcgttggtgaagttcatggccgcctacctccagatgaagatgccgggccccagtgaccccatcactgtctttgacgatgtgaaggtcgccctggcctgcgcggagcagcgcgccgacaacttggtggcagccaccgagccgcagccctcggagtcctcagcgtcccgcgcctcgaagaagcgcctcgcttcggccgacgaggtccccgtcaaggatatttcccttggcgatgatccgtccaaaaccgccaagattgacggtaccttggacgccaaatagaaaagcacgctcgtctccttcctgcgggtgaactccgacgtcttcgcatggaagccgtcagatatgcccggggtcctagggaggtgatcgagcaccgcctcgctgtgcggccgggtgcgcgacccatttggcagaaagtacggcgccaagccccggagcggcaagccttcatccgagaggaggtgacgcagctcctggaggccggcttcatccgagaagtcatccacccagagtggttggcaaacccggtggtcgtcccgaaggccaacggcaagctccgaatgtgcatcgactacacggacctcaacaaggcatgcccaaaggatccctgccctttaccacgcatagattagatagtcgactccactgcggggtgcgaccttttgtctttcttagatgcctactctgggtatcaccagatccgcatgaggaaaaaactgctttcattactcctgtaggcaccttttgttatacaactatgccttttggactcaagaatgtaggtcctacttttcagcgcatgactcgcattactttgagtaatcaaatagggcgcaatgtagaagcgtatgtcgatgacctggtggtaaagacgcaccaccaggacacattgttgcagtacttggccgagactttcgacagtcttaggtccacgcgcatgaaactgaaccccgaaaagtgtgtgttcggtgtgccggtgggcaaactcctcggttttctggtctcctcccaaggcatagaagctaatcccgagaaaatacgcgcgatagagagatgcgcccccccagcaagcttagggatgtgcagtgcgtcacgggatgcatggccgctctaagtcgattcatatcgaggctgggagagagggcgctgcccctaatcaagctcctcaaacgccctgggccgtttgtatggacggaggaagcggagcaagctctcaattagctgaaagcttacctcacttcccccccatcctggtagccctggggccagaggaaccgttgctgctctacttggctgcgacaccccacgcggtgagtgccgcccttgtagttgagcgcgac

SEQ ID NO: 29204 - DNA, 1084 bp, Oryza sativa
agaaaatacgcgcgatagagaggatgcgcccccccagcaagcttagggatgtgcagtgcgtcacgggatgcatggccgctctaagtcgattcatatcgaggctgggagagagggcgctgcccctaatcaagctcctcaaacgccctgggccgtttgtatggacggaggaagcggagcaagctctcaattagctgaaagcttacctcacttcccccccatcctggtagccctggggccagaggaaccgttgctgctctacttggctgcgacaccccacgcggtgagtgccgcccttgtagttgagcgcgacgaaggcaacacgcgtcgcgagcccggccatcagaagggaccaggggccccctttactggcgatggcccctcgtcccccgacgacattccgagacgcgaaaacccgatacccacaggcccagtagatgctttacgcagtcttaatagcctcaaggaaattgcgccactacttccaagcgcatcgggttttcgtcgtgacgtcttaccctctcggcctaatcttgcacaaccaagagggtactggtcgggtcgtaaagtgggccatcgagctcgcttaggttgacctgcacttcgaaccacagcatgcgatcaaaagctaggttatggctgacttcatcgcggagtggacctcggcggacgaccctgttccgtccaaagttccctccctccttggagatggaggagacccaaacgccgacatttgcgcggtgcactaggttatgcactttgacggctccctcaaccttcaaggtgcaggggccggagtcacgctgacttcgccgagcggggatgtcctcaagtacgtcgttcggctcgatttccgagccacgaacaatatggtggaatatgaaggactcctagtgggattaagggcggtggccagagtgggcatccgccgcctcatagtcctaggcgattcccagctggtcgtaaatcaagtctccaaggagtaccagtgcaccgacccgcaaatggacgcttacgtccgcgaagtgcgacgcatggaacgccactttgacggactcgagctccggcacataccccgacgcgacaa

SEQ ID NO: 29205 - DNA, 5955 bp, Oryza sativa
gaccttcgaggaaagactcgcacagccatcggcgcgggttggaccacccaagggacccccgcaccacggtttccgccccgacccctgacgacccacgggtctcggggcttgagggggtcgaccctgacccccctcgtcaggtcgtttggatgactgacattcgggcgtatcctcttcttgaggatggcacagaagatgagaagctcgcgcatatctctaagcggtatgtgctcgtagaagagaccctctaccggtgtgccgccaatgggatactcttgaagtgtatttctcgagagcaaggcatagagctcattgccgatgctcatcagggtgagtgcagggcccattcggcctcacgcacattggtttgtaaagccttccgacaaggtttttactggccgactgcattgcaagatgcccaagaatgggaccggcgatgcaaggcatgccaattccatgccaagcaaacccaccagccggcccaagccttgcaggtcatcccgctctcttggcctttcgcggtctgggggctggacatcctaggacccttcaaagcggcccgaggcgggtatcagcacctgtacgtcgctattgacaagtttaccaagtggcccgaggcttacccggtcgtcaagatagatgagcattccgccctcaagttcatcaggggcatcatgtcccggttcgaagtgcccaaccgcttcattatagataacaacacccagttcaccagtgagctgtttggcgactattcctgtcccggcgcatggagatgcctacccagcgcaccgcgcgctccagccgtttgatggcatcggagagttggccaggcccaaactcgtcgcgaggtggcggagggtcacaatctccccagcttggtcctacaccaggcgcccaggtcggcgagagtgtcttgagccgcggcaagctggctgaccaattccgccccgccgggctgcccgcctgccgccaactccttctcccgggcctccagctcggaagtcctcaccgccatcgccgcgcgctcaacacgggcgctctccagatgctgggcctcgtgcccagcaatggcctcctcacgcttggttagttgctcgcccagtcggcacgccgccacctcctcatgcctcggcctcgcgttcggcaagcgcggcctcccgttcctggcatgcgtcctctcgaagccgcagctcctccgcacggcgagccaccaaagcctctgcggtgagggtggtcaggttgcgcttggctgcggcctcctcacggaggcgaagggaggattccgcctcggccaccactctctcgtgggcggccaaggtggtctcgccatggtctagcatgcgcgctcgctcctccagcgcccgggcatgctcctctagcgcccgagcatgctcctccagctcccgggctcgctgcgcctgttcccggccgcgctcatcctgttcgcgctggttacggtcgaggagctcgatcagtcgacggatcgtggcctcgaactcctgcatggagcgggcatgctcgtctaaggccttgcactcggcctcgagcgccgccatccgagcccgcagcgaggcgtcgacctccgatgcccgctgctcttgggcggcagccgcgtcgaggtctccacatgcgtcttcgaccctcttcgccagatcctcggcgtgggcctcgtactgcaaggggatctcgcccagcgcctcttgcaggacgcttgaagcgatgatcgccgcctgccgctcctcctccgtctcccgtatgaccgagtgcagcatctgctcgcgcgactggatctctgccagttgggcttggcgcattttgcgccccacctccaccatgtcgtccatggcgtggcgcccctcgtcaacccgcgcgcagtccgccgcgagctgcgcccactccgcctccagggccgcccgctcgtccgtcagggcttgaacttgggcgttgacccctcccggacggtggaataggcggcggcgagcacctgcaggagtggctccatacccacgggagttggagaagaaaaagtcgcggtccgcccccgggacggcggagtgctgctggacccccgcgagactgggagctgttgtcacgtcctgataaaatcatcccaaaataaaaatcattttctaaaaggaataatagaattaattaaaattcgaaaagaaattgacaaacactaaaatacatgccagaaaaattcgaatgtggtccggagaatttttgttaaattctccttggtctaaaaggagccctcaaattttacttgaattttcagagcaccaaaaatatttattaaacaacaacaacaattatcaaagtttattaaaaagaaaaacctaaaaataaccctctccttccctttgggccaagtctggcccaaggtttctcccctctccctctcggcccgcggccgaagtccctctctcctccctctctttctctccctctccttatcttgggcctcctcttccccttccggcccactgcctcctctccacctcctcctgggctgcctctcccctccctccttcccgcccggcccaagccacgccacccagccacctggcccacgccgagccgctccccgcacgcgctgcgcgcgtgccgtcgtcttcctcctcccgcacggcctgctctctctctccccggaaacctagcgccaaacctccccaaaatccacgtgattcaaaccgggaattccaaaattgattagggggaattaatcccctttccctcctctctctttcccccttaattcccccttgaatggcgcccccaatcgccgggaacggacgtgccaactctggccaccttccatggccgccggccggcttttccgccaccgttccccgctcctcccgtggccggctccctccccacgcctataaaatggaatccccatccttcgttttatcgttttagccccttcccgagcttccccgtggtcgtatcacctctccccgccttctccttctctctctccggcgccggccagcctccagccgcctctccctcctcgcccgagcgccatccggtcgcgccgtcgctgccctcggcctcacagccgcctcctctcccccggtcagccctccgtttcgcggggaaatcaccggagacgtgtcctcgccggcaaaacagtggcgttgccgccactgtactgcctccagctgcccctgccgcgccactcaggtgcgggccggctgcgccgtctcctccctcggcgtcgccgcgtcgacctccaccccggcctgccctcggtttcaccggaacgccatcgcccgcgtcggtctcgccctccgcctcgccggagttcctccggcagccccgtccgccgtgccagtgcgccggccgatgtcgccgtctccacctccggcatcgcagcggcaaggtcgccctcggcctcgcctcccctccatccgaaccccgccggtgttcgttatcgtcgtctccgttcgtcctcgttgacgactcctccggtcggtcgttcctcctcgccggctcgtcgtctcgctgcgccgcctccgttgtcggattcgcagcggcgtgttccacgccgtcctcgtctccgtgcagctgctgctagctgtccctcgttgcctcctcgccggccccggtcgtcgtcgtcgtcctcctcccgtcgttcccggtcatcgtggcgttcgtccttccgtcaagccgttctcgtccgtcgtccgcatccgtcaagtgtgccgctgcagccccgtcgttgtcttcgtcctcgcctccgcgtcgtcaagccttgtgctggccgcgtctcgccttcatccaaggatcaccgccgaagtcgtcccctcgcctttcgtctccgtcgttcccggccgtctccgccgcgcccgttcgtcgttgtcgttccctcgcctcgtcgcgtagtggtaaggatccgtcctctcgctgccccgtccttgtcctttcgttgtcgccccgtacccgttgtgcggttgtcgaccccggtacccgtgtaccggtgtcggtagtcgttcacgtgtgcgggtggtgaccgtgtagtgtccgtgttagtgtgcccgcttggtagccgcgttgtttccacgtgtgcagcccgcgtggtgtttagtggagtccgtttgtcggccactcgcctcggttgacacatggggtccgcttccgtcgacccgtggaccgtctctgtgtactcggtctaccgtggtcctttaggttgacatgtggggtccgcatgtcaacagcgcagccttcctgtcttttccaggctagcgcttccacatgttttatagttgaaaaacctaattataataatccgcaaatctccatataacagcactaaacttcggatgatcatatcttggtcatacgaactctgaatcaacccgttcaagtctcctaatgtttgttataacctaaagaaccgtgtgctttctttttatgtattgttattgcttctttataggcttgtagctttgcttgtgtgcttcgcgtagcttctgtcgttccggaggttctcgaagcgtggtttgcggtcgtcgccaaaggttcggaaggccgttctctttgagcaaggcaagtcacatcatccttgagcatattgaatcccagtttataaaattattttgatttaaattaatgcattaccgctttatttaaattcccgcgttatcgctgttttatttagccatgcctatttacctttgttaagacattattattgctattgttattattatcttgttcaccctagaataaacaaaaccccaactagtgggtactctattcatggttccactagtatgaatttaggtagatgcttcgctgattaataggacaacattaggtggtttttataactttagactttgggaatattcatatctcttggatactatggaatggttggcttatggtggaattggacatacccctctcttcctctttcaaagcccctaaaacctatttttcggtggggtttgggtgcatgccagttgtgggaagtagcaccccggccaatataaggattaagctcgggcctctgttgcaaagcactaccgtacttccacatgtctagtgggtaaggcttagtttgtggctcagtctggttataaacaaaagtacacggatggagatggacgaagtcgggggtcgatggacatctctaggacaaatgaaggctacacgagctgcggctcggtagtcgagatgtcatggcacagggctggtgtcgtgatgctaggggctcaatcctgcctgcctgtcccaggggttccggccgttggtggggttgggtcggtactcttgtttatagctaggatgggttgggaactatgtcacgtcttccgtccgtataccgtggtggtatgtggcacgtggttacacgtgaggaagatgtgtcttgtgggtaaagatgtacacctctgatcagagtataatctattcgaatagccgcgccctcggttatgggcaagccgagcaatgtacccaagttagtgttttaattcttaaaatttgcttaacaactaaaatgtggaatggttggcctgggttggcttgggacgagctgggacccaaggtcgggttgccagttcggtctgagtcatcgtaggccttgggttaaggcaggttcgtgagggttcacggccttgattaataacactgtgtaactctaggatcgtctttataaaatggctttgggcaactaagtgacttttaaatgctgttttctgcaaaacttaacccctatattattaccccttgtatccccttgcattaatcatgcatctgccggtgtggcttgctgagtactgtggttgtactcattcttgctcaatctttcccccccttcagtaagagaagctttggagaagaagtcttaggtggagtcctggcttataccccagttgagcgcctgtgaagatggagccgtaggcccgctagtccgctgctgtttatctttgattgtcaggc

SEQ ID NO: 29206 - DNA, 4166 bp, Oryza sativa
tttggacacctttcgcttccctggcgggtcgccggccgagtctccccccggcccacggctcggaccgggtgccctagagccgccgcccccaacggagccgccggtccgactgccgcctgcggtcgcgccgctgctacctgggccgtcccgccaccactggcgccgccccggcgggacagacccctgctagcaccgactgccgacatcacagccaggatactctaccggtcgcgggcgctgcagatgaggaggatcctgtcacgaatcagcgtttcctcttcaccccagtcccagcgctcacccacgtgggtgcgcatgggatcgttgtgcccgacatactcccacgcgccgcgggaccgctcctggagaggcgcgatgcgacgtcggaagtagtcgccgaacaccatcgcccccgttaagccctggcttcgcaggcccctgaggtggtcccgcactgcgtcgtactcctcgcccatcttttctagaataagtgaccactttaaagtattacttatcttattaatttaccactcatttaatttttttggtcttgcctcaattatacttctatgcaaacacctattatttaatagggtaaattcgatccatgctattgtaattttgccatattaaaaaaataattattacctccctcataatttagacaaaaatttctccttgatcggagctatcagaccctaaaaagctaaatcggctagctgagaatcggtcagagccaaactgtagcacctattcctcatctctctgaatctctgaatgtaatccagcacagattcatcatgcctttgtctgattgctgtcaggtcagataatttcatctcacggatcccactgtaaaaataactgtgaagctgtttctccaaatcggcccaactattgacagagttgtatggcaaagaagaaaaccaagtgaatgccgatccggataaggacaaaggaaacaatctaacccttaaagcatcaacagccgatgcctcaccacattgtcttgtcctgagaattttgaaaaacctggaacttcgtatcggttaggtaatggaaccctctcaaaccactcagggtacggatgccgatacaagtttccagtatccttcggcttaagcccaaactgctccctcatcacatctgcaatcataacggcccattgtctctgctgaggcaccccttgcgcttgttgttgtatcggctcaaactggttgaacctaggagcatactgaggctgaggcgatcccccctgttgatagtgaacatgaggtgaagggggctggtattgataattcaagttactcccttggtagttctggacattcggctgaatattacgcactaactgctcagggataacttgggcagcaaccgattgtccggttgtacaacgtgtaccagatgctcagggatgacttgagtcacattctgacgcgactgccgattatcaggcgtcctcaacccagtcggcatctactggaccgtcttttgctggatcggctgagttgtctgctgttgaatcggctgacctatctgctgccttggtggcgtgtgctgaatggatccaccagtcggctgagttggcaaaaacattgaagcaatttgctcttgagaccgccgattgatattctgaccagcatgttgcggttgttctctagacaagaggcaaggattactaattatttgccttggtgccaatgacggtgcagctggtgctggagtcgaagctgatgccatcggctggattgatggtgcattggtagcagactgttggttaccagttaccaattttctgtaatttgggaaaacgtctcctggaagataaactggccctataacttggtgctcagctattgtaccatcaaccacatactttaccatttttgtgaaggtattgaccaggactcctgattggttgatcaaagcatgttgcactgcgtagtcaatccgatcttggaagttgttaaattgcggttgcacttcgttgttatcttcaccaagatcctcaaccactccatcttgaaggccgtcacctttcttgcctgagccatcggcaatgcctttatcgccttgggatgagcttgatccaacttcgtcggcagtaactacttttactttgtacttttggtaaactttcccacgggtttctacgaacgacttcatgaattgctcctgagcgctcttcatcattaattcaaaatccttcctttgttctggtgacagcttatctatagtgactggaacaatgttcccttcattaacgtcggacccaatcggttttggaatcttgatttgagggtctgatgacatgcccgtcgatgatagaggtggcttttctgctgacatgtttgtcgtgtcccaccaggcttgccaaaagcgtgttgatgcgaaaaacacacactggcctggaagatcagcttaacttcagtgcaggtacaaaaatcttgcctttaggttcatgagcgtgccaattgatttgatcctgcaatcaacaagaaataaagacaggaaaatagtggttaaatctataaacgatagccgatcggccagtcgccgatgacgtatcatttatcttttagccaatgtcatatttgagtcgatcgacagttgtaaataggcaagaaagaactaaatatattcgatcggctaaagatattaatagtatataatacttccgtcgatatatacttaactcaagtgattgggatagatcggtcgccatgccgagacagtataaatcacttagattgaaatatatattaacaagaagattataaccattcatagcatagccgatcagatagatccagcatgtatcgactaatactccgatactactccatattgatatatctaaatgcgacaagatcttaacataaagggcggatttaacatgtcaatgaagcatataagatatagagtagttaaatcggctgaaaccccgatgaaaccttattcggcaaccaaaagcaggctagagattgagattctaatcacgacttataaggtcaaactcaactaatgcagctataagtatgaaaagaaggacaatatctagacaatcaagcagttggatgtttcataggatggtggataccctatataatctaagtcaatattggtatttaacctaatcggctgcctttcaatgatagatgttagccgattgaaggttaaataacgatattgtcagatattagataggatatatgataactcgacgaattacataaacaagattagagtatcataaagatggaaacagtaatcccgagaacgcatgccgccataacaagttttacctctagttgaagatcgaaaccgatgcagctcaacccgaaagcaagaactcgtcaaaagtaaacgaaagtaaaagggtggcgatgcgccaagattgttattgaacgtgtgttgtttgattacatgggttcgggtcatatttatacccgagatacaaaatacgtccttgtcggacacgactattatctctaacaaactccaagataccataagtctttgcggcagacttttgcccaaacttatctctaaggaaattacataaatatcctaatttgtagatacaattgccttttcaggactcaatccgtgcgtggcaatccctatgaagcatattaactcaacccgacaacgtgtaccgagtcacattgtcggaatcggctcaatcagctacctagttcgactcgaactctgctgatcctgatcgtagccgatttagactttagccgattcttgctctatttccggaacaatctctatcttggattctacttcgattttatctccatctccgatacctaaattaccatatttggtcgttaacacccctcttcggctaccatctccccttcgcttccaccttccttccgcttgaaaactctctccttgacgatcttcttcggtggcatctgtggtttcgctcggagctccccacggtcagcgctagctgttgtcgaatggacaactgtgtcacatcgaaaggcgtggttatctcaacagtggttggaaaagaaagacaattgtattacttagtaaaattttttggatccccctattacatggccttagggggctatttataatcctattacaggctcccccctttagggttttggttttacgggggaatttacatggttacc

SEQ ID NO: 29207 - DNA, 1920 bp, Oryza sativa
  unsure (1)..(1920): unsure at all n locations
tgccacgacccatccgctttcttcaccagcagcaccggcgaggagaatgccgacgtgctccggcggattaagccgttctcctccatcacacggcattggcgctccaactcatccttgtggcgagccgggtaacagtatgggtgtattgccactagcgccgacccgggtagtaactggatgcggtgtgtgcggtcccggaccggtgaaaggcccgtgggctcggcgaaaacgtccgtgaactcctctagcagcgagtccaagtgcgccgagggaccgcacgctagggcgcgtggccgctggtgccccggcagtccgtggagggtgacgcagtggtcgcggtgccagaacgacattgtcagtgccgtgaagtcccaaaggatcgggcccagtgtcgcgagccactgtgttcccagtaccagatcatagccgcccagagttaggacgtacacgtccgtggcgaattcctcgccggcgatctggaacggcatgtcggggaagacgccggggcacgccaccttgtcgccgttcgccaccgtgacgttgaggcccgaacgaggttgaggatcccggccgacacgcgccgccgcatcctgagacaggaacgtaggcgtggaaccggagtcgatgagggcatagaggtcagtgtcgccgaggtggaccatgatgtgcatcgcgtcggacacgcgaactccggtcgccacatgcagagaaatccggagggttgcgggtgcggccgccgggtcatcggtggagtcagtgtcggcgtcgtcctcccccatctcaaggaagaagaggcggcggcacacgcggttgtgaccgcgggagtacggctcgtcgcaattgaaacacaggccttggcggcgggcgctcgtccatctccaacggcgatagacggcggatggcgcggttaaccgccgggggcgtgcctgctggtttgacagcgacggccggctctgaagccggtgccggcgggttggccgctggtggcagcggcaagaggccgcggccggcgtgccgcggtgggcgaggtgnacgcgcagcgtggtcgcggcgttcgaacgagcgggcgaggctcattgccgcttccaatgtcgtcggattttgcatctgcacatctaaactcattggctcttgtaatccaatcgtaaacagttgtacctgctgatcttcggagaggtagcccgcgcgagccagcaggtcgaggaagtggtcggtgtagtcgtccaccgtagacgtgcgccggtaggccgcgagctcgcccagcggtgctgaacggagtagggggccgtagcgcatgttgaggagctccgaaaaacggtgccacgagggcggcccatggtcacgctccagacacgtataccactgctgcgctccgtcgagcaagtggtaggaggccagccacaccttgtcatcttccggcgtgcgttgtccccagattaattgctcacaccggttgagaaaaggaagtggatcgtcgcggccgtcgtacttggggaagtcgagcttgtggtagcgtgggggtcgctcgccatcaccatcatagcggtgaccgaatcgaccgtggaagccgctccgaccgccgtccgggccaaagccatcaccgccgcgagcaaagggatcgccgcggccgaagtagttgccgccacggcctccgccgaggccgccaccgccacttacgtcgtcgaaatgaggggactgtgcgcgagccccacgctccagacgattgatgaccatgttctgatcgcgctgctgctgatcgagatcagtgatttggccgctgagcgcgtcgaggcgttccaggacttcctcgaaacgccggcgccaaacgtcgtcgttgttggcaccgtctgccatcggagccgcagaaacgcgaaggatcgaaaggaatctgataccgagcacatgggtagccgagccatg

SEQ ID NO: 29208 - DNA, 588 bp, Oryza sativa
tgttattgttattatttccttgttcaccctagaataaacaaaaccccaactagtggacactctactcatggtaccactagtatgattttaggtagatgcttcgctgattaattaggcaacattaggtggttttacaactctagactttggaattttctcatcacctggacactatggaatggtttaattattgtggaattggattcacaccgctccctctattcaaaatccccaaaatggttttaggctgggctcggggtgcatggttttgatagtagcatctcggccgtgtaaggaccggtcttcgggcctctgttgcaaagcactaccgtacttccacatgtctagtgggtaaggcttagtttgtggctcagtctggttataaacaaaagtacacggatggagatggacgaagtcgggggtcgatggacatctctaggacaaatgaaagctacacgagctgcggccccgtagtcgagatgtcatgggacagggccggtgttctgctgctaggggcttaagtctgcctacctgtccggggggttccggccgtaggtgggattgggtcggtactcttggctatggcta

SEQ ID NO: 29209 - DNA, 546 bp, Oryza sativa
actataggcgaattcgagctcggtacccagatttacaagataaattgacagccgatgattattacaatcttatggtagatgaaacggaagatctggtccaatctagattacgtgctttggaaaaagtaacgagggataaggaacgagttgctctccattacaataagaaagttgtgcctaagtcattttcagaaggtgagctggtttggaaattgattctgctgataggaactcgtgacaacaaattcggcaagtggtctccgaattgggaaggaccgattcgagtatacaaggttgtgttgaagggagctgatatgttgcaagggcttgatggagaagtttttggacgagctctcaatgggaaatacttgaagaaatattatccaagtgtttggattaatgcgtgaccggctgagttttgtcgatacatgttagccgatgtgttaacatcgcctttagatggccgatataagttatatcacccttagcattgtttttatcatagttggttgtgttttaccaatgtatgatggccgatataagtta

SEQ ID NO: 29210 - DNA, 6144 bp, Oryza sativa
ccacattagtatatatggctaagacaatttcctggggagggtactcctccgtatttagcctcagttggacggccacgacaagttgtcgtaaggaacttggcaacccaaggtggtatctcgaagtaccagaagggcactgttagggggtattggccacacgattgtatactagcagatgtaaactaggatttgagtgtatgttagaagtataggaattgagtgctttctaaatattcttccacttagttagaattactttattatgaggatttgattagctttgcttcgtgtcactctacacttatattaaacttaacccctgcttagactttgacaattacaagtaatatatgcataaagtgcattagtaaagttcactcttattatcttcccttgggattaaaaatacgataccttgaaatacttccgggtgaaatgctacaatggtatatccgtgcacttgcgaattacttctgtaaccataaatataccaggactatttctagcgccattgctaggaaagaatatttctagtaatgtcgttaagaaataccaacaagcatttttggcgccgttgccggggaagattaataatgagatgactaagttaataactttatatatatagtacctctatatgagtccctgtcctttgcaggctaaccttgattgttttcacttgtgtcgtgaaaacaaggtagtgtattactggtttcaatttaccaaaatacattaacgagaatccagaggccttattctgcagcgtcaaacctcgtgtcatccctccatagaagagactctccgaaaagaaaccatccatccaagcgtcaccaagttttaggaacatggccgagaagacccttcgcgaattcgctgccccgtctgctgacaatgtgactgttggcccggctgtcaacatcggagacactattttggaccttaaatgcagcctggtaactatggcgcaggcaagcccattttgcggcaagccgaatgaggacgcaagcactcatctgcagcaattcttggagatctgtagcacttacacggtagaaggtgtcattccggacgccgtgaggctatgtctgttccctttctcactcttgggaaaggcaaagcagtggttctacgcgaactaggcgacagttaacacttgggatagatgctccaccgcgttcctctccaaattcttcccgatggacaagaccaatgcccttcgcgggagaatatcaagttttcagcagaccagggatgagatgattcccgaagcatgggaacatctcaggagtatgtagccgcctgtccttatcatgggatggatgactggctcatcctgcagagtttctacaatgaactcactccctcgtccagggatcacctggatgctactactaggggtgccttcttcttaaagacggtccgtgcggccattgatcttattgagaagatggtatccaacatgggctggagcgaagaacgactccagacccatcatcgtggcatgcacaccattaaggagatgcttgccgctaaactggatctcctgatgaagaaactagacgatcaagagagggccaagccgtaggccaccgtcaaagcattggattcgcacatcacatgcaaggtatgcggaagaacaagtcactcggggaacgattgcccggagtcccgtgaggaagccatgttcatggggaacaatggctaccggcaacaaggaggccacgggtggaaccagccctggccattataccaaggaggcaacaacggcaataacaataacggtaatttgaactagccctccttaatggacttagtttttgcacaagctaaaacaactgatgctacaaacaaaaaacatgccattaatgataaagtccttgagaacataaatgttaagtgagaaggcttcgcttccactttccaaaaccagctgagctgcaacaaaaggatagagactcagctggcgcagctagccgctttagtacctgctaaggagacgggaaggattccgatgcaacccgaaccttccctagaaaatgttaaggcgatcaccacgaggggaggaaaatccactcgggatccgccatattctaacattgcagggaccaggcaagctggcaaggaggcacggtctgctagcacaactgaactcgaggaaaatgaggaggtgcagccggacaagatcccgccgcaggaatactgcgacacgacgctactgccattccctcaacgccagaggaagccttctgtggatgagcaatccgctcggttcatggatgtcacccaaaagatccacatcaacatcccatttgtggatgcaatgcgggtaccaacatacgcccgctacctcaaggacatcctgaacaacaagagggcgttgcctaccacggagatggtcaaccttacggaggagtgtagcaatgctatactccatcggctccgggaaaagaagaaagatccggggtgtcccacaatatcatgcttaattgggatccaacacttcgaccatgccttatgcgatcttggggccagtgtcagcgagatgcgaaaggatgtcttcgacaagctgaactatacggtgttaatcccaacaccaatgaggctccaactggctgattcctctgtttactacccagcgggcatcgccgaggacgtgccagtaaaagtccgggacttcttcttcccggtggatttcgtggtacttgagatgaagtcagataaggagacgcctttgattctggggcatccattcctgagtactgccaaagccagtattgatgtgggggcttgaaacatccggttccacatcaatggaagggaggagaagttcgacttcaaaccaagagcagaacaatgcttaggtcaagatcaggtacgggccaaacccaccgcaaatccaagaagtcgaagtgcagctaccagagatggacagcctcatagtcttcatgaagaaattcctgcagattgaaacaaccaggaagaggccctatccaaggaagacactggcaaaaactggtgcacgagccaagaagcctttggctccggctcccaggaaaccaccgcccacaccaaggaacaaaaaggtgtgcgggtaaaacagacgacgtccgctccttcacctccagagacggacaaaaaatcttcgcactaaaattgctggaggtacggtcttgctcgttggacctaaaatcgacgtcaccctcgccaataggtaaagttggtatgtatctcatgtttattttcatcaatttgattcttgcattcatagcatatttgaatttcctgaaaacattgcattaggaatttaaaatttgagacaaatttggacaatgaattttctgagcacaaagaaataaattttgcagcatttatcaacgtggctcctacacgtgtagccgttggagtccaacggccgaatgtggggccagttgggcccaccaatggttcggccgaatcggccgaagcaacggtcaggttatccctttttgtgccagtggctagtgggtcccacctcacagttatagccattggtagatcattataaaaagggtatggccggtagaaggagttcatcccattctcaaaccatcttcactccttctcaaagtttctttttgctctcaagctcattccaagctagttcaagctttgcctcacattttagagttctacatttgcatttgcatatacaacttactttggtgcaaggctaaccggcacgtagattgtcttgtgttagcttagcccccgctcgagttttgccttgtgctcttgctcttattgcattcatgaagaaacgacactctcgcttgttcaaggggtacggctctcaatccagccgtcaacaacacgagtcaagtgatcggtcatccgccgatgtgccgatggaggatacgggtgctgaaccgctactcctaaccgacgccgatcttgatcttgttagtggacgggaacctcaagcctacgagacgctgatggaccgagtgttagctcacacccgagcgtacgtttcgggattgctccagaaaacagagtcgattttcagaaggcaacttccggttttgagaaaaacagattttgggaagatatttttggtgcaccgatttgtaagaaacctagaaccaatgacatccataatccaactcttaggctcatgcataaatggatttccatgactttgtttcctagtggagatcttagacttgttcatgataatgagttatccttaagcttgcttaaggatgagttttcctcatttcttctccattttatttgcttaatccctagaaacaaataatactacaagtacaagtggaagtagattattctaaaataaatatgcattgcaagcatagctaaatctcctttattttagttatatttatggtcgtcattggtatataacgaccatcaacaccgtttcaagaggacgtgttgcaatgccttatcaactttgagatgacctttctactgtcattcttcaatgtaatgacgtatcttctatgtcaccttgtgaaagagatcgatattctcggtcctgtgtacctacacaacatgtttcctttagagaggtacatggctgttctaaagaagtacgtttgtaaccgttctcgtccagaagcaagcatcgccaaagggtatggaacaaaggaggtcattgagttctgtgttgagtttattgaagaccttcgtcgaatcggggtaccataatcaatccatgaggggagagtacggggaaaggacactcttggcaggaaagcaataatgaatgtagacaatgatttattccgtaaagcacatttcacggttttgcaataatctttgttggtagctccttacgtcgaggagcaccgggtgattgttcactcaaaaaacatcagcatgtccgatgcctggattacacgccatcacatttatactttccccacttggctgcaacaacatctcgtgggtaacgggatgattgaccgacaactagccttctcggcgaggggaccatcttgctcgatctcgacatttcaaggatatgaaatcaatgggtatatatttttcacaagagcccaagacagaaagagcatgaaccagaagagtgttcgtatcgatgccatgagatacgatggtacaactagcacgtattacagtgtcatcgataacatatgggaactagattatggtcccctgaagatccctctgtttcggttccaatgggttaggctgactggtggaggcgtaacgattgatgacaatgggatgacaacggttgaccttaacaaggtaggacactcagatgaaccattcgtcctagccaatgatgtaacgtatgttttctacgtgaaggacatgtctagcaaagcaaagaaggggaaagggctcgacgagccaagacgccgtgtggttctcccaggaaaaaggaaaatcgtcggagtcaaggataagactgaacaaaaattactatcagtttgaggggcaacctctgttcacagtcacggttgacccgggcatcctcctatcaaaggaggacaccccttactcaagcaacgatcatagcgaaggaacattagcaaggagaaagtatgtgaggaagacagtgaccaagcttgttgtatggatgatgtaaattatttgtaatatattgaaggtaaaatttgctacaggacacgcaaaaattatgtaagtgtaattagctgagggacaccgtgaaaacgcgaatttgctaaggacacaacaaaaaaccgataattagatgctggacacccgtcgaattattttattatacccaaaagaattggagagagaaacacctatttaagtacaattctacccttcaatttttttcttttttctttattggtccttatcttttctctctctcattctttctctatttctatttgctccttattcaagcgagctcgaggatggcagtgcaacgaggtgcgggccggtgcggtgccttgactagggagacccagcgcggttgtgcgcgggggatggggcctacttggtgcggcggaggtggcgctagagtaggaggggaggtggtgccgacgcggttagcgttgtcggcctaatgctaaggcaactgtggcttcgaggagagcagctttggccttacgggcacagggccaactgcgatgaggagtc

SEQ ID NO: 29211 - DNA, 20500 bp, Oryza sativa
agatcagtagttggtacacacatacatagccgaatcacaacatatcacgaatgaatttaggctaagaaagttaagtgcttacattagggccaggtaggccaacaattatcagagaacaacagcggaagacaaaataattcaagggcccggttgacatgccacaagtagtcgactggggaacgagacctagaacggaaccgcactccggtcatcttgttaagtacgcaagcgtactaacaagggcttctcttcatcactctgctaaaagatatatatatatatagagcaacaatgagtacaaaagtactcaacaagccaccccacaaaatgcaataatgtacaggataatacaagacatggctatgcttactttgcgtaaagctgagttttcaaataccatttcataaacttaagacctagcataaactgatcaagttttaactccattgttcattaaacagcgacggttctgtccaccatccattgtgttcccaaggatagcttcccgccattggtcgtcatggttttctggggtctacctcttcccgcctctcgagaagttgatcaaccagtacaaaatcatcatgcatcatcccacccaatcaatttaagaatttagactctagccaagtgtaatacatgtcccagtgctcaataaccgcgagcacggctattcgaatagatttggtttactcacactgcagtggatgtacactttacccgtactccgcgacttgcccaacacatgagcctacgtcccaacgaatgagacttgccacggcaaagcctttcaacaacctcacattgacagtacccgctccatgaacttgagtcctcatgcactctagacgtcataagtttctagtagtgataggagttctagcactcccgaggggaaaactcatgcaagcctaacattgtatcctgttgttgaacccaatccatgctttcctcttttgggtatctctttgtagtcttgtagtcctgacaagtcagtctctggccatccgtatcgggtatcagccagcagactgcttgttcgtccacacacctaagtgaaaccactatgcaggggtactgcctccgctctgctatctactccgctaggtctatacccattcgagaagtacggctgtactagggtcgtttcatgcttaacttcatggatcggtccttaactgaccagggatggcattagcctttaccggacaccacccaaatccaccagccgccccagtcgaaaacatttgtttagttttaactttctttcacaaatcatctcatcaatgtcatggcaatgtggcgctcatgtctccacattccatatctcaactaccttccccaaagtagtttcccaagcatatagcattcgataaatataagaatgcatgaatctaaagaagcattactaagcatttatcataattgactagggactcatacgtaattatgggtacaagagaataatgagataagcaataatcaaaggcatggcataataacaagtaggatattcatcactgtatgcaattttatttgtaaacaaaacaatgtcaattgggatcaacatgcacaagggatggggtgatgacttgcctgctcgggatagttcttattcttgatattatcttgatcaatcttcaccttttggaagctacatacgctgcctcacgactaaccgatatacaatttctataatacgcgagaaaaaccaatattcaaacaacaagcaaatatgcatgagcaaaattaattgttggggtcgaacatagggctgttcatactactcgtgtttgctaatggattgtaaggtgctacgaagtttaaactatggggtgctcacatatagaactcaatactcaggactatatgtctatggctcaattatctatcaactatggctatggggaggattatggctacacatgcatctatctaaataaaatggtttctgtcgttggatggatcaatttaggatcaaacaagcaatcagagggaatcatttatattattattttaccaatggggcattattttaattatgatcatattttacttgtcattataaattataaatgggttaataattatccatgcagtatatgctagatctgtgaggttataggtgcagattatttgtctgtgtggtctcataacgatcaattacagaaggtcaagatttataattagtatttatctaatatatgtgcttatcatgtacccggtagtttaatgtatgcaaaagctaggttattgtccatcgtataatttaaatggaatgtacagtaattgcgagtgcaaaaatatactaatattagatcatttactgagcatgagctatttactctaagctatacagtatatatgatgtaggtggatttggtgagttggtactgtttaccaacttaagattcactactaactaaaaatatactattccatgggacatgacattaagtaattagttccgtataggtgatttaatcacactagctctgtcattattcctcataaacaagtcaaagacttatctatgtgtattcatattttatttacataatcacaagggtaaacttgatttaaataacctataagtcatgggtttaatcatatggccatcgaatattaaataagtactagcattttcctatacatccattcatttgagacattacctatacttagtttacatggttgttattgtgacaaaacatgctagaaacaaatattagcatatttttaagttgaccataatctaatcatttgatattaattatttaataattataaatatattttattaaatagtgagttatataccattggaaaggttatgaaattagatgaatttaggttcaagtttcactcaaatcggagttaaaatgagcaagttatgttagtttaaatattcaaatttgaattagtccaagaaattgtaaaaaggcactatttataattcatttatttttaatccgaaacatatccacaaccctagtgaccgacaggtgggacctggagttccttttttttccaccggattaatttttgctaggggaaaaatgggagtgggcccggcctgtcagcgacttggccaggagtcgtcttctaccttcgtcttcttcttcctcccgaccaagcgggagcagcatgggaacacggcgcgcacggcaaggccggccgagggtgacccgatggctgccaggggaggcgcggagcagctctggcgatctcccgccggtgaccacggcgcgtggcgacgcggaggcgagcggcgtggcatggctaccattgccgagctcgggctgcaagtggctagggcaaaagggagagtttctgattgaattggtggtcgtgggagtatctacggggtatggggatttcgtttttcttgctagatggagaggggagctcccgggatagtctacccacggggagcttgccggcggcggaacggcggtcgggccggcacagccataggcattaatcgtacaaactggagccggtgctagctattagaggtatagagtacaaactggagccggcacagccataggcattaatcgtacccagggatggagagtgctcgaggtgacctacccacggcgagcccgccgatggcgaagcggcggccgggatgggacgccgaagggcgctaatcgccaaaattggtgggggatttagcttctacatgactaggaggaaatataggagcgaggttttactgagagacggcgggatgacgaagttcggcggtgcgctgctcagtgttgacgaaacagggggggctagcagtcggcgacgcttgcaggtgttcgatgcgtggttcccgacgtccagcggtcctcgactccctcaatggcaatggcggcagcacagctcttcctccactccctccaactgttagtgatatgccctagaggcaattatagagatgattgtatcacatacaatgtttacatatttatccgatgttgttccttgaaatagataactccttattggttaatgaatatgtgattctttcatgagactctttatgttgtttgttactatttctaaaggatccctgatcaaatatcatatgtggaacaaatatgtttatatgatcagtacatgtattaattgatgatcatgtctcatggatcatggtatagagataccaaattaataatgtggacatatgttggtgaacatgttgttggatagacccaacatgagacactgcaagagccatatgtgttgtgtcatcagtgatctcattgagtgttagtgttgaatccttagacctgagattatcatggttctcaacatgtgtagtagcttacttagggactgctaaacgctactccgtaattgggtagttataaaagtagttttcgggtatgctatgaaacatgtagtgggatatgaataatcaaaatgggatttgcccctcctatggagagatatctctgggcctctcgatgttgtagattatgaaagtgcatggccatgccaaaggtgattgaggagtcaatcacaagttatataatctatcaataggttcgagtgaatgattgagctattagaggatggcacatttctagccttgagcttaatcgatatcgtgaggcaaaggggttcatacaagtatacactagaggttcagccgatatgatctttatgtatgcccggtgggtcaatacgttctgctaggggcctctgttgacgcgttgaccgaaaaggagttttcgggttacagccgagtatatatgaacctacagggtcgcacgcttaatgggccagaataaggggattggatagagatccaatatgagcttaattcggatagggatccgaataggagtcctactggccttggaggcccgagtgatggatcctatatattcgtgaggggtgtgaccggcggaggcattgcatcacatgagaaaccctagccgtcacttccctccccgagcaaaaccctagccgcgcgcgggtgctagaggcgccgctgtacgtgtggataccggtagaggcgccgctgttttgcggtgctgatcggtgtggcagtacggcgaggagaacgcacgaggaggacaaggtcgagccggtgcgattgactacttcctctacatcgacgcgcgctacttcgcgagagttccttcgacttctcagcgtcttcttttgctgcaccgcgcgtcgagtggtaacaatctatgatctaatacttgcatggttcctggtttacgcgatagaaaattttgatttatgctatcgtagcctacccgtatcccaacatgtccggccggggagcctcgcaatggtgatctctagcggtggtgagaaagtgatcgcaaggtgttcgatgaaatgcattcgagggaaaaaggcagagagggatggggtatttatgggggcttggcttggggataagccaggatggcgtggaggataagatcggcggctggcgcactcgatggctgtctacggcctaggttagggaggttgacgcggctaagtttcctcctctctcactaactcggggatttggggatccatggagtaatggtggcgctagggttgcaggcctcacagctagatggcttgaggagaagccgtttatccgatgggcacgacgagggacgatgtgacacgaggagatgggtgagaggacaatggtgacgaagaggcaacgtggtggccgttatccgtcgtggcgacgcgacggcgacgggatggcgatggcgcagctccgtgtttcctggagggaatctgggagatcggttggaggtgcggcacgggcgtggctggcgctggcggatgcggcgcatgggcatggtagcggtgagacgcgatttagggaatggcgcggcgcagagggatggatgcggcgcggtcggtttggggccagacccaaatcgagcatatggtgggcaatgaatagttctagctagaaaaagagagaaaagagagaaaaaggaaaaaggagggggaggggctaatatgcaaaagtggctgagattggaattgaattgagatgtaacattatacattttttatttgaatatttcatttaaatatttattcatttatttgattatttgttacaccccaactgaatttacttcgcccaaaattatcctatataccatggatgctttgatatttataggaatcactgcacattggttgaatttatttgtatagcaatgtattttacatggacatgtttaatctattattccataaaagtaaattgagacttggtaccatattgatctaaatgtttagttaaacactcacataaatgtattttatatataaagctcaattcatttacatgatcaattattttatgcgagtcaattttattccatgagagactcgatgaatgttataaatattaatttaattattctagtggaacactcctatatatacagagtcattgtagtggcgactatttcatggttacttagatgtcatgacacttgtcacatggttccaatatttaatatttaacctataaattaaattagtaattaaccttctctttgtattgctttgttgtgtgtaaatatttaataataaatatcttaattttataagtattacttagttgtacagctttagctaaattttcaattgtgacaatttatagtttggcaagcaataacaaccataacatccagcatgatgcaaaagttttaaaaagttcaaaattttagtgatttttattgtcgtgaattttcaggatgttacacaaatgaacaccttaatcttcatgacacactttgtcttctagatccatctaaaaggccttgagggttgcatggcagcaaagttcaacttgtaaaaacttttagaagtatagcatgctttattctagatgaagctccaaattatccccaaattgtccagacaaagtcaaggcatcaagctcctctctgagttctaagaattccccataagaatcataagttaaaggcaacttaaaacaatcctcaaaaagcttggcaaagataactgcaactgattcattcctatcaaaaacatgagcacaaatatgagtatgggaaacacttctcactcggccattccaaagatcatcccaatatagaacagatgttccagaaactagatcacatttagcaattcctctgaagaagtcagagagagcaattatatccctccaccaaaaagagcccttattaaagatctgatgaggagtttttgactgataataagaccttcatattaacttcacccatggaagattaaactatttaattaggtcatatgttaattatatatgattattaaatgtaataggaattttaaactatttaaataggtcatatgttaatatgtgattattgaaatgtattaggaattttaaactatttaaaatacgacatatgttaattatatgtgattattgaaatgtattaggaattttaaactatttaaattgttttctcataaaatttgtggttttattacatgtttaatggattacttattattgttttaaatctatatttaatgaaattaatttggcccgtttaagtttgtaagcactaaaatgtacaaatgttcaaatattagtcccggttattaaccttagctgggactaaagataaaatttcggaatagcgagaaaatatgttttgtcccggtttatatctttagtcccagttagaaccacgaaccgggactaaagatcccggactataaatatgggtccatcggcttccccgtgcacaacacttagcagtttctcgatctcaatctcggttgcgcgccatctccgccgagtacactgccgcccgagccgctgccaccgctgccatcgtcattgttgcagcagctgacctacgccgctctcaccatcgtcgcctccctcaaggtgtgggcgccaccggatcccgctgtcccactctctctctccctccctctctctctttctcggcccggacgacggccacaataaccacaagcgccgccgtcatcatcatcgttgtcgccatctcccgctgcccccgccgcgctccaccgccgctgctgccgacgccgacgtcactggtgccgccacgcgggcaaccactgcctctgcactactgatgctgacgccgctgacgccgctgctattgatgttgccgccactgtcgccaccacggccgacgccgagggctgcaactgccgggactacgaacaatgaacgaccgaatgcaaatgaacgcatgaacatgaacgaacgaaccacgaacgtacatgagtgttagaacaacaaatgaacaaatgaacgtaagcgaatgaacgaacgcacgcgaacgaacggtcgaacgcaggcaaatgaacaaacaagtttcacgagttagcaacttcaacgagtttaacggcttagcgagtttaacgaatgaattaacgaacgaaggagtttcatgagtttaatgacttagcgagtttcacggacgcgaatgaacgatttacatgagttgcttaacgacttagcgacttcacgagcttaacgacttagcgtgtttcacgtgcttaacgacttagcaacttcatgagcttaacaaattagcgagtttcacgacttgagtcactacctctcacataacgatgtatatatgtttatgttttgaatttagacttgggaccattgtatatgtatatgtacatgttttaacttaatttttttcctactcataattacgtggtccagctgctggccgccgccatcgctcaagcataagtggtcccaagacctccaagcaaaataaaggcaaatttacatgaattccctgaatttaatatgtacatgtaggtgtcatatttcttaattagatagctaggtgaaattccattagttgtggttcgtagttctccgtagttgatgtgtactacttacactacaccacgacatacatatgttgtctcagaatctgtcggcaaaacacccatgtgctgacaaactatctgtcagtataggttttcccgacagagaaggtctgtcaggacaactgctgccgggaaaagtatttcccgacagataatcttttcccaacagaccgattgatggtactacaaaagaattaccgacagacactttttagcgacagatgacccttttccgacagttaatggaatgccgacagataagtttttacaaagagattgttgaatacactcataaggttcttatatttcctaccgacaacaagtacaatttttgaagacacgctcgatagctccattgaaaacagaggaaccttgctgaaatcatgtcattcatgttccctattattgcatcctgtaattacagttgatgtctttgcatttatattatcagtgtcatactgtaatacgtttctctaagttcgatcaaaagctacttctaacttctaagttcatagctacggttaacttttgcattccaattatgacatgaacctagaatagtgagtcagaatggtctaaaaaatagcacgagggtaccatttgattttttttatgcaaaaaataatgcaataacatgctagaatagtgagtcacgttgttggctagctggttgtaaaaaatgatgttgcatattaactttgtacagtttacctcaggagtagcaagatagaactattagattaaattgtcaataggatatggctgcaattagttttcaatcatgcctctttagctctattgcagtccacacagttcgcatttagtgtttgtaagaaaaaaatcaagagccaacctcaatttgtacattctctcagccattcatgcacgacagatgaaaacagtaggtacgaaaaataaaatactgaaacatcgcaaaagcatcaccattcaacagggcagctaacctgtataggcttcactgatccagaagatctttttacctgacaattatatgctagctcaagttgttcagaaacatcttcacgcaaggggatccaatcaagccctcctttgcgagcaaaccagtggcccctcaagacacgcctgttcttcccattccagtacacagggaagcaatgacgtctcattaaatcaacctgcaatagtgtatgttcttataacaaagacatattcaatatctagcatcagctgcaactaaggaaccttttggcccttcgctgcatttagcgtactctctccaccagtatgcaagcatagcttcctccctctacaaaccagtaaaccagtattgtgatctcgaagacaagtggtttaaaaagactgagatgacattatccccttgtattgtagagggactagcacaactctcttggaactagattgtctagtaatatcgcttttcaagtggattgtttttatcactgttagaacagtccagttttcacataaatgagtatacacttaaggcggcattggtgttaaaaaagataacctccaagaacgacgcctccaatgcaagagaatctctcatgctgaaccggaagtagtcccctttttcccattatctctgtctgtggaactgaagcagagagcatcacgtcaacagcgaaccgcacaaaacataagatcagtaatacgtttaccacacacttcataattttaaagtccaaaccgatgatcaatttaattgagcacagcagttctgaagtatgaagacatgccacggtcaaatatgaatctaatgtaaatgggcgttgcttcgagttgcaagttcaatcagcgaattcattagcgcacgcatgtgaacgcctctctaaatcacagtaccctatcaattagtatattcaaatcagcaacagtctcacatgaaacctacattctagctaccacaagtgactgaagcggtcggttaaactggtggtactggatgtagcattctgaagcaggagagcccgagggccaacacacggtgagcggatgcagaaggcggggggggggggggggggtgccccttgcaagaagtaccagcggacatcctcaccgtcgaaggggctcttggtgcgggcaaggtacttgcggcgcgcggcgcagtgctcgatggcgtcctccagcctggcgatgttggagggcgtgttccgcaacgagtccggcgacgcgccgcatccgcgcctccgggggccacctggcttgtaacttttgcattcgatcagaccaaccactacccgtaccggcaacaccttggaagccatgaacctagggtttggagttggggatttacctcgtagaggctcttgctctctgcggcggccggcgcgggctcctcctcgccgccgccgccgccgtcgccgtcgcgggaaaccctagccctcctcttgcagcccatctggtggaagcggtagtggaggcggcgtgaggtggtggatttggcggagaagtgatggcgtgaggtggtagatttggcggagaagtggcggcatgccgcggcggaggaggaggagaaggaggccgcgcgccgcggcgatggatttggcggagaagtggcggcgcgccgcggtggaggagaaggaggcgtgcggtggaaagcgaagaagtggcggcgcgcggaggaaaggggacgaagtggaacagcgcctagggttttttttggcgtggattttcttttcagagtgattttttttggcggttctttttttatttttccgcccgagccggccgagcgatcacctcgctttatccgaaccgtgggatcaagatccgacggacgaaacattgctgacagatggattattgataagttttccccacatataattggtttctactcttaatattgctgacagttattttgacccaataaatatttggaattgctgacatataatatgtcttattatgtagtattgccgacatataatttgccaaaagcctttaccaacaaatagtctatcaattattgtttatctttaccgacagatgtctgttggtaacatagtgtcatggtgtagtgttaataggacattttttttggtacttctagaattatcgtattccttcagctcgaataccaacagaaataaaaatatgaagttaaaaaaacacatttcccgtaaagtaaaataaaggattttgcttacttatattttcgtgatacgaacaactggcagatcgcgatgacgaatagatcctcaatgactagatcgcagagggcagaggtcagtattggatggataaggaggggaacgaggaccccaacgaagagggcaaccaggatggcaacatggagggaaacgaggagggaactgacaggcaacgaggtgctgcgaggaagctggagggcagacacattattgctgatgttgccccaaacggcgaaccagtagccccggctggtatactaaggaagtttgtgggactcagtggttgggtcgtgagggatcacgtgcccatcagcatagtgtactggcgtcaaacaaggtcatgtggagatgaccaaagttttctcccagatacggagaaagagatgctgtggaccaccatgctctagactttcatgatccctgaggcagattaggccagagtgaaagaatggactatgaagaaaatggccaaatagttccagagctacaagtcatatatgtacaagacatacatcgtgaagggcataacacctgatttcgacgagtttacgaagctaatggatcattgggatgcgtttgtcgcatacaggacaggagagcgtggaagtgcagatagaaaagaataaagccagtgcaccagctagggttagggggttataagaagacaatccccaaataggaaaaaatggaagccggattgatagaaaaagatatcgtgccggccacaactaactggcttgaatgatgaaagaattggtactatgcacatggtggatcgctcattcccgttgatggctccctgatatacgcaatgagattcgcgaatcaacaagccgacttatagatgcagtggatggctatgctcggggaatagggaacattccggcccaacagagagaaggacgagcttatgctcgcaatacataatcctgagcatccaggacgaacgcgaggcaaatgcatggttccttggaaataaggatttcaagaggacatccgcacgtacaagagtcacataaggagcatgagagataccgaggctaagattatagatcttgagtatagagcctcgaactacgatgcaaggattacagagaaggtgtcaagacaagtggaccaactcctggccgaacagcggggacttgatacacaactgtctattatgcccgtcatggtgagcacctcaggcaatcgcagtagcagctacgcctcaacggggcaagtaggatcatagagcatggaagcagtgcaagcacatgatgaacccccctgccccattgatgaaatcacgcagcggataccatgtgagatgcatattcccatcaagaatttgtcaatcaaggtatgctcgtagttttacgatatgaattgtacattccgaaacttggtgcataggttgattactaattaacaaccttgattcttgtgaaggtgacgtctgtcatggccataccaacggacccttcagggacataccatcgcaggctaattccacctggatacacaagggttgaaattgagctagtggaatgcaccttcgaggatctcgagttggacatccccggaggagacagggagacgaaactagtagacacaacccacgagatgtgacttcctatctggccggatctagattccgcttcccccaaccacagtgggattcttcttgccaggctggggcttcagttggtacaggtagcagaagaaggcaaaatgcgggtagataccataatacccctcgcacatgtaattgaatatggcaatctgaagaatggagttgggattgagatgatggacattgatgccatggaagtgtagcagaccttggaagaaattgccggtcggtagcccaagtctgaactggaagaaggggaggaagactacaatctcattggtgtttggagtggggaaatcttcctcgacgtcctcccaccagttgatgagcgcttgcaggggaggtatccctccgccaccaccttctccagattccccgccattactgtaaacggagcccaggcaacagtttggttgaggattggcacgaattccgctgttgactgggacatggcagaggaggaagacggagaatggctggaggagcggagaatcaaggggctattttgttggatttaccctgagagcaaaaccctaaatcgccggaagcaaagagcagttggggatgagcgaggaagacgaaggggcgtgccaaatatcaagggaagtgggcaacggcgctcccgccgggggtatttatatctcttggtttcctaacaagctggcccatggagttaccctaatttggaaaatcgagtctggttttcatccctgtccaataagacgatggataccggaaaactttactcaggtccggatgagtgcctctatctgcatgctttggaaagagtacttggccagattcgactccgtcacttgacaagtctcgcttcatattcttcatcaagcaaagtactcgggggtactatggatattaccgtacctaggtggtacatggaaggcctttgggtcataactcgggggtaggtcatgggcctgggcccacgggttagtaatgtaaatggcagggataggaaataaggaaacctatcctgcctgatctactcagatggcaggtaccccgattataagggataccgcatcatacttgccactgatcaccctgtcatcatataaagggcatcagcaggaaccctaagggtcaatcactcctcgcattccgataccggacatagatccaatcacatacaattggactagggtattaccttgccttgaggacctgaaccagtataaacatatgtgtcaccacttctttctttgaccttgcgcaccctaaaaatttcatttccgatcttagaaatcgacacttgttgatttgtgaatcaacatctgaatatcaaaaatttacatggttagattatgtatgctgagtcgctcagtgactcgtaaagggcgtagttgcaaacgaaaagcttgcatgtaaaaagaattgaattagaaattagatgttcaaatcaaataacaattaaatagtactaccttctttcatattataagactttcgagcattacccacattcatataaatgttaatgaatctagactgtctaaattcattaacatctatatgaatatgggcaatgctagaaagtcttataaccttaaacggaggaagtagcaattagagctcacgtgttgttgtgtcgttcatcactgtcacgaccggaaataacccaacgggcgttccttacgtgcgtgcattattccttgtcccaggaggcaaggtacaccaaaagttgatacaattcagagtttaacaagcggaagcgtaaatagttaatttattacatgggcagcgaaggcccagcacacacaaagacaaacgggaaacagcggaagactagggcgacgaccacaggcacttgacggcaggcacgagctagacaccaaagccttcatcttccaggggctcctcttctgggtttgggaaaaattgagcaagactgagtacaaccaccgtactcaacaagacacacccacaagtgcagaataattgctcaaagccattttgtaagtatggtcctagagctatacaatattattaaacaaggccgtgaacccacacgaacctgccttaacccaaggcctacgatgattcagatcgaactggcaacccgaccctgggtcccagctcgtcccaagccaacccaggccaaccatttcacattttagttgttaaacaggttttaagaattaaaacactaacttgggtacattgctcggcttgcccataaccgagggcgcggctattcgaatagattatactctgatcagaggtgtacatctttacccacaagacacctcttcctcacgtgtagccacgtgccacataccaccacggtatacggacggaagacgtgacatagtttccaacccatcctagccatagacaagagtaccgacccaatcccacctacggccggaacccccgggacaggtaggcaggactgagcccctagcagcaggacaccggccctgtgccatgacatctcgactaccgggccgcagctcgtgtagccttcatttgtcctagagatgtccatcgacccccgacttcgtccatctccatccgtgtacttttgtttataaccagactgagccacaaactaagccttacccactagacatgtggaagtacggtagtgctttgcaacagaggcccgaagaccggtccttacacggccgagatgctactatcaaaaccatgcaccccgagcccagcctaaaaccattttggggattttgaatagagggagcggtgtgaatccaattccacaataattaaaccattccatagtgtccaggtgatgagaaaattccaaagtctagagttgtaaaaccacctaatgttgcctaattaatcagcgaagcatctacctaaaatcatactagtggtaccatgagtagagtgtccactagttggggttttgtttattctagggtgaacaaggaaataataacaataacaataataaggtcataacaaaggtaaataggcatggctagataaaacagtgataacgcgggaatttaaataaagcgataatgcaataatttaaatcaaaataattttataaactgggattcaatatgttcaaggatgatgtgacttgccttgctcgctttcccaaacgtcggcttcaacttccacgaagagcggatcttcctaagctgcagcgtctacacgaccaatgaaaaaagaaaagccttttactctaataaactccatataacaagtaggaacaaagcacaaaaatgggttcttgacttcgtaaggaaaaattagagacttgaacggtccaattccgagttcaaatggccaagatatggccatttgaagtttatatgctctttaaatgaatatttgcaaatttcttcatttaaattttaattaaaaaaaaaggtttattgtgtcagccgaggggaggggcgctcggaccgggtccacgggagtggggcccccgcggcagcctcacggtccacggtggaccgggcgcacccgggctcacacctgccggcgccgtgggtcccacgcatcagccgcaccccaggacgcgggcggccgacggccgggccccacgcggcagccgcacggtacacccgaaagcggccacgccggcgcagcggcgggaggcggcgcgcccgcgcccctatggtcgccggcggcggccataggcacggcggagcggcggccgagagaggggagggaaagggggaaatgaagcggtggtccacggctcaccctgggtcgacagcgacggcggaaacggcgaccggagcggaaaaaggcggcggcgcggctcgggtggacgggggcgacggtgctccggcggtcagcgaccgaaacggagagtggacgaggtcggcgaggatgcgccgaagccgaaggaggcggcgccgaggtgggaggtggtccggggcgacgacggcggcggaccggagctcggcggcgacggcggagagagagagcgacggcgcgagctcgattccggcgaggagacggtgcggcaagggcggaaacgggcgagggaggcgcggggagggtttatatagggttgggagtgagagagggcggccggaagaggggggacgggcgcgggagacccggccgccattaatggcgccggcaaggttaggggaggggtttccaaacgaatccgagggagagagggagggaaaaatggggggaaagggggaggggatcccggggaataattcccccctattgattgcgcgcggggacggcgggaggcggcgggattcgcggcggcggcggcgctagggcgcgggcgaggcggcgggagcggcgggaggaaggggatgacgggtgggccccacccgtcagcgagggtggcgggcgagcccgcccgtcagcggcgcgcgcgcggggagggggccgaatgggccgcggggagaggaaagggagggggaaggagatgggccgagccggcccaagagggagagggagggaaaagggactttttagagcttttctttttataaaaccattttaactttgtttatttcttaataattattatttgtgctctgaaaattccactaaaatttatttacgcattttaggcttttaggaaatatacaaaaatcctccaagccttatttgacttttaactttgcacattttaattgttggaggctttcacacggattttaattattctaggcataatttagaggatgtattttagagtcgttttgggacgtgacaatcacgatgcgagcgacgtcgtttctgttatctggctcacaggatcacagtggaaatagcaaatactcaacgtgaagacacagtggaagcagaggatttggtgctgcgaaaacttgctgcagcttttctgaactttgttcaaaatataaagaacagacgcggccgggcttctcgccacgaacctcaacaagtgcgccacgatcagtttgcaacatgtgccatcccacacgtccttttcgctacacacgacgcgcacgaacactcaaccacgcagggaggtgccggctcagatcctaaaaaccagctaacaagctaactgaaaaaaacagaaacgctgaagaaacgaaaacagctagacacgctacaggatacagagtaactgatttcatgaaaaagcttcaggattatccaacgatgccaacattgctcctcctaatcctgatgtttgggtttttacctcaacgactccacttgtgtcacgcagttcttggaacactgcacgacccagcggcttcgtgagaacgtccgccagctgatcaccggtggggaagaaatccacttcaattcggccatcctcgatgcagtcacggatgaaatgatacttagtatcaatatgtttacttccctcatgcagcattgggttcttgcacagagagattgtggagattatgggtaccccatacccacatggcatagttatccgactggctataggggataacttatatctatggaatatgtaacagatcatgacttgggtattacgtttccttgtatgttacggaacggcctaaagtcctggtttgataatattgtaaagtagatttaggaaaccgataccgtattggttaaggtttctatcttgtaatcctgccccccaccctatataaggtgggcaggaggccctctagggggcatgagacaactagatcgtcagatctataatacacccggcggattcaattccccaaacaggagtagggtattacctctcattgagagggcctgaacctgtctaaatcctttgtctccacatccatccacttttaggtctcgtgcgctaccccgttttattattgccgaattcatgtttcgacagttggcgcgccaggtagggggtgcgtcgagtttcctatcaacgagcacgatggaatcaatttcatgagtcgccgacttcgctttcgctttgggagttttcacttcctttccgtcgaccacttcttcaagctcctcttctctgacttgatccaaatcagtcggggggaaactcaatctgatttttatcattatttatcatattgatttttaatctcagattaatttcttgctattttttgttgttgttcgcatataactacgcggcactattgaggcgattgatgctggtcatggactcgaggcgtctcagctttccggtcgatcggccgcgagtccactccgccggcttgtcctcgccaccgccattgctgatagcaacaacgacttcaccgccggcctgcctccgtcgccgccgactggtgtcatcgcctatacggttggtcggtcacaccaccgttcatgggcgtccatgtcttcaccgaccggctggccttcgccgccgccgactggtgtttccgcctgcacggctggtctattatgccgccgctgttgagcgtctacgacttcaccaccggcctgcctccgtcgccgccgactggtgtcctcgcctatacggtcggttggtcacaccaccgttgatgggcatcgtcatctacaccgccggcctgcctccgtcgccgccgactggtgtccccgcctacacggtcggttggtcacaccaccgttgatgggcatcgtcatctacaccgccggcctgcctccgtcgccaccgagtggtgcctccgcctacacggctggcctattatgccgccgctgttgggcgtctacaacttcaccgccggcctgcctccgtcgccgccgagtggtgcctccgcctacacggctggcctattatgccgccgctgttgggcgtctacgacttcaccgccggcctgcctccgtcgccgccgagtggtgcctccgcctacacggctggcctattatgcccctgctgtggggcgtctacgtcttcaccaccggcctgcctccgtcgccgccgactggtgcc

SEQ ID NO: 29212 - DNA, 1276 bp, Oryza sativa
tccgcctacacggctggcctattatgccacggttgttgggggtctacgacttcaccgccggcctgcctcagtcgccgccgactggtgtcctcgcctatacggttggttggtcacaccaccgttcatgggcgtctacgacttcaccgccggcctgcctccgtcgccgccgactggtgtcctcgcctatacggttggttggtcacaccaccgttcatgggcgtctacgacttcaccgccggcctgcctccgtcgccgccgactggtgcctccgcctacacggctggcctattatgccgccgctgttgggcgtctacgacttcaccgccggcctgcctccgtcgccgccgactggtgcctccgcctacacggctggcctattatgccgccgctgttattatgccgccgttgttggatgtctacgtcctcaccgttggctcaccttcgttgccgtcgactggtgtttccgcttacacggctgacctattatgccgccattagtgggcatcttcgctttcaccgtcgaccgccttcgtcgccgccgactggtgtcttcattgttattgatggacgactttgttcccacattggccacttctgccatcaccaaggggaatattacaaagctaagtcatcatttattttattctttatatgatatttttccttttcctctgcctcactacaccaattggtcttccgttgagtagtgagtcgggggctacagatgttatatcatattttttataatatttatcttgattgcttgcgacataatctgagtacaaaagtacctatcgagttatggagttctatcttcctatgctttccgtttggtttgccaatggatggttgcctttgggccgattcctagcacccgggggctcgttggatggaccgagtaacgcaaggtgctaagtattattcggaataaatcaaaagcatagagataagataatttattttctgctcttaataattgcaaaagtacccgagtagtaaactccgatccgtgaaactttgttccattaatgacgaactcatgtcactcatatgcatgtttgggaagtgcttaggccgactcccagtgcttggtggctatgactagtcgggcagagtgtttaaacgtacagagtcatctgctcggggaaatcaaaattgacaagaggagaaatacatatttataaatattttaaaatacttgattttttctcgagtattatatttatatcagatactactcatcctatatgtttgttctgcaggatccagatccaga

SEQ ID NO: 29213 - DNA, 595 bp, Oryza sativa
aagttttgagccatttaaatgaatttctataattaaactcgatgtattgcgcaattattaattatttttacaaaggaaaaaggatctcgctgacgtcagcaaggggcagccggcgccgacacgcgggccccacacgtcagcgggtcaaggagctcggtgcaccgtggaccgggaccacaaggacggtccaccgccggtccacgggatggacggcccagatcgggccaagccgatcgggcagctgaggggagtggtggcagggcacgggcacagccagggctggcccgaccgaccacagagggcggcggcgcgcagacggccggacaaccggcggcggcggcggcgcaacgcggcgctggcacgggaggcggccggcaaagaggaaaaggaggagggaggcggctcaccgagaggcgcggcgacggagggagcgtccgcggagggaggcggcggcgctccttgggtcgacgacgcggagggacgcacggcggtggatggcgagggcgaggagccagacgaggtgcaacacacgccgacgaagccgacaaaggtgacggcaagcggcgaccgcggctatggcggtgatgattgccgg

SEQ ID NO: 29214 - DNA, 507 bp, Oryza sativa
catcaaacttcttgtcctgatactcctccacaaaatggagtagctgagaggaaaaaccgtcatcttttggagacagctcgatcattgatgtatactatgaatgtacctaaattcttgtggagtgaggcagtaatgacagcaacttatcttatcaaccgcacaccatcaaggatactcggaatgaagacaccatgtgagatgatatttggaaagaataaatttggtgttccaccaaaagtgtttggttgcacttgttttgttagagatcatagaccttccattggaaaacttgatcctcgggctgtcaaatgcatctttgtaggctattcatcttgccagaaggggtataagtgttggagtccattagaacgacgaacctttgtaagtatggatgttacttttagagaatatgtcccattctatggtgagaagacagatttaagttctttattcattgatcttgatgattcaactagtggttatgatggtcaacaaatggaaggtgaa

SEQ ID NO: 29215 - DNA, 597 bp, Oryza sativa
cagtccagccagtcctcatctgtcgccccttgccgattgcctcagcaaccagcaggagaatgctcgacgcatatgcctcccaactcgcgtgtggtcgcgtcgttgtcggccggctcatcacgccgaccgcgtccatcggcggcggcggcgcctccaccgctcgcgccgctcctccgccttcaacgcagccgccgtcgcaagtgcaggagaagccaccgccggatgccgccatcttcgaggggatgccgacgcgagtcgcggtggcgagacgcaagcggcccttacgcgttcgtgggcgcggcgggagaacggcggaggcgggtgcgtcgtggccggcagagagggcgtggagcatagaggtggatagtacagtcacggggctgagggtggcgaggacgcggccattctcgtggcccgttttcttccttccgacagccaaccttccacggcagtctcatatctccgccgccgccgctccggacctcacccgcacgccgctgtaaccagtccaatgccactcccatgtctagacgccgatggccaccgtcccacactcgcggagagaaagagagaggggaggatatgatttatgtgggc

SEQ ID NO: 29216 - DNA, 686 bp, Oryza sativa
tcataccctccccgcctcgatcgcagccccgcgatgacgggcctcgtagtacgcctccaaggctgggtaagtcggcggttgtccctcctcggccatcctacatgaaaaagtaataaattcaccgttagttaccaatgtgacatatattaaaagaaaatgaatgcgagaacatgagtaggaaaacaaaatatttacctccctaacacttaaattttttttggacttcttcttttttggacgcttaggacacttagttttcttgtgaccctcctggtgacacaacgagcatctattttgcaccggcgcagcatcaagttgaacgcatgaaggtggtttccttccaaaaccacccagacctgagtccatttcgttcttgaatcgtttcgatctcctcttccctcttgttttaatcttcaaatttgggtcagcaacaaattcttcaccatcgtacgatggccactgtgtggggtcgaggtatggctcaaagcgacttgcccatgtgttcacaacggctcttgaagagaactgatacgggattcggttgggagattccttatcaattgcatgaatcagataaacgtgtataagatgtgagcaaggcatatggtagagcaatggcctttggcaagaacatgagttcccctcaccttcaactttgaaggctcttgcgccggatctaacaccac

SEQ ID NO: 29217 - DNA, 649 bp, Oryza sativa
gttttcacatttaacagtgtacctcctatttgcggcagaattgacaacacggtatggacgatggtgcacgatggcgtactcctggagccatagcttcaatgcgaccatggatgggaactctaaaccctttctgagaccatccaactggaatggttctggcaactgatctaggttgatgccgccatctactagtgcaccatgggcatgtgttaggtccctaaactcaggaatgtccggcttcctcccaaacaccttctcaaacgcacgacattcctctaatgctaacttgtcattattagtaagtggagggaatggacggtcatcatcagagtcttcagcaaattcaacatcatattgctcaacacttgcctcctcgtcaacatcatctctattgacttctactgagacagaatcgtgaccaccactcaattcgacataaaagtaatcatctggattcacatattggcctgctacttctgtcgggtattcagggttgactccgtacgacgaccaatgaacactcgccgacaaatgttcacttagatcaagcccctcttgtactaactcccttttcatcaccctcgctgcatccacatcatcagtaccgcaatgtctctttgatggtcctgcctcccataaatcatttcca

SEQ ID NO: 29218 - DNA, 1566 bp, Oryza sativa
gagggcatgcacacgtagaggacgacgaggcgaacccaacggtactcaccacaacgacaatcgacgtccgacgacggccggcgacgagaggaggcggcggcggcttggaccttaccgacgacggcgagctacggcggccggcggcgaagaaggacgggcggccgggcttctccaccccttggcgcacctcttggcgacggcggcaagcggcggcgacggcagaagcggcgcggcggcgcggctgcactcggccggcggcggcgacgaactaaacgcgcgcggcgacgaggctacgaggcactagagagctcgggagagggggcaaacgaaagaggaggactagggggtcctatttatagccttggaagctcgggtccgggcccaaaacgacgggaaaaactcgggaaagtttatcttcgccggaaaaaggaaaggatttgatccgcgaaattggaaaggatttccatataaaattttggggatttcttggggaaaaggaagaggagaataagaggaatatttcccctcaactaatttggaaggaggagcaatgaggaggtccggatttggtggaagaaggcggcactgtgcacaggctcggctggctcgggatctgtccagagctgtaagatgaacagtgccagggaggcaaactagacttttttcggttggatgagaacagaacagagcacttgaattggagtaggcttgggctgtacagtatgcgcgcaagggagagagaagaggaaggaatgggctgaaaatggcccaagtggaggaggaggatttttattaatttcccgattaaaataatcagttaaatgatctttgaattattaaaaatacttccaatgctcaaataatttcaagaagaatcatgaaaatacttggacactcaaagtacttaacaaaattacaattagaccatttaatgattaatttaatatgtggttaattactgaaatgctcttgtatgattaaaaattaggaattgagctccgaaaaatccgagaaaactccagagagtataattaaccatggagaatttaataaaaattaaatccatccatgctttatatttaggaaattttatttcccacatttaacttcactagtaaattaatgaacgtttaatataaattctattaataatttattaaataatttataaatcctgaaacgaaaatcaggatgtgacaaatctaccccccttacaaagaatctcatcccgagattcggaacggctagaaagaaaaaggcataggtaaactacagtctatcttttattccacaactccaataattattctaaggttttaaagaaagctactgctgctttggaactgatggctgagctgtatcccttgagacgcaaccggcactgcatttgctcctgtgaggacaatgttgttgacttggccttgtggctgttgacgcttcggcttcggacactcttttacgaagtgacctggctcataacaattgaaacacacccgatgctcccttccattactgttatcttcttgagactgatcctgctgaaatgacactgattgagtagcttgc

SEQ ID NO: 29219 - DNA, 3349 bp, Oryza sativa
gggattagtttaaaccaggctgctggtgaagaacaagaggtagcagtggagaaaaccactaagaaactagaggatattcctatagtcagagagtatccagaggtttttccggatgatctgacaacaatgccaccaaaaagggatatcgagttccggatagacttgtaactggaactgcaccgatccacaagaggccttacagaatgggagccagcgagttggcggaagtcaagaagcaagtcgatgaacagttacagaagggatacatccgtccgagcacgtcgccttggggtgctccggttatctttgtggagaagaaagacaaaaccaagaggatgtgcgttgactaccgcgcactcaatgaggtcactattaagaacaagtaccctttgccaaggattgatgatctgttcgatcagctgaaaggagctactgtgttctctaagatagacctgcgatcaggttatcaccagttgaggatccgcgaagaggatattccaaagacagcattcatcactcggtacgggttgttcgaatgcacagttatgtctttcggactcactaatgcacctgccttcttcatgaatttgatgaacaaggtgtttatggaatttctagacaagtttgttgtggttttcatcgatgacatacttatctactccaagtccgaggaagaacatgagcagcatcttcggctggtacttgaaagttaaaagagcaccagctatatgccaagttcagcaagtgcgacttctggcttaagaaagttcagtttctcggtcacatcgtgaatgctcaaggagtagctgtggatccagcaaatgtggagtcagttaccaaatggaccccaccaaggacagtcactcaggttcggagtttcttaggacttgcgggttattaccgccggttcattgagaacttctctaaaattgctaagccaatgacacagctattgaagaaggaagaaaagtttatctggtctgctgaatgcaataggagttttgaagaactcaaacgacggttggtgtctgcaccagtcttaatcctgcctgatcagacgaaagatttccaggtctattgtgatgcatctcgccaggggctaggatgtgtgttgatgcaggatggcaaagtggtttcttatgcttcacggcagttgcgtccccatgaaggcaactacccgacgcacgatctggaattggccgcagtcgttcatgctttaaagatttggcggcactatctcatcagtaaccgttgtgaggtatatacagatcacaaaagtctaaagtacatcttcacccaacctgatctgaatccccgacagcgaagatggttggagctaattaaagattatgatatgggaatacactatcatcccggcaaggctaatgtggtagcagatgccttgagcaggaagagttactgcaacgtcgcatgggtagaggaactatgctgtgaggtacaacgtgatttggaacatttgaaccttggtatagttgagcacggattcgtggctgccctagaggcacagcccacactggtggagcaagttcgcatagctcaagcaagtgatcctgaaatagcagagctcaaaaagaacatgagagttggaaaagcccgaggttttgttgaggatgaacaacgaacaatctggatgggagaaagattgtgtgtacccgaaaacaaggaattaaaagacctgatactaacccgaggctcatcaaactcaatattccattcatcccggcagtaccaagatgtaccaagaactcaaagaaaagttctggtgggtcagcatgagaagggaaaatagctgaattcgtagcactctgtgacgtctgtcaacgagtaaaggcagaacaccaaggccagcaggattgctacagccacttcagattccagaatggaagtgggaagaaatcggaatggatttcatcaccggtttgcacaggacgtcatcggggcatgattctatttgggtagtcgttgaccgactcaccaaagtggctcacttcattccggtgcacactacctactcagggaagaaattagcagaactctatctggcaagaattatgtgtttacatggtgtacctaagaagatcgtgtctgatcgaggaagccaattcacttcaaagttctggcagaaattacaagaagaattaggaacccggttgaatttcagcactgcttaccatccacaaacagatggccagactgagcgagtcaatcaaatactagaggatatgttgagagcatgtgcgcttgactttggtggagcatgggacaaaagcttaccgtatgctgagttctcgtacaacaacagttaccaagctagtctgcagatggcaccatttgaagcactgtatggacgaaggtgtcgtactccgctcttctgggatcagacaggggaacgccagttgtttggtacagaagttttaaatgaggcagaagagaaagtcagagctgtcagggaaagattgagaatcgcgcagtctcggcagaaaagctatgcagacaaccgccgaagggagctcgctttcgaaacaggggattatgtgtatcttcgtgtcactccgctcagaggagtacaccgtttccaaaccaaagggaagttggcaccacgctttgtgggaccatacaggatcttggaacgtagaggtgaagttgcttaccagctcgagcttccctccaacatgcttggcatccacaacgtgttccacgtctctcagttgaagaaatgtttgagagttcctgaggaacaggcaatttccggatcaaatcataatccaggaagacttgacgtatatggagaagccgactcgtatcctcgaaaccagcgagagaaggaccagaaacaaagtaataagattctgcaaggttcagtggagccaccactcagaggaagaggccacttgggaaagagaagatgagttgaaggcccccacccgcacctcttcgccagctcttccgaatctcggggtcgagattccgtttaaggggggtaggtttgtcacgccctgaagttttcccccctttgcttgctttaaaaattggttaaataaatcgtccgaagaaattatcttaattaacctagagctaattccctaattaataaatgcaaataataatcggaatcggcatgtggaatttttcttggattctacatgtcaaataatgctaacaggatttttagtggaattttcagagccttggaaataatttttaccaattaaaaatcaccaaagtgcaatttttaatcccaggaaaatcctttcttctttttgtttttccttattcctcctttttcctcttcttgggccgtcggcccagtccacccgtcgcccgcgct

SEQ ID NO: 29220 - DNA, 591 bp, Oryza sativa
tttcatttcttcatgttttactgcttagtttacatgtatagatttaatgatgcgttaatgctagtatacatctgcaatgtcatgatttatttatggaatatattaaatcattatatgtctataatctcaacaatccaaaaaccttattataggcactgtgattttacaatggctggtttgccaatgcactgaggccggataaattcaccggtgtgcattttaagagatggcagatcaggatcactctgtggctgacagctatgaaatgcttctgggtgagtactggcaagcctatggaagttcttaatgctgaccagcagaaagaattcgacgaggccactactctcttcgtgggatgcattcttagcgttcttggcgatcgtctggtcgaggtgtatatacatatgaccgacgctaaggagttgtgggatgcactgattgctaaattcggtgctactgatgctagcaataatctgtacatcatggagctgtttcatgactacaagatggctgataaccgttctgtagttgagcaggcccatgtaatacagaccatggctaagaaactcgagcaggcccatgtaatttgtg

SEQ ID NO: 29221 - DNA, 11735 bp, Oryza sativa
gttgagttcaaatgtatttaatatcggtagaaccataaatagacgtcctattaattactccttggtaaatgtcattacgttcaaaacgacaaaaaatatagaactggagggagtatatgttcgaattcatagttaaaaattggttttttctggaacggaatggctttggaagtgctaactagcggctcaccctgttccttgcaagtagtagcatcctgcgggtgtaaatatgtctcacaagtcacaaaagatttcccggcgacggtaaacggtggggcgcttataagttataacgtcctgggaactatagacaatagatatagatcatgctagttatatatactaggtgaaataaaccgagtacatgacatggttagaaaccacagtaacctattagcttctttttagagcacatggaatagccagtatattttcatagggctagcttttctaataaggtggcttgttgtcttgttgagtgattttacctggttcctttttctttatcacaccctgtgcttgatatgcacaatgttcagagccccacaggacacaaagtgtctgaaaccatttgctcctgagatgtcctacaagtgtatggaagccagtagcgacacgtttctaatgttgaatcggtgatagataaagggttccattatattattactttgacccaatagtttatttaataattttagctcaactggggaatacaagtcacgtaaccttggatatttaaggaacccatatatatatatatatatatatatatatatatatatatatatatatatatatatatacacatacatttgccctatgctccctatcatattccggtcgcttctaatcaattggtctgccttgccaggaaccttcggataagtcccaactggcagcattgcaaacgaacaaacttgtcaattagcaactgaacagttgaacagtatttaaattgatggaggatagcacatctccttgagagtaaagaacggcagccagggaatactaggccaccagacagagaatactagggacctaatcaagaggaattttaattctttccctatttgggataattttctagaacatagtttctgcaggaagaaaaaagggttctgagacacatgatacctttgactttgtcttgtcacatatccttctattattgttacctgtgaggcagttgagtccttagctcataaactaagttttgcttgtctaagaccagcctctgaacatagtgatagcctgacagtgatttccatgaaaccgactctgaaccaaccactgcacttgtaaaaagtttgcctttttaccagagactggaggattcatagtagcaaacaaagtagaagcaaggtgaaggtcaccttacctatactttcctcctgattttcagcaggaaaaaaagggcaagaaagactgagagcagcagaagaggaagatgatgatgaccgaggtcgccaatcacagcaaaaggaaccacaatgaaagctacttcaccgggaaagcagcagtcaccagcagctcggaggagtttgggagcatgacatccaagaagccgaggaacacaagcccgagagacgctcccgtctccccgaaggtatgttgctcaagtctaattttcacacgtctttcctgttctttcatttttcttgtgtgttgttctgactgaggtttctttgtttgcaaattgcaattgatcaggagaagaaggataagattggtgagagagtggctgcactgcaacaactagtgtcaccatttgggaaggtatttactatacatttctgcacttgcttcctgtcttctctcatctttgtgaatcaaactcatgttataaaacttagaagcctgagctcatctggttatgcaaactctctcgctttgtgcagacggacactgcttctgttcttcaggaggcctcagggtacatcaagtttcttcaccagcagctcgaggtacttgttctcgatcaccgcacactcatttctgtgatctttaagcctgcttacctttcgttttctgtgactcaactgaaacattttgcaggttcttagctccccttacatgcgtgctcctccggtgcctggcgctgcgcctgaggtcagctacagctacctacatccttctacctaagtcatcatatatactctgaaagtttaacgaaaattcgaaatgttaaattttggctagaaaaaggaaaactttgtagtaatctttgtatgtaacaagcatgtcaattgctgtgatccaggatcccgaccactacagcctgaggaaccgtggcctctgcctggttccagtggaccagacgctgcagctgacgcagagcaacggcgccgacctgtgggcgccggcgaacacgaccaggcgcaggtgaacggaggaaccggcctggaggctcgggggtctaagaggcctagaggaggaggggagcacttttgtctgggggcggtgtagagttccaacttccaagtgtctgacccgattcatcaaatctcctaacaaagcaaaaactaataagcaaaccgtgtttcactctcgtcggatctcttgcctgtaatatagtagtagctgcaaccctgcctgcaggtcggtgtgagaccgtgagagtgtgctactgatgagtctgtgttagcgccggacatatgtgtgtaatcatcatacatagcgaggtgatagtactagactacctgatgtgcccatatgtgatatgtaactatgtgtctcttcagtaacatgatagtagcagcatgttgctgctagcaaccaagttcaatgtgattgagtacatcagccctgctgtagtttttgtaagaagtgctcagtttctgctagaagcaagaaaaactcctgcatcctggagctaagcagtagcacagatgaagcaaaaaacggcatgagctttataggtgggccaaatctaagcccacaataggcgagcccatcttggttgggcttaccatgagaaggtgtgggcagtttgggctttgccttgggctactagcagttctcaacttttttaatgggagcagcagtatatatccagtaggtgagctgttcaattaggctgttcaactggggggaggctaatgggcgggcgatcgtccagcgatcggtttgtccccctccccctatactcctcccttttctcccccttcctcctcccctttttctttttctactacagtacaccatacaattttttttaaaacaaaagttagaaaaatttatgtatagaaatactatttataaaaaatttgaattcaaattcaaatttgaatcgggtatgtaaacttttgacttataaactttggatctataaactttaggtgtatagaaatactatatatagaaaatatttgaattcaaattcaaatttgaatcagataataattcaaattcaaatttgaatcgggtatgtaaactttgacttataaactttggatctattaactttagatgtataaacttttgtataaaaatactatatatagaaaatatttgaattcaaatttaaatttgaatcggatatataaacttttggtctctaaattttaaatgtgtaaacttgaggtgtataaactttaggtgtataaatttactaaaatagaaaaataatgcggtgtcaaaaaagaaaaccagtggaggggggaggggatggatcgctgccccatccccagagtgatcgatcgccgaacagcattttcgtgttcaactggctcttagcacgtttgtgtttggggcaattttggtacgggtgcactgtgttgtgcccaatttaatggaggcgggccatgcgttatgtttatggcctctgtactgttgttgtaggggcgtgaagcaagcaacggaggccacaattttgatcagctgggccccgggtaacagcgactgttcacaattttgagtcatggaagctcctggcagaaacgcactgattatgcatttatgattgttttttcgttatatttttcggctctatcatggttcctgatggccgtccatcatgaatctatatagattttgagctgagaggctcaaaacttgaagttctaaggtggggcaaggtgaattatttgagaacaatctcgacagaatttggtgtgttatcattgtgtttttcaactccacttaatcgaataatggttgcagagctgtcattcttccttccataaaaaatgtttgaaagtagaaacagtactctcatttttccatggctctcgacttgttgggtccaaaatccaaattacgttacagcctgttccgactggggcactggacgtttgcgagtcatgcgagacgtacagcgtctgaaccgtcagcttctgttcatcaatgcggcaagaatggtaggctggtggccatgccaacttgcccaccacagagaaagttccccccgtaatatcggtccggtcccacaaaaccaacccccgtgttggtgtttagattgacgggcataaagttttaacttgtcacatcagatattatataaggtgtcacgtaggtatttgtcactaataaaaaactattatagaatccattagtaaaaccgcgagataaatttattaaacctaattaatttgtcattagtaaatatttattatagcactacattgtcaaatcatggagcaattaggcttaaaaattcgtctcgcaaattagtcataatttgtgcaattaattattttttagcctaatttaatatttcatacaaatgttctagcattcgatgtggcagggtataaaatttttttttgcgcgggaccaagacaggacctaagataattcaaccccagtgtgagtcaacagtacacacgagaacggagggttatgactcacgaggcgatgaacctggcctccctccttcgctgtacacctgccattctggagggggcagcattgccagcatccattcgccttgcctgtccacgttctgttgtgatgctagtatgctactacccctctgcacaagcgtagtacatctacatgtggcagcgacgtctcaggtcggcctcctctctggctggctctccttggcgtcgtaaaatatcgcggtgccgaagtgtggctggcgtgcgatctttgctgcaaaggagacgcgtgtgcatgcgagctcagggcgacagtgcgagttcgtcgtgaaatatcggtgttcgatacttccagtactccatcacccgcgcaccgcgcgcgccaccggagaagtgcgctccacgacaagatacatgcgcgctaatcccgtactgtatgtggactatggtgctttcgtacaggcatatgacgagatgcaaattaggcagcgccattaatgatcagtagtcttttctgacgcaagttctgtggaggtgagaggtgatcaatagtcgtgctatctattagtgctcgtacctgctaaccagataatattccgtgcaattcgacgtggagctagaattttaaactaaaccaaaattaacacatacgacaaaattttttttttgttagaataaataggctagacccaatttttctattaaaatctcaagggccataaaaaatgttaaatataataataccactctgggaattaaaagtggagtatctcaacttaaatagggagttattggaggctcttgttgacaggttgaggtggggatcggaaagccacacgcgcgcgctctgtgtctctctctcgagatccttttgcaacggttaagaattcgtaacgggcaagatctctcacgcattcttcccatcgctggtagagacctccgattagatctctcacacattcttcccactcgagatccttttacaacggttaagaattcgtaacgggcaagatctctcacgcattcttcccactcgagatccttttgcaacggttaagaattcgtaacgggcaagatctctcacgcattcttcccatcgctggtagagacctccgatcagatctctcttccattgtgtgcctgtgttgtttctgttctccccggttctgatcacttgagcgcacgagtgattgggacgagcagggcctccgaaaccacaccttcgcgcacgagtgattgggatgagcagggcctccgaaaccacaccttcgcctgagatctgcaccaggtaggcaagtgatcaggtttttggggagtgctaccgtatgactgctcctctttcttcctcattgtcgttctgttcgatctgcatcgcgatgtctactggtggcggcgtcaacggaggagcaccaggagcaagagacgcaccgatcgacaacaccaacggaggcaattttgccttacaatccagcggagggacttttacagggtataatatccttctgctacctttgattttgttacatctgtcagtcgcaatgttattgcgttgtctcaatgatgttgatgcttattttatcttaagcatgctcctagttatgtttagttttatcactagatcaccacacattgttcatgtcatgtttattgtcttaatattttggattaaaatatgccgatatatgaccatatttccaacaattttgactacttatacaccgccgctgccaccacccctacctccttccctcctccgcctcgccgctgtccgagcaggctgccgggaatcacaaggacagcggtggcagggtcttcctttttttttcctaaggccacgggggtcggagcccatgatctcgactgggtccagggcagcgacggccatagtagagtggcactgggctggagctgactgcgggcgggggagagtagagtggccacgtcgatagcgagatggtgttgaccggggcaacgacggcgcgacgccaccagatctggcatcccttgctagatccagccccttctcgtccgaatccggcctcatcggtgcgagaggccggctcccgagttggtggcggtgatcaagtaacggggtgcgtgtaggtaacagggtgaggtaggaagggcgcggcagcgggcacgcccatgtgatgccggaggcgggaggaaggtggatgcggcggcggggatgggaggaagaagggcgccaactgggagcagagcatcttctctgctgatggagtggctactcccagctgagggctggcgccgcacaaaggcatttggccaacgggggtaggcccgcgcaacgcgagaggagacacgcccgacgacgacgagaatgtgggaggccgacgtgatgagcgagcggcggcggcgggaatgtgggagaacggcagggaggttacccctgttgatggtgtgggaggtcgatgctgtggcggcaggaaggctagggacatcatgcgtgccacgtttcacgtgaaggcacgcgaaggctggtcgctgggggagggctagtacaatggtatccatgtgttgacggaggttgtccggtggtagagcatggagcgttagctgtggatcgacagggggtgagtagcaggtgtaaaacctagctcggccttgttgtgcaaacaacgacgacattttgggcttcgttttccctattgggggcactgtcgagccatccctctctctctagtggggctgtcgggtgaaagccctatcttgatcctccgagacctcgacggacagcaacgtcggtgcctatcatcgctgttttccctgaagatatcgtctacgaggcccctttgccaaagcccaactccacccccgtagtacaattttgggtagcaactttgctaattccactccagaaaatagagaatacgtatcgtttggcacgactcaagctctagaagtttaaagttagagctagctgtgccaaacggacccttaaactggtttaccacgtatcgtaaagatgctaatagtaattttatcccaaagaacatatcaaattcttcatatgggctagacagcaagagggttgagatactggcggtacaagcttaggaaatgggcggactctaaggtagacattgggacaactcccatctcacactatttgaggccgttttcattttcgctacttttcattttcaaagaaaatcttttgaacctgtttcagattccaatctaacattgtctatttcccatcatcgagatcgattgcaaactatccaaaccgttttcactgcagagtgagttttcaacgcaccctctttacaaaagcggctgtgttactgtttatagtcttgcaactgtacgcactacgcacacgactttcctccgcacgggcgattgcacagccagtacgtacaaccccatccaaagtgaagcgaaaaatcgcctcgtatcacatgcagtgcgcgttctcgttctcacgctacttgcaggttgcaagtggccagagtttcctcgtcgtccaataccccggagatttttccatcttccgcgggccccgccgagctcccgtccaccactcgctcgctcgaaagaccaaatcaatttccgctcgcctcgcgctgcatcgccagagaatccgtaggagatacagatactcccccggtgctaccacggcccgatcgctgtagccgccaagaaaaaccggaaggcctccgtctcgtctccatcacacaaaccggcgcgcggccccacacccccccaaccgtgcgcccgtgcagcctagccatccggtgtccggtcgggcgtgacgcacgttgcgccttttatacgcgccagtcacgccgccgctcgttccgtttcactcatccgccgctgagctctatctatctactagttagtttagtcgtctcgagggtaaattgagctttgtgtgcggttttgaggggagtacatcggcatgaggatccagtgcaacgcgtgcgaggccgcggcggccacggtggtgtgctgcgcggacgaggcggcgctgtgcgcgcgctgcgacgtcgagatccacgccgccaacaagctcgccagcaagcaccagcgcctcccgctcgacgccgcgctccccgccgccctcccgcgctgcgacgtctgccaggtaacgtactcctacgcgcgcgtgtagtagcaatagcagagtagagaagctgcagcagcatgtggctgggagagtggagacgtgtcgctgaggcactggtcgtacgtgttgtcgtcgttgttgctgcaggagaaggcggcgttcatcttctgcgtggaggacagggcgctcttctgccgggactgcgacgagcccatccacgtcccggggacgctctccggcaaccaccagcgctacctcaccaccggcatccgcgtcgggttcagctccgtctgtagcgccaacgccgaccacctcccgccgccagcgcccaaggggaactccaagccgccggcaagcggcatcgctgctgctgctgctcccaagccggccgtgtccgcggcggcgcaggaggtgccgtcgtcaccgttcttgccgccgtcgggctgggccgtcgaggatctcctgcagctctccgactacgagtccagcgacaaggcaaggacctaactaacaaaaccattcttgataacaagattagcttagaaatcaagaattgccttacttgaccgtgtgtgtgcttgctgttgcagaagggctctcctattgggttcaaggatctggagtggctcgatgacatcgacctgttccatgtccagtcgccggccaagggaggcagcacggcggcggaggtgcctgagctcttcgcctcgccgcagccagcgagcaacatggggctctacaaggcgagcggtgcacgccaaagcaagaagccacgggtggagatacccgatgacgacgaggacttcttcatcgttcctgatcttggatgagatgttgttatgtaacagtaatgctatgcaagtgatgtaattttgtatgtatgcaaagaacactgccatctcggttgtactaagtgtgctaagtacatcttactgtgggcgtatgtaattgtaagacaatttgggcccaatacttatcagcatggtgttgggcatgaactatgatgtactatgacatgacgaaagtttgcttgcagcgtgtgttctgttcgtagattattgttgcatatgttctgttcatagaatttttctgtcagatgcttaccagtgatgtggagaatatcattcataatacttaataactacctgggcgtcctaagatagatgaaaacactgagcagtaccgacttaaaattggaacatgacccctaattgaatatgaatagtagaacacaatattcgttcaggagacctgaaaatttcatccttacattccttggctccgggaacaggttacagcgaacatatctgtgatctatgactatgaactgaaacctttggtaaatatgaggctcaaaatagagttagaagatcaacacaacagacctgaacattccttggctcggtgcaattattttatccaggaacaggttacagcgagcatatctgcgatccatgactatgaactgaaacctctggtaaacatgaggctagactagatcaacaaaacagacatgcacggttgaacttgatgaagtgaaaaaacaaaggatcatcactggcccacaatgcagattacctcgccgtataccatttactgaaaaccaccacactttcttataaatcataacatggctaccctaaacaactgagaaacggaatggtgtttcagggaacatgagagcaaacgccagaacctcccaaaccggttgcagtacttcaggttaaatagctcactaaatcccagcaagattatgaaataccaaatcctctccgctctcagcagcatctgtgaattaatacatgactttccactttgttaccgatatatctcagatcttctttcaagatgcttgtgctgcatataaatgctttttggcagtgcacattagatgtcgtgaacactgtgtacaaattcccaactgtcaccttttcttcagcaatgaactagctctcaagaagattttatcaatctcatcaagctcggatactttgagttctttagcagatgaatcggtcctatcagaaagggaagcaatctttcgtagatgctcttcgaaatcatctggttcattgtcattattttctgagggaaacttatccagcttatctagatacaacggttgctccttgctttcctgtacctgctcctcctctgagtccgtctcaaaaatgtcagagagatcctcggattcagagtatgtgatagactctgaagccgaatcagcactaacctcataattttcatcctctagccttccagacccttctatactttctgacaggagatcagatacacttctcttgcgaactgagcaagaagaatattctttcgcagatgtactgtttacactatctgaaatacaagtaatatcttccgctgcattctgtcctttataatctctagctaacttcatctgtgcatgaagatctacaagctcctgctcaagcctgggaatgtaccgcctaagagctcggaggcgttctctgtattttgatttatccagtgcctgattggaaattttaaaattataaatgatgagaagacacaacatgacaactgtttctactcgttttgcatagattatctgccctacactccacctgaataaagttgttgcatgtgtctttcaatcctaagtttagatcccaaatgagaacactatatggaaaacttactgaagcaccttccactaattaaaaggatttactggggctagtagttcttggaacatctgttactaatttggttttagccatttttccaccttgcttcatagttcatatcatatgctaaagatttcatatattaattattgc

SEQ ID NO: 29222 - DNA, 4961 bp, Oryza sativa
gctttttccagtgcaaatgcatgttcaggatcactccttgatatattccacgtcttcctacaggcacataatttttacttttttgacccatcttgaggaaatagaagtgctcttcaggtgtaagcacctcaggatcatgggtaggttctgatgggtcatccggttcaatcttcgtcaaagctgcaacaagtcgttcttccttgtttcgagccttttaagggccattgcaaaaggaaacaatgaaagaccaatatgttagaggagtgaagattccacaacagaaccataacaaaaacaagcaaatatactttcattgtaatgtgaacactggcacatagatattgttgcaatgcattgagtatagaaaagacaatcaaaatctaattagactcttcggcattgaaaattttcatcatgagactatactcatgaacataatgaatgatgattagcggtgtgtggctttgcttctctgatatgctagctttctgggtgggttttgcctgtgtatgacaatgttcttgttttgttttctatggtctgtgaccgtaagctggaaaacccagcaagaactacagtacttgttatgctttcttctaaagctgggcgtaatgccttccctctaaaaataactacttctgtccacaatgaagtttgggtatccttgtaattcccaacatggcatgacatggaaagcagtattaaaaaaatactcaaggtcaagttaaatttgagtagaagtaactctttttgcatgaaaaagaactcaaatcaaatatatgagctacaaaacatataaaggcaatggcaacagaatttactagcttcagtttgtacaaaatcttctcctccgcagtcatcctttgaaactcccttttcttcttccatctcagggatttcaaaaatcttgtcactgccctccttccttttaactttttcctctttgctttgggcctaccagattcatcaaccagcgcaacatcttcttgtttctgctgaggttctgctatggtatgattttgactattgactggtcggcttgtatggatacagcaatatatttgaaggttataactttgccacccactgaagaacccaacatctcggtgaaaaaccttgtgggaagtataactacaacagaatcagaactttgaaaaacaaaagagcatatagactcaaactgaaccacaatacgttaaaccccccaagtgtaaaaagcataatcatgagaacagtgaattgtgcaaatgttcccgttgcggcatttcatcaaacacttgacagtttcagcgagccactaaagtttcatcaaatacctgcaggccgacctacagcagcaatgattggaagcgcaaaactcaggtatccaaatcctcctacccctgatacgcacttaatacattcccatcgagaccgctgaatgtgaatcagagacagaggaaggggatcgatgggtgtttgttttcgtctcttacgatggtgagcaccgccgaggcgcgcgcagctcatggggaggcgccacgctggtagaaccgggggagggataaagcgcccgggacatcggccgccaccccttctccatcctccggagcaagagcacccggctgcccatggcccacgccacccgcgcggcgcagcgagagtcggagaaggcgcgcagccgacggggggggggcgaggagacccaccggcctccctcctcgggggtggtgcggtggcctcaggcacgccgtgccggcgtggacggccgagcaagtgcggcggagccgcggcgtgggagcagcctgcactgcagtcgcagggcgtctcgcgtcgtctcgcgtttacatgggctgctctacccactgggccgtacaaaaaccggctgtgcgcgagactaagtaggccgattaactgagccgcaggagttgggccctgatttgatcgagcaatggactctctcgccgtgtgagttgtcaagtggactatctcaactggattcaacttgatatgtcatttttcaaaaaaaaaaaaaaaaaacttgatatgtcattgactcattgtcaccatacgatgtccccacctgtgtttgccatttgccaagtagagagaggaccgaggaaagacggcgttggaatggctaagatagtagataccctcggtcgcacgtaacgaccaagtgaaaaacggaaaaaacctgtcgttcgtcgccgcgtgggtatctgcagcagcagtttcgtgttgacaattagacgaggaaaaattcctacccgagacaaaagggaaaaacggccaattaataagtcttgaccttgaacatgtagtaaacgaagaagctaacacccggacaaggtcatacaaccttgtaaatgcctcagctggattaggtcattatagccaactattgactccaaatcatttatagttaatttaatagctaattcatacaccaattacatatatacatataaacacaattatggtcccacctatcatatacacatgtatcttgtagtccgtgctacagctagctacaaatctgtagcctgctgctcttctctctcttttcttatcttctcgaaatatgtttacagctggcttataatttgctattatatctgctcttagaatcagccataacggtcttctcccattttaccccgcagtctcacagtcacacacaaaaaaagtccaacattagagacgacccaatcagaaagtaaaccgagctaggtagtggccgccggagtggtgtggaaagattattaaagtcagctcagctggcccgtttctagttcaaagtcaccgctgacaacacaaggtaattaaccatcggccgcgatatgccaatacgtagtacgccatcgatcagtaatgtggcgcaccatccaacggttgtaaaagccactctcgtagtctcgtcctcgcgcacgggctacggatgcgcggctcgatcgcttggcgcgcggcgctcccctacggccggggacgtcccgacgtgtacccccgtggcgcgtggaccgcgcgtaataagccccgtaaattaaacgcgcgatcgatcgaccacatgcgcatggccggcgccgcggccgcgggcatcgcgcggtcccctccccgtccggctccgtgcctcctgcgggtcgagagagaaatatacgggtgtgtcggccagccgcgcacgcacacgcacgggcggtgcggcggtgccccgtgcccgtatggtcgtatggccagtacgtggccgtccaccgcgagctgaggccacgtacgagaggggggtgtcgtactggcgtctggcgtcgtgtggtagccggacggctgcctctccagtcggtgtgctgttgttagagcaagttatagccaactactaactctaatttatttatagtagctcattcatacaatagttacatactacactattaatatctggtcccacttatcatacacacactgcatcttgaagtccatactacagctggctataaatctgtatgcttttctctcttgttatttatcttcttaaaatatattttcagctgacttatagcctactattttacctgctcttagttgttacatacagtacgcgcgcgctcgattgtcggcccaagcctctgacgctccaaagacgcatcgaaaacagttctgttgttaatccaaacgagttctgcctcaaggcaggttcgtaattatgatcggtttttgcgaaaaccgtatgttttttaaaccgtcagattccgatttgtaaaagccaatcgattttagttgattttgtttaagttgatgttaagttatatgttttatcggtttttgcttgggtttcgataaaatcaaaatgggtcagtttacatctaaaaatagaaattggtcttatcggttgtctcatattgtctaatggcttattagagaataaaaaataatttataggtaaaactctctctatatatattcttattttatagcgacttcaaaatttaggtttaaaaatttaaattttaactttggctttggtttattagggcaaccaatgagacttgtaaccattgatatcaaatcctgcttgaaagttggaaaattctgacaagcatctattgagtgatcaattggcgagaatataacatgtaaaagttggttttctcaacttcttccttctagtttgttttcttggaaatatggagtgtttaagaaacccggaaattttacagctgccagcagaagctcttcaaccagatcctaaacttatgatgaggagaaagattgggtgagccaacgctttagattcatctctcagctgcagtttatgttttgaagggacgattactataccagtactcctttgtcgtttaggaacaaactactgttcattggtcccgattctaagcactccaaacatgcaaatcgacaccaaaaatttgacaaaaggtacacaaataaggatgcactagaatcgacagagaacagtagaaaatgattttgagatgaacagagccagaagtgcagaatccggacctttcgtggactagcaagcaggggtacccatgcggccatgcatggagaggcagagcaggtgccaaaatgttcacctttacagttttacacgagaaaaaccctgaaaattcagggaaaaacagaatttcttaccaagaaattcttgtacacttagttaattagcaatcccatcaatcttaacgaacaaaccaagaaatttttggagcatacgtggggttacgtgatttccttgaagaaagccagtatctacacctgatctaccagtatgaagcagaagtgaagagatggacggatcagccgagggcggcgaacccgccgccgcgcatcatctggaggaactcgtggaagtcgacgcggccgtcgccgtcgcggtcgaccttgccgatcatgcgacggcactcctccgccgtgcggccctgcttcagccccagcgacgccagcacggcgccgagctcgtacaccgtgatgta

SEQ ID NO: 29223 - DNA, 15201 bp, Oryza sativa
cttccccagcgagtcctccagctcctcccgcgtgatccgcccgtcgccgttcctgtcgaacagctcgaacacgcgcgccagctccgcggcgtcggcctgctgctgctgcttcttcttgctccccgctcccgctcccgctcccggcggtgacatcttcttgggaggaggaggagacgctggcggctcaggcggcatggttgtcgtcgtcgtcgaagaagcctcgcaggtggaggcggcgccgcgcgcgactgggaggatggaggagaggttggcggggaggtaggagaggaggccgcgcgggaggagtgggaacttaacgaccggcgaggcgggcaccgtggggacctggcaactcatgaggtcgatcgctttgcttcgctgtggtgtggtgtggtggcgagcagatggccgcaacctttatcttcagctagcttccgccagtgaccatcaaccatggccgtatttatagctagctatacgacctttctcactctattagagcaagttaaatagtatagccaacgaccagctccaattcatctacagccaatctaatagctcatttatacaatagttatatactacagtattaatacttagtcctacctgtcatgcaaacacggtgtcttggagtccgtgctacagctggctacaaatttatagcctgctgtccttctctcttctcatttatctcattaaaatatgtttgtatctgacttataggctgctattgtacctactcttatacggagtactactacttttcttgctttttaacggaaggagagaatggacggacttgtacttcatgtcaagggagaccttttcttttttatttcgatctaacatgtcgaattgacttttgaataaagtaggtttgtgtaatagcattagggatagatatatcaaattgaacaaaatgaaaatgcatttgtttgaaaggatgctggattgctgggtagtggaaagccaggacggtagatgatccaaaaaaaaatcatgtacaaattaaaagagagggagggttcaaaggagaaattaggggacttggtggcacgttgaaattcattgacttcacctacaggaaacaattaattaagagaaagaagttatgcttacttgactatttccatagtgtaatttggtcaggttgtctatatatctattcagactcatactaaaaacatgccgtcacgtataagccatgaaatagaaagaaagaaaaagagtggggaatgcactcacaaatagtccaattagaaagaatagttaatttacactcgatttatttaaaaatggacatcttgtcacgtctggtgctcaaaaaaattttaaaccctgcaaaacgtacttgtattaaggagtatgtaaaaaactttacatgtaaatagtgaggattgtctacggtactgctaatgtagtagtagaccctatgctgcagaagatgtgcatcggcttacaaagcctcgtaaagaacaaaagaagaagcaagaaaacagctccaaaatgaaaagcaaacataatttctgagctcttgccgtcgtattcattccgttcttaaatactacatccgtctcaacctcgtaattgcataggtagaaataagatcttttatgagtactctactaataagtttattataaactttaaccgcttatttgttaaacagttttgtaaaaatatgtttatattttgaagtgtgtagcgtcgataataagtggcgaatctcgaatataaattgaggtggggctacagtaaaaatatcaaatgactaaagcaacttagtttttatcaactcaatattgtttctaagaaacctatatgcatgtaatgaaaagaaacatattacttaacagataacaaaatctatgaccaaattatgaccaaattggggtgtatggtgtacttatttccatatttgtaactcttggcaagcatgaaggaggtgtttagattcaggggtgtaaagttttaacgtgtcacatcgagtattatatagggtgtcgcatggggtgttcgaacactaataaaaaaactaattacaatatccgtcggtaaaccgcgagacgaatttattaagcctaattaatctgtcattaacacatgtttactgtagcatcatattgtcaaatcatgaatcaattatgcttaaaagatttgtctcgcaaagtagtcgcaatctgtgcaattcttatttttttaacttatatttaatacttcaagtaggtgtttaaacattcgatgtgatatggtgcaaaaattttagggtgacatctaaacaggcacgaagtcattagtagccaaccaacccgatctgccactgtcgataatataagcatacaattttcgtcgattatgatataatcattcaaaagtaacttgtgtataaaatgaaatggttatagttaacagtgtcggttattcgagaccgaacggaatacttcctccttcctattgaataagacgcgcacacattttaatacttcctccatcctaaaatatttaactccatcctaaaatatttaacgctgttgactttttaaaaaatatttgaccgttcgtcttattaaaaaattttaagtaattattaattctttttctatcatttgatttattgttaaatatactttatgtatagatatagttttacatatttcacaaaagtttttgaataagacgaacggtcaaacatgtttaaaaaagtcaacggcgtcaaacatttagggaaggagagagtattcaactttttaaatatttaaccaataattattttattataaaataaattttatgcaatgaaaataaatatcattggtttgatatttgaatttaattttatatggttatgatttttttggctacaaacataaggggttttttaagttggcaaaaatttttgtccatgcatgtgacatcggatatacagactattaaacgtagtttaataacaaaaaaaaaattacagattccgccagaaaactgcgagacgaatttatgaagcctaattaatccatcattagcaaatgtttactgtagcaccacattgttaaatcatggcgcaactaggcttaaaagatttgtctcgtaatttcctggcgaaatgtgtaattatttttttctacatttaatactctatgtatgtgttcaaatatccgatgtgacagcttgaaaaatttcgtttgggaactaaacatgtcctaagtacatgaaaaatttaagtccaaatttaatttagtgagatgtagcaggagtatatattttggccttgtttagttcccatttcccaaaaacttttttccaaaaacatcacatccaatcttttgacacatgtacagagaattaaatatagataaatttaaaaactaattacatagttagaggggaaatcgcttgacgaatcttttaagtctaattagtccattattagtcataaaatgctacagtaacccacatgtggtaatgacggattaattaggctcaaaatattcgtctcgcggtttccatacgagttatgaaattagttttttcattcgtgtctgaaaactccttccaacattcagtcaaacgttcgatgtaacacctaaaaattttcttttcacgaaacgggccctttacgttgatgtaagtgaggccgtgttaagttccccaaattcccaattttccatcacatcacatcacatcaaaaactttactacacatataaactaccaactttctcctaacttcttaatttttccaccatctaaatacagcctgagaatcataaagatactgatggaaaaggtggcccctcaccatcatgtcgcacgcgacgcgtttttgcaggtagttggtttgcactctttaaatccaagctactactaggaggatatagtacagcgaaagaaaaaagcaaagaaaacaataggtcaactgaaaccgcgtggagcatcggcagctaaaaactttcatgggaccgttggatccggatctcggtcgtcgatcgtcgctggcaatccagccgtccggtccggcatcgacggccgtcggcacgacaggtgtgcgcgaatgcacaggtagctgcacgtgggggccgcacgtgccgacaggcttgaaatttcaggacagagatgcagtgcagcttgagctccaccggattgcagctcatttgtggaaatgtggcatggcattattgggacgacttgaattgaaaaccgtggcactcagagactcaactggaactgagctgtggtgtacgtgcatggattgggtagattaatccccgtgctaagaatctctgggacatcttggattagagaagagggcaattgattccctcttgaatgccagttcatgtgcacaatgcaggacaggagtaaagaagagacaatgccagcttaaatcaatgtgttgtcaagaggtttgacaaaaaaaagttcaaactgaagtgaccaccgtgctggcctttgctagtttactgcaacatgacaattgacaacgttgaaatctttcacttcggtctagacaattaggtaatgctgcaatcataaaaggcagtgaaagacgatgaaatatgagtccttggacatgtgacaggaatactcttataaaacggaaacattgggcaccctggctcgctcatctgacaaacttacgaggaagcaaaattacaaatcccttgttttccgccagattgattgcctagttgcaaaattggcatcacctatctacaaaactcaacttttgtcctatacatgctagagaacatactgaactatgtagtatacatagcaggctttgttgataaaattgagaagcaaaattgaatatagcaaaactgggtgaatttgttgcgtagcggtttcgctaccaacagggggaaaaagctgtgcaggttaccaccgccgccgccgccaccaccaccgagagctgcacaggactacaggagcacctccacaagaggacagcccagattacatcaagccaccaatcgcctcactgccttgaaccttgaaccgaagccacggtgcgtaatcttggttcacagaagggcaaccaagactgcacaaagataaaaatcacatcacttttccgtatcacaaaaacaatcatgaaaaatgctggaacgattccacatgcttcatgcttgtacagactagagagtgagttttcacctggaagtttatatctatagctacctcaaatctaacttagttttataaagagaatgtaattccagaatccaaagagattctcaaggaagggagttaaagatttggcaagttttgattctttgccaaagcaaacctgaagtgaataaagagcaggctgccaatcagctccagattgtaggatttttgaattgtaaacatattgcatcagataagaactttacaagttcctctcttttaacttccttctccctttttgcatccagatgtcgaaccttaatagaaggaaaacacataaaattataaaaaagtttctgcataaaaggttgagcaaaattctaaaacagtaaagaacttatttagttttcctcaaataaaatggaccaatgaataccaaagacgttaagtttgtgtttatgtcggatgaattcattatcacacatggtacttcctgacaactcttttgaaataggaaacatgaattacataaatttatgttaaacaaccagtaatttaatcagtatcgacacaatataactcactgctgttcatatgaaaatacagttcaaattagtcctacattccaaaaacatgaaaatcattacttacttgaaagtacagctaagatacaagcagcacaatggtaaaccaaagttcaaatgctttaaaaaggtttgtactcactactcaatagcagagcattgctcaaataagtaaatgcatggcagtaaggtatgcacaagacatttccccgattttttaatctgttggtgagaattataacttcttgacagtgtaaagcacaaatgcacctgtaacacaacgttaatgtatttaccttcacaagttctgtttgtgagacacctgcttcagtgatgaacacaaggcatttgatgtcatgatcactggcatattcatattgttcctgaagacttggatcttcctgagggacaaattgggcctgataatagtaaactctcagtactgataaaaacagacttgtgtcacaaacccttgcaggtaaagacttctgcagcacctacctttatattagcttcccaaagttctgcaacaagttccatacgctcattcaaaagaccgccacctccctttgaacaaacaagaacactgatgctcggttcaatcctaaaagccacatatgttagcaagtaaaaaaaaaatcccatcgaacaattggagatggcgtaaagcatagggaagcaatttatttgttcacttggaggtaaccttgggaacccaatgtcagacgaaggactattaggaagaaatttctcaagtgcaatgctgacaccaacagcacccgggggtttggatttctgtgagggttatcaaatacaagtagttagatcacgtaggcaatcacagtagaaaatattgtcatatagtagtatatgactacctgactcatttaagaaacaagtagacttaagaatgtctaaatatttgatgacagcatagctatctaagtggtctttccatgttctgcctcaaggttttcctcagaaaacaaagaatgagatccaggggatggcatgataaaaaggcgtgcacacacaaaaatcctaacttctcctcatatggagatggccactccttttcactcctcttctgtaggatccaatctctctacttctcctgaaaaggcctataatcttattggaagtaaattatccatctctttatcaggacttcttattggaagtaaattatccatctctttatcaggacttcagtgaaaaagaacaatttgaaacatgtagaagcaccactaaattgctggtgaaaagactacactatagaacagctggatgtgaaccctcggccatggtcagagtgtacttagccaagtggtcatcgtaagcattcacttagtattattagaaccaaatctacatggacacgtataagtatacaggaagcatcaaatacaacttacatatgtcctatcccaagcttgctctatcaaccaatcatatcgccccccaatggcaagtatcttttcatgggaacttgatccagggtttccttctttcacatagatctgtgttgagacccagtaaattgatgggccatagtaaaaatatataagtggaatttcagaaaagaaaatatgccattagcgctaaaaaggaatatattaacatgagatctatcaaatcatttcactgaatacacacataatccctccagtcataaatgtttgacatttaggatgagattcagtcaggcttttaaaattacgaccaccaataatttctaaaatgcttagtttgaaaacggaagaaattgtatatggtagatttgcctcaaaaagtactatcattatatcataaaattattctaatataaaattattggctggaattttaaaagtttgaccgaatcttgtcctaaatgtcaaatatttatgaccggagggagtagaagattgttgttgttccattttatcaagtttgcccttttgatgcaaccaaataaaaagaactgcaacactaggttcaaggcggaaatgaactagccatcactcgaacgataaaggtggattgaaaaaaatggtctccatgattatagttgaaaaagaattgctccacatccggttgtagttattaacctgaaaaaacagatctgtgtagtaacattctgaaggaggcatgagtacatcaatagtaatatgttcttcgattgaccatattctcaaacatttgagaaatgctgagatctcatcgagagccttgcaagcagatttatctgcaacaagaaacatagaatgattgacattttagtacatatttgcagactacagcagacaatgtagaggggcttaatcactaccatagaacagggtccctcttaatctagcaagtacttgatctgcagaaccacaaaatctctgatcagctttatgtagcttctcaaccacctcttccgaaagacgaagatcctgagcattcaataaatatttttatacactaacccattacatggaaagatggaaactgttagtaatggaagcattttcaatattcacatgggaatcttgtgaatgcatctcagtaaatcaagcatttacaagggaaaaggtataataacgaacctaattaaataggataaaactttgcatcttgcaaattgttaacagaattattttttccaacttgttcaatattagtaatacgttgatgcattatattgtttttaccaaaaaaaactattcatacaggagtttcactgtagtagtattcagtatgctttattaatcaataaaacaacaactattaaagtaccaccatggtttgattgtgtattgtggtgcttgtacctgtaatagttgcccacgaatcaaactccattgtgacttgcgatcagccttatttggccaatactgaacaagagttgaagagaaaaactgatacacacacagaaaaaaaaggtatcagctgagatgattccacaaatgtgaggaacaggtgagacaaagtactgtacctcagcaacattttgtcgccgttcttgaggaactcctgcccaggaacaaactgcttcagcaagtttgctatgattcagacggataattattgccttcggatcataaaagtgtgccccaacatccaaagtgacctgttgttgcaagaaattaattgtttgcaataacacaaaagtgcatgtttaatgctgaaagcatcttcagtagtctttgcatccatcccaattgatgttgcaaaacttagatactccctccgtcccataatataaggaattttggtgggatgtgacacatcctagtactacgaatctagacatgcccaaaatcccttatattatgggatggagggagtataaactaattatgaaatatggacctcatatgcagttagggaaaacaaggtaaatgagatcacaagatatataacctttacaatttcagcctctggtattggtgaagcacctccaataatgtcgaaatcaccctaaaaggatgcatcatgatatttacagaaaaactactgaaatggcgccgtaagaagataaacaatagaaaacgaataatgcaaactcacattttgtttgacagttgatgaatattcaatgcaaataaaacagttacctgaagaaagcgataaggaattgaatggccaactgctcttcgatgaacccatgatacttcataacgcttaaaggataatatctgtaaatgagttgtgtaaagtagttgctcatcagaattgttcttagcgccatcctttttcaagcacgcaaataaaggcagaagcgggaaagacacagatgttttcagagaacgcccaaaaaaaagctcatgaaatggcaaattggcaaattcagtgaatatccctgggatacagtggagtaccgaacaacttaaaaggcatatgtagcatatgtaaaacttgcacatgactgcattatcatttggaaccaataattaaaaatggtaatgtacccaaattgaacattgaatcttcattagcttttatctagcacatacaacagtcaacacctgaatgcaaataagcacggaagcaccacactgaaaatgttatctacttcataatggtggtgaactggttagtgctagcttggtaggttttgccatctcaaatcttatgtggaggaatctataaatacatatatgtgtttactatagtgccttttgtaaatgattgcacttcccagttatgtgtatatgtatgtggctgtttaatcatatgtgagttatctttgcaataattgagacctagggttcagttattttatttctatctttgaagtttacaagttgtgatttgttgattcgacatctgatgcaagcacaggtaccgtgtcaagtagatacagaaaattttagtgacaattgggaatatctccaactaaataactatgtttaataaaatgttggataagtctttgtggtccttggtcgtgattcttctttttgcttttgggtagtttcacctttttcaggatagcatctaccctttagcatatttttcagttgctaggacagctgcggttagtaggacagcagcagttagcatctcctttatgcctcctttatgctttattcagtttggatgccctctaggacaacatctcattcaaatttcaaattttagactaggagggtgcagcaataggctagcagccagctatggctatatatatgcatccaacctccctcgggtaggtatggcttttgtgttttatgaatgaagaaaaccagaaaattgccccatctcgagtgccatcctcttctcaatgagagtaaccattgaaattctaacatctggtatcagagccacactttcctgtaggctaaacatctcttgttccaccccttcccaagctcggttgagctctcagccagcagcagcagcagcaccggttgctcctccttcccctttcccttccccctctccacgcagcagccccccggaggtgcgccatgtccgacgctcggtctcggcgttctgtcgcctcgagcactcggcgtcagcaggacgctgagctcgccgcagcagaagagcgtaggcgagcaacggctcagaccgctgcagcagcagcaagggcggccagactggcggcagcggagttggcagcagccagggcggaggcggaggcgtcggaagatgcggcacgtgtgacggaggtagaggttgagaccttgcgcagcagcatcaacggctccatcgccggcgacatcaccgccgacagggagcttgaggagctggcaagaggaagggcacgggagcgggcagagcggtgggcagcagcccacctccacggcggtggcggcggcccaagggaccacgcgcccgccgacgggaacccagacgggcgcgggcgtgccggcggaagcccggagcccgcacgtggccctcgcaggcagcgcggctctctctcccctgaccggcgccatggtcaccacggcgtccagacggtggtcagggactttggtccccgcggggggtggcctaccctcaccaaaaccaactacatcgagtgggccgcggtgatgagggtgaggctccaggtgcggcacatgtgggaggcagtccggtacggcgacgtcgactacgacgaggatcggcgggcactagatgccctcatcgctgcagtcccgcccgagatgcagttctcgctttcccagaagcggactgccaaggaggcctgagacgccatcgctgcggcacgcatcggcagcgaccgcgcccgcaagtccacattgcaggcactccgcaaggagtgggagaacctggccttcaagccaggtgaggatgttgatgactttgctctccgtctcaacactctcttacagaaaatggtgcagtacggcgacgacacctacgacgaggagagagctgtcgagaagctcttccgctgcgtccctgagaagtacaggcagatcgctcgctcgatcgaatctctgctagacctctccacgatgtcgatcgaggaggcgttagatcgcttcaaggtcgtcgatggtgatgagccacagcctctctcggggcccatcaccatcggcgggaagctccatctcactcgggagcagtgggaggcctctcagggtgacgggaggaagggggagtcatcttccccgacaggcggccgtaagccgcgcaaggcacggggaggtgtccagctacggtgggcgcgaagacgtgccgagggtggcgcccgcagaggcgcccagggcgttgccaccggcaaccacaagccggcacgagacgacgcctgccgcaactgtggcaagcttggccattgggccaaagactgtcgacagccacgacgcgaccaggcccacgtcgcacgggtggaggaggaagagccggctctgctcctagctcacgcaagcatcgagctacctccagcggcaccggccgcagcggctttcctccaccttgatgagccgaaggtactcgtctccctctgcaacggctccagcaacgacaaggctgatgggtggtacctcgacaccggcgccacccatcacatgaccggccgacgggagttcttcaccgagttcgactccagcgtccgaggctccgtcaagttcggggacgcctccggcgtggagatcaagggtgttggctccgtcaccttcaccgccaagtccggtgagcataggctgctcaccggagtctactacatccccgcgttgaggaattctatcatcagcgtgggacagctggatgagaacggctcacgcgtgttggtcgaggacggattcatgaggatttgggatcgccgtcgtcgccttcttgccaaggtaaccagaggcactaatcgactctacatcctcagcgcgcaggtagcacaaccagtttgcctcgccgctcgtcgggacgacgaggcgtggcagtggcacgagcgcttcgggcacctccacttcgaggccctgaagcagctcagtgccaaggagatggtgcgaggcatgccgtgccttgaccacgtggagcagctctgcgacgtttgcgtggtgacgaagcagcggcggctcccctttccctagcagacgagcttccgagccaaggagcggctcgagctcgtgcacggggacttgtgtggcccagtgacaccggccacaccaggaggacgacgttacttcctgctactcgtcgacgacctctcctgctacatgtgggtgatggtcctcggcagcaagggagaggctgcggacgccatcaggcatgcgcaggctgctgcagaggcagagtgcggtcgcaagctgcgcgtgctgcgcacagacaacggcggcgaattcacagcggctgaattcgcgtcgtactgcgctgatgagggcatttagtgccactataccacgccgtacagcccgcagcagaacggcgtcgtcaagcggcgcaaccagacggttgtggggatggctcgggccctcctcaagcagagggggatgccggccatcttctggggggaggcggtggtgacggccgcctacatcctcaaccgctcgcctaccaaggccctcgatggcaggacaccgtacgaggcttggcatgggcgcaagccggcggtctcccatctgcgggtcttcggctgcctcgcgttcgccaaggagcttggccacatcggcaagctcgacgacaggagcaccccaggggtgttcatcggctaagcggagggctcgaaggcctaccgcatcctccacctggagacacagcgtgtgcgcattgtgcgcgatgttgtgttcgacgaagggcgagggtgggtatgggacaaggcggtggacgatggttcgactccgacgtacgacgacttcaccgtcgagtacgtccacttcgagggagctgggggagtaggcagctcttcttcaccgagcgtgtctaccctagcccccgaatctccaccgactccgacaccaacacaccctcgggccacgacttcgactacgacgagctcttcgtcgacaccaccccagccagtgactccacatgctccagcaccaacagccactcctccaagcacgtctactccgacgccagctcgtgttgagcgcagcccggtggagttcgctactccgctctcccacgacggggagcgcatcgacgcgtaccacgacggcgagcagctacggtaccgtacgatggaggatcttctcggcgaccagccggtgccgggactggtgcctcgcgacctaaggcgcagttgcaccttgcgtgcgatgacggtgagcctcggtcttttgcagaggccgagaaacacgcggcatggcgtgccgcgatgcagtcggagatggacgcggttcaggagaaccgcacctgggagcttgctgacctccctcgtggtcaccgcgcgatcacccttaagtgggtgttcaagctgaagagggatgaagccggagccatcgtcaagcacaaggctcgcttggtggcacgcggtttcgtgcagcaggaggggatcgactacgatgatgccttcgctcccgtggcacggatggagtccgtgcgactccttgcgctggctgctcaggaaggctggggcgtcgatcacatggacgtcaagtcggcgtttctgaacagcgacttgaaggaggaggtctacgtgcaccagccgccgagatttgtgatccccggcaaggagggcaaggtgctacgcctgcacaaggccctctacggcttgcggcaggcaccgagggcgtggaatgccaagttggattccacgctcaaggggatgggcttcgagcaaagcccgcacgaggcggccatctaccggcggggcaatggaggaaatgccttgctggtgggtgtctacgtcgacgacttggtgatcaccggcaccaaggatgcggaggtcgcggcgttcaaggagatgaaggccaccttccagatgagtgatctggggcctctctccttctacctggggatcgaagtgcaccaggacgactccgggatcacgcttcgacagaccgcctacgccaagcgcgtcgttgagctggctgggctcaccgattgcaacccagctcttactccgatggaggagagactgaagctgagccgcgacagcacggcggaggaggtggatgctacacagtaccggcgtcttgtggggagccttcgctacctcacccacacacggccggacttggccttctccgtcggctacgtcagtcggttcatgcagcgaccgacgacggagcaccagcaggctgtgaagaggatcatccgctacgttgcggggactctcgaccacggtctctactacccgaggtgtcctggcaaggcacacttcgtcgggtacagcgacagcgaccacgccggcgacatcgacaccagcaagagcacgagcgggattctcttcttcctcggcaagtgcctcgttagctggcagtcggtcaagcagcaggtggtggccctgtccagctgcgaggccgagtacatggtggcctccgccgcttcgacccaggcgctctggcttgctcgactgcttagtgatctcctcggcagagacactggaacgggggagctcagggtggatagcaagtccactttggccc

SEQ ID NO: 29224 - DNA, 1597 bp, Oryza sativa
aatgttgaataagtctttgtggtccttggtcgtgattcttctttttgcttttgggtagtttcacctttttcaggacagcatctaccctttagcatatttttcagttgctaggacagctgcggttagtaggacagcagcagttagcatctcctttatgcctcctttatgctttatttagtttggatgccctctaggacagcatctcattcaaatttcaaattttagactaggagggtgcaacaataggctagcagccagctatggctatatatatgcatccaacctccctcggataggtatggcttttgtgttttgtgaatgaagaaaaccagaaaattgccccatctcgagtgccatcctcttctcaatgagagtaaccattgaaattctaacataaaaatgcaataaattgattaagggaaaaatagagtataacataacacaattgtgaaacagaacatcgaaggaagaacatttacacaagcagaatggagctattatactcataaaaagaggagaagaagcaaggataaaaacatgtggcggacctggttagcaacaactgacatgacaaacggtgtccgcaactcatagcaaagttctagcatctctcctccttgagttaagatcttcactgtctttcccctagaaatttgtagatagcaacataaaattccattacagagcattgttgaacagtcattagtttattctttcattctagaccaaacactaatcagctgaaaggtgtaggaaccaaacacacctgttttcagtgaatttcccttccagtgtatgcaagggggatatctggaatcttttagcacaatgtctcttaaaaacctccttgctaacctcaatgatagagtctagaagttcactgttatcacttttacaagtggattttttactgccttcaagctggcattgagttttggcaatcagcctttcctcatcaaatattgtagatataactcggtcataaacatatgtgtcttctggcgtctgtatcattctaagtacatctgcataaaaatgcacaaaagcagtggtgcaaattagacaaacagattgaagtgacacttcagatctattcagttgaagtagatgcgatatttattagatcatagctctttcaactagaaatgaagtaatattccagaaaactaataaacttaccagttaaccactcatcttccatccgaggaggtagatcattttgcagaagttcaacagcagatggacggtcagatggacttggagacagtaggcgcctcaataggtttgactggccagggaactgtgttgcccatgacaatggagaatcgcctttttgtttgagatcagaaagaacaagatgcctttccattgctgttgaaaatggataccaaagctcaaagaatataacttctaagctgtacatgtcaacctgaaaaccaacatagataagctccagatagaatttgttgatactcaatattaacttgcaatcttattaagagagagaatatgaaagttcttttgttcattttagtactatgaagagttaaaatatcattctgaccttctcgtttatatgtggccatttctgttctac

SEQ ID NO: 29225 - DNA, 4870 bp, Oryza sativa
  unsure (1)..(4870): unsure at all n locations
atatcagcatgaagcccacttaccaagaccaaaatctccaattttgatatcattgcgaacatcaaaaaatatgttgttaggtggcaagtcccggtgtatgataccctggctgtgaacatgcgctagtccctccactatttgtcgaaataggcgccatgcatcatcaactctaaaagatgaagtatatgtctcaaaatactgtcgcaaggttctgggcaacatccaataagatcaaccatcatcaatattgcaatcaatattatgcttaaaaatgataaaaaaaatccagacagaatgaagatatccaaagttcaacagtcaaaattctcatgactagcttagatgaattgttcaaaagctgtacaattatatatttcccttttatagaaaaatatataatataaaactactgtaatggcagctggtctgctcagcaaacaggtgaaactggttcaagtagtcaagcctgtgaaaaaaagccaacctgggctgctcatgagctagttcagcattgtatattctgtaacagaactgctgaaaagaaacacactcatatccctttaaaaaaaacaaacattgattagcacatgcataatcacagaatctgctgtgacagcaactcaaggtatcaaatggagttcttaatagtattacgggaaaaaagtaagacgttgattagggtacaggagtagtcatcctaaatcatttataacaaaaagaagtgcagtgatcagatttattaacaaataaaatacaaaatccataagggcaaggcaatcttagcactgtttacttcatagcatagtgataacacgtaagtacctaggacagtattccatttggatgtacaagtacgtggattcctgcttatttccaccacctgcatctgataagctgatgttgtcgtaactgtacatagagctctcagcagtacatgacccagcagcattcaaaacatgatgttgaccatactcagtttcaacccatgcctggcatatcaatgacaggtgagatgtaattatctgatttcattaacgtgatcatctaacaactttctaaaaggaaaacatatatgcagaaatattcacctggtagtaacgaacaacatgctgatgttgcagtcgtgaaagcgtggctacctctctgaggaccttgtcaaattattaatgagacacataaaaaaagcataacagaatgctggagtaaaataccaaaaagaagaggaaaatacaggtatatcttcctccagtgaaaaaagaagccatattttgacttttcaaaagtcaagcactttgaccactaactttaatacagtatattcgtagaagatacaaagcgtaaaatttgaaaagtatttttcatacaagctcgtccataccattttcatatatccaagctacatattctagaaaacacttttggttaaactttataaggcttaattgcatgcattctagggcgacatgttttttcttgacaagaggccagatggagtaataaacctaagactgattatagaggctcacataaactagaggaagtcacagttcaggctttagttttaaatgtcaaacatactaactacttagttattggcatatgatagtgataactaaagcaacatgagtaacattctttctttttttttgcgggaagtaccatgagtaacattgcatctacagctacatgaacaatattgatggtctggacattggcctcacattgcagaagacttttttttcaatcattgacaacgtattggagaatttattggttcaaggcaacaatatttagaaatataatcagatgctgagccaattagcaaacaaatagtgtttggcttttaaaaattgaaagtctatctacccttcttctttacacttaaagtgtttaatacaacaaatgaacaaaggtgatcgtcaaaaatatacacaaaaaagaaaaataaacatgaactgcacagtgccacagcactcagcacatttcaattaagagaacaagatcagaagtatacaacccttagaatcttttcattcacttgaggacttctatctttcagacgtatcttttttacagcatattgacgtccatctaacttgttcttgcacagtgcaacacgaccaaaaccaccctggcctgtcacagataatgtcttagaagcccttttgtcatgaggatttttgaggcctcatgttacttcatgaaaaatatatgaagatagccaaattgcatccagattcaatgttaaagttgaagacctttgatatacaataatccactctatagcaagcagcagcagaattccacatactcataatggatactaaaagatgtttgagatgctggtagtgataatatccattgcaactcacatgtattaagctagttatagtaactacggaaaaagaaagtccattaattagaggctgtataataaatgcagatttacttgtgtcaccttttatgattgctaagacaaattatacatatagttattcttaaaaatcaaaatttacaattcaaaagcagctttggattatagtaatcaaaagtagggacaatgctacatttcctaaagaaatatgcactatgtaaatggttaatgccacacaaaaaaaaaaaggtccacaataaaccaccacccaatagcttctttaggctgctcgaaagccgataaatattcangtcagtatcttgatatagtcttgcctaggtccacaaaacactatcagatgggagttatattctcaccaagtggacgaagctcctcaaaatcattcaaataacgagaatttggcctggatgatgaattgtcagctcttcaaaatagagagcactctgaagaggtctaatcaatggcctaagaaaaccaagtaaaattagagatgaacaacccacctgtttcggcagaaggaaatcatgagttagcaaacaatagttaggcatggcttaccatttgtggcccaaaaaagtgtccaaaagtttccccaaagacagcaggagatttcgaaattaaatctttagcccattcagaaaggatcttggtaacaggagaaatgaagataattcaattacgaacgatgataaagaaaattacaaaagacatgtcaataacaatacatggacaattgaacacacccctatgttgcataactccgatgatattgctggcaaagaagctgaaagagagtccttagatgcacaagctagacgaagcaagtgtacctagtacagaaagcaaataagatataatagtgaaggataaatctttttaagttaaacattgtaaggtgaagagagtaccagaattaaatcttttttcttattccgtgaagcatcatcaaacatgtcaaaagatggggtatttgaaaatccagagcctgaaccagaatcttcatcattccaatcttcgtctgaaagatcagagtcctacccatattcacaaatatgcagccagataaggcatgctatgagttatctatctattttacttaagtcttatgtagatgcaactactcaaactcaaaggtaagcaggagaacagtttgaaaacaaaagcaggaacaaactacagaagtaccaaacaatgatcacatgacccacttcaaaagaaaagtaggaacaaatgaacatcaggattttaaccaaaagttcacgttggaaaaaaaaacatcatataagccacctaacaaaactagcgaacatagtataatatcaaacaagccctcagaagttgataaaggctcagataataaacacttgctataagactatcagatgagttcataatactagagattttcagtttacataacacaatccctccattacactagtgatgactagcccgtgaacaaccttaggttaacgcgatattatacattttgactttacataacagtatcccttgaattacactatccattggacaacattagattaacacattttgtatatttaggcaatgccatgctgcatcaaaaattagtataacactgagaaaatatacaagtgtgttcattacctcaagttgatgcacactgctaaaactcctctctggagtacctgatgtattttctctgttgctcgtagaaacagttttgctgtcattttcagtttcctctgcaacgacatgcaaactgggaactgtctcccgaataacatcatgcttcattatatttttctgaccagcattatccggtaataaaccctttgcaacattaacctcatcagaagaaacacgggatttttcaataattgtcttcctcttgcttttaagattagatttgacttgagaaccaacaattttcccagcactatcagttgctggatctggaccttgcatgctccaactacctccatcatataattgactatacaggtcaaatgagttatgcatgtaagcaactccatggtaagaaccattgtcaagcttaactttcacgtctacatcagttgtttgttgtactttgcctgaacccacccagggagcctacaagatatgataccaaataacatcagctatattcagcagtactatatatagcttgggagaaatacaacataaaatttgtggactgccaaaagaaaaggataaatgatctgactgacaaaagaaaaggataaatgatctgatgcatactcgacatctcatgaaatgctacatctgtacatagtatgcgattgcacacattaagaagtgtgttcttctgaacgtgaatattaagaatcacaactgggaagaaaggacacaaaatccaaggcccagccattgaaagtagaaatggtgctgagatgacatattagaagctacatatcacatctgtagcaaccgagttccttaatttatacagctaagcaaatgcaggag

SEQ ID NO: 29226 - DNA, 10464 bp, Oryza sativa
  unsure (1)..(10464): unsure at all n locations
ccctctttgtttaggcttataagacagtttatgagccaaaaagtctaagcctgaacaaataagtagctttttcgtctggcctttttaaaagccataagccactcttacactgttaagccaaagccaaaagctaggttggagtagcttttttggcttatgtgaagtggaggtataactccaccaataaacctaagggtttaaagccaccggcttataaaacatataagccaaaacgctggcttaaaagtccaagcttaaacaaagagggcctgagtaaccatgaaaagactgacttaccatgcttgttgaatcattagctggagcaatttctgacaagaactcttgggcagcctctaccaaattgaatatcataacacgcccttctcgggaataaatgtttgcctagtaacaaacaccaaaaagtctgttaaagttatttaacccattcacaccaaaacatgcttgggaaagttatttattcacagtagaatgtaaaaaacaaaacaatttatagagattctctagacaaaacatgattgaaaaccctgtttttccctgaaagttaacccatttccttatttttcccttgcttctgcagggtccacatgtcattgagacatcatgcgcaaataagggatcgggtgaatttgacagggatagataaagaatcatctaaaacaaattaggataaagtaatgaggaattttaatgaatatggagtgtggtgatcggaaaactttcatttatctacaacaaagaggttatactattctatcatttataatgcttgcccataaggggtaaaattttctttgcagttcaaaaccgagcactggaaagaaaaaggatgcaagactaatagtctaacacggttcgatgaaaatgatgtctacaggcatgccaaatacaatatgaccacaagagcaaaggcttcaattaaacattctcttcaacaaattcaatcagaagcaataggtaataacaccaaggcctggtgttagggaggataacctccccactcactcaggttcaagttttagggctaaacgacttcttcagtgaaggaaaatatcagaagaaggaaaatatacctgatcaacaagaagggaaagcaaccgattagcatcttctctagataaggtcttttcaggtagaacccgcaactttgggcacttgtgggggtaaccagcaaaacacctatttgtaaatgcaagctagatgtcaactagcgaaacaacaaagatatatgttgtatgcataacaggataagtcatagctccttaaaattaaagccatacgttacatcaagagtcgctgaaacattcgaatctccaaagcccatgccatcagaataaggcctgtttacatactcataagttttaaaaactttatttgccatgatgcaggtgatacacttaagagtatgttcaagaaacacgagaaagtacctgatacatatagtaaaacgggtctgaggtgattctgatgtcactttgaagtcctcaaggaaaattgaacccctaattgatatgcaaaaggatgtcggttaaaccatgcaatcactaacagaagaaaaggggcatcactaaacaaaattgtagtgcttttatttttcattttgcaaagcgaaacaatcagtacttgactactaaattgttaatgaataagttattcagaacagtgaaactccaattcaaaactcaaaacaaaggaagtaatgcttgctactgcatactgctaaaaataagcaaaggcgaactgcactagctagtggtatcaggttaggtacccacatgctacgctgctcagaaattggacaggaaaaatatccaaacggcacaaccaacctacaatcagcaaaatgatatgaaagcaaactgcaatcctcaaaatgaagaatgctaaaatcatgtgagcaagcatcagagtaatgaatgagtcagggcatcatactgtactaaggtatgtgaactaatggactattccgtacctcccaaggcagggggaaaaaactcgagaacttcggtacagtctatgcaacaccacctcgaaattcaaaatgcggcattcagtataagttggggaaatccaggcgaacgatatgatgaaccacacccccacctgaatctcgtaccagcataggagacatcacacacatgccacctcgcaattcgaaattccaggccgactaactaaaccggcaatgccgcgaatcaactcgaagcacgcgcatcgcacactaccaggcagcaaaccagcaagcaccaaccatcactccatcagcgatgaaccgattcacaaacatgcagaagctcaaactcgaaaccaaccacgcgccatcaaccgattaccacgcgaggaggataagcgtactacgaccaaaaatggggtgggggggaggaggggacacgcttacagtgccgtgagctcgtcggcaggcggctgtcgcctcagctgcccccgggtccttgggncgcttncgcccgcccccgcccttcttcttcttcttcttcctcgcgctgtgccccatcgccaatcgcaatcgtcgtcgtcggcggcggcggcgaactagccggaaaggggaggcggtctcgatcggatagggattgggaggcgatctgcgttggcgccgcggcgagggggaggaggagggaggttttggcgtgggagggggaacgaggggagagcgcgtgcgcgtcaactcgaagcccagattagattgtgctcgagtcgagtcagtacagaggcggcggcgagcgagatctttgcgggagcctcgcgtcggatgagcacacgtcagaaagggaacccgggcacccgcggatgttatttttggcttttccgtgcgtcatcttccttctccttttttgcgaggataataattagttgtcgtcatcttggcagtagaagcggattggcccgaagatttctggagtttaaaattttgcttttgaaaagtttttgcacagccagtgcaattttcctttgaaatcctatgaagatagatagctcaaatttatgtgtcacgctttaaagatagctctgctcaaaccaggactggtagaaaatgagactgcaagattcgccattgagtctgcagtgtagataactaacgaatgattcatggaatatgtccaagcaagtagtaacagttcgtaaatatttctggtatcgtgctctgactaatgccatcaccgtataatttcggtatgcagaaggttcattacaatttgatttctttacttagcaacaccacataggagatctacaaaagggtggaatttccaacacatcagcaagcacaacaactgaggcacacatatcataatcctatattaccaaagaattaatggaactacgctttgcggtatgtacagcgctgcagagtagacatcaaaaaattgtgtcacaaggccagggccccatttcatcttcccagctccttggtttgctagtttacttgaagaagaacttccaaatttcccggtcagctaactcggttaaaaagtggccaccaaggacaccctcctcctccatcaaagctctgagttgccttgcgccgccattggaaccaaccaagttcttctttgaaaccacatacagtactccgtatgggggtcgcaggcactgcaagaatagcagaaacgacgccgtattagcacttgtggatctttatagttgagtgcatcaattaaaaattactctagcaatattgtcctactcaaagaaagaggtttagaagcttcaactcatttattccatcacaaatcacagcttgatctagatgcatgatacatgaaaagccaaaacagcgataacaagtgaggaactgacctttgtgataagggcatagagcttcttcaaagagttcaccgcataggggacctcagaaatcaaaattacatcatagcctccatcagcttggtctgtctcactggccctctcccatgcacggctaccagaaagtttccttgatcgcctggggcaattgtcgacaccaattatgctgctcccatcatggctactgcagccatccataaagtcgtcctctgagaagctaaggtttgttggtgctgcaggtgggtgtacacctgagagaatagtaggagctcctccagtcccagcaaaaatgacatcggggctaacagttgtcgtgatggtgtaacagggctctctgatggtctgttctgcctgtcccgagcctgctcaaggtttgcaagcacattgggtattgctctgcatcttattgtttctgcatttgtgtcctgaaaatgaactgtggatgcaccctgaggaagcatcgaagcattcagtcaatcagtattctgggtaaagataactgaaagcaaagatatagtaaattgataatcatcagaagcaatggaaagatgaaaataccttcaaacaggcaaaaatcccagccagaccagatccacaaccaagctgcatcaattttcaaaaggaagtgagttatgcatgagtccaaattatcaagttgattctgattcgatgaaagcaaatgcaagcacaaagcatctactaaataactaaatgaagaatctgtaacagctagccaacgatgccagttttctcatgggaagttacctctagaacccgcttgcccctgaagctcaactgcccatcacggatctcatttttaataatgttgacgagagtaatggaactctcccaatatttcagagatcctgagaagaagtgatgaataagactccatggtatggaggaaagaaaatataagatgtgcttattcgttatgcccttaccatcatatttggatgcgactacttcagaaggggagaaggctatcatatccgctacactgaccttcccctgaagcataaggagaacacattaaaacattagtgtttgatgtttatatttgataacttgatggtagcaagggaaagaaactagccaacttgaaaattaacaaaataaggaatatgcatgtgctgcttaccttgaaaatgtcaagaccttgaacatcaaccttctcgccagcatatttgtaaggatgagcactctgagataaaaaggatcaagacatacttattaaattgtttacccacgaaaacaatcccaaaaagaacaccaatcgacagtacaacagacagctgcaaaacatttgaagtatttcttttggagttttatatacaaatgacagccaaatcagaaaaaataaatgtacctttgatgggattatctcgacagctggtgatggtagctgtagatccctttctgatacaattggcacacaactcgtagccttgctgggaagcaagccagggaaacactgaacaagcagtgatggcgtcttcatcgtgccacctgttaacttcagttattaacaacagttgaaattaattttgtattgaaggaagaaaaaattagatgattggactgtaccaaacatgagaatcacaaattttcaatatgaacaccatcttaaactaatatacaaaagagaaaaatggagtcactacaacagactcaattttcctcttttgtaattttcatattttgtattttaaaataaagtacaaggttctgggtgggaactggcattccctaacccttgtgtacatggctgatttctgaagaaaacttatatcatttgaacataagtctaataacctacatacatactgatgagtaaaaaacccaacatcacaagctgtgactaagaaccagaagattgctaagcacaattcgctattgtaaaatcaataatgttaactatatgcctgaatgtggacaggatatggagactctgctacttccaaatccataaaggtgcctttaaaaagtacacaattaagaaagccactcctattgtttttcgaacttagtagaatctaaaccccacacatccatagaacacccgaaaaatactcctagcctgtgcaaatctgtcgccttctatcacctcccagtaggaaatatggcagaaataagatgaaaaagattgcctaaacacatggatttgcaggtgtgaaatcaagaacgcacggagcaaagctacctccttttcaccagcccccatccacacgctgcagttatacaacatctgaactaaatccaccagaaattcaggctaccgacacagctaaatcacaactttgatccctaaacccccatgaaagagctggattctccacgctgcctctccccatgccacatgaagcagtggatgcaacatgaagaaagccaaaaagctgttctacaatttcttttccggctagaagacacacatgacacatcacatgccatgagaacttactcatgaggcagtagccgcctgaatccacaacctatccagacgatttccttcagatcaacccgtaaaactaaacaaggcgacgactgacgacagctaatcaaaccaaagcacccgacgaaaatctcaagaaaaacttcctccttttattttcccccaccctgtccctctgcaaaaaatctccccccgtgaaaccgaatctaccacgaaccgaagcagagaaagccgagattacctcctcgacgggagccccaagagggatcagaaccccaacggcaagacgcctcctctcctcccctccttccctcgcccgcaacgcaacaacacccccttcttattctccagcaagctggaccgaccgacccacagaccaatggagctctccgaatcctcctccaacggaattcttcttggacaaatctccctcccaaagtcagaaagtcaaacccgccacacgcctaggaggagtaaaggtcggcaaggcgcgggcttgggggtggggatatataggcggagacccgtggaagcttcgccgcttctgccatggcagccagagagagtccccccgtccgtgtgcagcagcagcagcggtgggagtgcgagtaaagaatcggtctcccgcgggatggcgtaattaccggattgcccccgtgggcgtgggtgagcgtggaatataccccgtgcggcgccgcgccgtgcgggagatgtggactgtgagaggggtgtgaaatgtgaatcccgaggccgccttttccgaggataggcaggaacctttttttttttcctttctttggccaattttagttccaaacttttttaaaaaaaacttccaacttttccatcacatcaaaacttttctacacacacaaatttccaactccgtcacatcgttccaatttcaaccaaactttcaattttagcgtgaactaaacactttcacaaacttcatcacgaaatattttaacctagcatgtgtttaatctggggtaaagttttagcgtgtcacattggatattatggtcttgtttagtttcaaaacaaaaaaaattcatgttgtcatatcgaatgtttggacacatgcatggagtattaaatgtataaaaaaatacacatattgtgtgtaaattgtgatacgaagcttttaagcctaatggtgacatgatttgacgttgtggtactacagtaaacatttgataatgatggattaattaggcttaataaattcgtctcgtaatttcttggcgaaatctgtaatttattttattattagattacgtttaatattttaaatgtgtctgtatatccgatgtgataaccaaacccaaaatttttccccaaccaaacaaatcctatataaggtgccgcatggggtgttcgggcactaataaaagaactaattacaatatccatcagtaaaccgcgagacaatttattaagcctaattaatccgtcattagcaaatgtttactgtagcaccacattgtcaaatcatggagcaattaggcttaaaagattcgtctcacaaaagtagttgtaatctgtgcaattagttattttttaacctatatttaatacaccatgtatgtgtccaaacattccatgtgatatggtgtaaagttttagggtgggttctaaacaggccccctaatatatttcttctgtcccataaaaaactaacattgtgccggatatgacacatgtctaaatttaaaatactagaatacgccacattatatcctagattcgttttttttggaactgaggaagcatgtcatatataagttaaaacattttggaacgaacgaagtagtccctttgtttttgtttcgttacacggcagatgcataagcacatatacataactacacatgtcaaaccacactcacatttctcggaatgtgtcctctaacacgtgctttaaggctaagtttttttcacttcacaagtcacctttctggttttccgtgtacatgttttacaaactaataaacagtgtctattttttaaaaagttttctctacgaaagttgttttaagaaatcatattaatctattttcaagttattttttctagtacttaattaattatacattaataaatcatcatgttttccgtgcgggacccaaacacagcctaaagagacggaaaccatagcaaatctttcatcttaggccatgtttagttcccacataaaaactttttaccctgtcacatcgaatgtttggatacatgcatagagtattaaatatgaaaaaaaactaattacacatattgcgcgtaaattgcgagacgaatcttttaagcctaattgctccatggtttgacaatgtggcactaaaacatttgctaataacggattaattaggcttaataaattcgtctcgcggtttacaggcgaaatatgtaatttgttttgttattagtctatgtttaatacttcaaatgtttgtccgtatatctgatgtgacacgctaaaacttttcaccccttaattgcacactccctccaacccattttaagtgcaaccataagttttcgtgcccaactgatcgtctatcttatttgaaaaaaattataattagtatttttattgttatgagataataaaatatgaatagtactttactcgtgacttatgtttttattttttttaaaaaaaataaataagacagacagttaaagttaaacgtaaaaaactatagttgtaattaaaatgggacggagggattagagccttactataatcatgttaaagatctacttatatattcgtggtcgtttgaaccatagtgacaccacatcgctggtgtttatctttatcttttctctttttttagtcgtctccgctgttgcgtccggcaacccggcaaaccggccgggcggccgccgttggctcgcggtacggtcaactgcttggttttgccgggcagcggcacatccgaggaccttaatttgtagccaggccaacgacaacctgacacgccaaagaaattattcaaatctcgcagaaaaagtagtcctaaattgctgacgatcgattctgtattagaataaatttataaaatggtagtatagttcttttaggcaaatctatgtatatcaatccctttgcttttaaactggtcgtttgagaaaaatagggacagtgggaattttcaaagttcgatagaatattaaggccctctttgtttaggcttagacttattggcttagatttttaagtcagcttattggcttataggatttataagtcgatggatttaatgtcctaagtttagtgatggagtcatacatctacctcatataagccaaaaaagctcctccaatctagcttttggcttaatagtgttagagtggcttatgacttcaaaaaccaaacgaaaaaagctgcttgtttgtttagtcatagattttttggtttataagttggcttataagcctaaacaaagaggacctaattatcctcatatcaaatattttgtttcctgcaaaataaaatatcagaatattttgtacaagacggagtactagatagaaataacacagcctagtattcactgtatatatatatattttttggaacgccgactgtatatatatttggtatatatatttgagatataacgaattgtgagatttttcatgaaattctcctcgctcaccaattcacacagtgaatttttctactctgcaaaagtgtaacgctacacacgaactattacgtcagcttgctaggatacctgaagctctgaaagtccacatgttacgcgtggcaaatccatatggagtacgattgcaaggttttcatactgttgaaacagataagcagctttcattgctcgtgaatcttgtgggctgtggctgatttaatttgcaggtatatacctgttgcagatgcagctataaatctataatcacacgtgacacagctatatactccgtatatgtgtggacgggagcaactggcaaagtaacattatgcagtcaccctcgtgtcagcatcgccctctcgagcctcacgaaacattcatgaacggtacagtattacagttacatgcatagtaaaaataatactccaggtgacatgtctttaactttactcatatgcatgtaatgaactcctttatactcctatttcacttgcaattagtagtagtagcttgatt

SEQ ID NO: 29227 - DNA, 18518 bp, Oryza sativa
gatgatggaaatcatgtaaaaaaagaatgatggaaatagaaaagctcatgtgggtgactaaaaaatgcgttgaaacatgctggcaaacaacgagttcgtgtgatgttttggtccacgcaacgagtacgttaccggctacacggtgcgagccgtctggtggtgccatgccaagcgtgtgatgatgaacttaatttgcaaagttctttttctttattttctccttctttgttgaccttgtgcatgtactgttccagatggcatctactactactacacgcgcgcaatcagttaaattgcgtgagaacttacgccattgattgcgtaattaagaagaaaagatcatcaagagagaatgtcaaaggtgtaggtaaggattatggagagagaaggcactgcactagagttgttgggtgatttgattaggagtaactagctcgccaggataatccttcactgatagtccaacaactataacctaaaaataaaaatttatgaattcctgcagaaaaaaagagattaatcaaaagcacacgactacactaccaatagtaatttatttactcgagccaagggaataaagacaggttgtgccatgagctatatagctcgaactcgcctttgtatccggatcttgtcgtctgcacgcattcatgcatattgtcaaattaagtactagtttatttatccacacgatcgatcaatgaacctagacgatcgaataatcaaagttttggatgatatgcaccgtacgtacgagtcgccactattgtttgtttacgcacgcacgagcactagagtcaaaatggtgcgttactgtgcactggctgtttcgagtggctagctagcttatcaggttaggtgcccacgggttcaagcgtgtcagttactattaaaaaatatacgagatcaaatatgttggactatggcctttttatttagtccatcttggatatgttctgacttatgacatgggtagtgccataggatctgttcgagatgtacaaatttcgtggaaacggttcaatttttagcggaaacatcggcagttttcggaattccaacttccaaccgggtactaagcatcaccaacaatctacctatatgatttccaagactaattttgagggattttagtccaaaaatcagctccagcagatccctactctcctacccgagttttggagttccctccccccggttcctcgctccgtttatatgcgggcgcgaaagtcgctcccaatcacgcaatcccgcctctctccttcgttcccgtgcgtgggagatagcgatctttctgcgcgtgaaagaaaaaaaacataattttctcttggtagtttaaccgaagggcccacttttaagttttggggattgaatttagtctatctgttggagggaggagttttttcacttcctattttcagtttaggaaacccaaaaacaaattgttaggaaaaaattatagataatctattggtaatatcaacagattacctaatctcccccaaaaaaatatttttgggttttctaaactaaaaatagtaagtcaaaaaacttctccctctaacaaatatcctgcattcaatcccaaaacttaaaagtagatccttttgttaaaataccaacagaaattccgttttttttcttccacgcgcaaaaagatcactacctcctacacgtgggaatgggaggagagaggcaggagtacgagattgggagcgacttttgcgagaacacgcgtccgcatataaacagagcaaggaatcgggagaaaggaactccaaaactcggctcgggtaggagagtaggggaactgttggagctgtttttttttttactaaaattcctcaaaatcaattttgggaatcaaataggtagactgttggtgatatgtttagtttgatgcaaaaaataatccctaccaaattttgacaccatcaaaatcaaaatttggccaataccaaacaatgtaaggtagaggtaaatgggtgttgtttggtttgatgcgttactaattctttttgtgtggagctatgtgaagaagaatctagaaaattaccaaattttgacatggtatggtatttgagatatgtttagactaatatgttattaaaatttgatagtaacaaaacttgataagattaaaaatggtactaaagtgaacaagctcttattgttgtgcaattgccatgcaataggtaagagcaaatgttaagcagcagtgactatatttgtcttcattgcattggcgcatggagtttgtgacaattttaccaactacaacctccgttctaaaaataagcaaacataatgcgaaatatgatatattctaatactactattctagacatagcactagaatatatcatataaagtattatgttcgtttattttagaacggatgcttacattgcatgggagggttgggtgctcatttgtttgaagttattcaatccagctatataggagtacgtgttacattaacatggatatgaaaaagaacctgtcatgtagttcccgacttcccgtactcaaatctggtcatccctatttagattttttgggtgtccagatattttatttttctgagtctatgctagattttttgggggagtgtccagatatttctctgatcaaaatgatactgcagtatatcgaaccagaaaacatggatcacctagcaggacgagtgagctactgtgtgtgacagaggcgaggggaaaaaaatcttcgctcttttcatcgctagagttaccctcctatgtactgtactgattgtcgtttagaaagctccaaacttcacaactgacagagaaaaaacgtcggaaaaagacgcatccaactgacttatgtgggttctacatgtcattaagataccgatggcatatcttaaactttacaaaattataatggtatggttccaaattaccctccggaaaacgcacatttcgtatcggttctcacttttcaagatggcttcttcctcatcctctcctcttaatttcggcgacatgtcattacgtcaaacaaaaggaaccagggtcctttactgacgggtcatgtatgtcggcgtctgacgaaagaagaatcagaaaatgtatattccggactctcatccatcgtaccaaccctcgtttcctcctccctgatgtgaatcggtcaggagcgtagtacattcgcagcaatttgcagagcatatgcagttgcattctgcatatgctattccgtcggtcagacaaaggaagaaacgacgacgaagtcgtgcgagatcttgacagatcggggaggaatggaggggagagtaggtgaggatgcagcaccgatctcacacgacacgccgaccgacccgtggagtgagagtaacaagttaacaaaagcgatcaacataccttctagatgagctccttgatctctttccttactttccaggcgatcttctcttgttggtgcatgacggcagcagcagcattagcagatcaaatgtgttgttgacaggtgagagctaggaggaaatcagaaaaaaaaataaaaataagcggttgtctatggagtgacagctacgctcgctctgaagacacaggagaaacggaagaaccaaaagagagacgtgatatttactttgttctgctcaagcttttgacattagaccagggaccattttttccttctttagaaaagttcaatgagcgggcccaattctaatcaaactgtggcacactgcacctagctagtatatgtttgaactttaaactaatcctgctctggaaacagaataaacctgggggattgaaaccaaaataagctgaaacatacggtggactatcagaaaaaagggagttttgccccaatgctacctcagcagtgcatacttgcctcaaattacagttgccgtagctgccctgctatatgatgcttatacatgcttatacatccaacccctctatatatctgtacagaattccagcttcagacaaattaagctggttctaggcttctagcttgtatcacgccaatattggatcaggctgatatttaaattcaggcaaatggtcaagcctgcaaggaaaaaagggtattatcagtaaaacgtgaggtttgtctggttgatccagaagttctaacaatgttactgccggtgaagctgtaatttcgccatgtctgatgtaagtagtacagtggctcaggaaagacaagtttgccatcatagtatgctatagcacaatcaaagggtgcaagctaatcattcgtacctttgtctgactttgagaataccagtgccaagttgcatgggtatacccatgataatgcattcactaactccctctatctgatcctcacgaccactgtatgatgcattaaagagatgctccgctgttttctcaaacgaagccagcatcagcacactacttttcatttttgcaataccatatctagtaatgccaagaatttcaccctgctcggagaataagaaccagcagtatgtaagttactgttgaagggtacacaacatagattaaaaatatagcataataaaatgaaggtaggtgttaattattgtaccttgtatgtcatcaaatctgccagaagcatcatatgtctcgaatcaatgttcatcccatgacttttcattgtatactgaatttcatcaataatagatctcctcgcagcttcaattccgagtgttcggttcacttccatgatgtggttactttttgttttcatagcatcaactcctggagtacccattactgccaagagatttgttctgcaattacagaactatttgattaatattctagaaaaataatgcagaagttggagtaagtcagaaactaagccattccaagagacaagaccctggaactctagtgatctacaaaaataggtcaataaaattctaacaagggtcagcaaatctacaaacggaactttagttcatgctgctaaaactgtgaatgatatgattatatgaactcatacccctcaaccaacaacttgtatcttttgtcattttcttcaccagtttcgctgatcacagctctttcaacagttggaataccctgaattgattagtaggaaggtcagagacagccaaaatggcacatctaacactgcacatcttgataaatgctaaccttcacgatcacttttggaagcatggatttgagatgatgtaactcatatagaagtttggacttatctattccagctggataaattctcaacttggatttatcaataacacgaacatgctgcaaagatgacgtacaataaataatattaacagaaaaaactgatggtcaggcgtatcaaagagctttgttgatacctcagattttagctttatttttggatgattcaatattgacagctgcacagagtcagcagagatgcccatgtgcagggcttctatacgttgcatatcgagtttaacaaccaagtttggttgacttgatttcaacacaatctttatggcttcagccacctgctcaacacaaagaccatccatacatccaaaagttaagggcaaagtaacaccgtgaaattcctaaatttgagttctctccttcataaaatttataaattgtgggcagagcttttcatttctgtaaattgaataacctggtaaatatgatgccactagcttgatgcgtagacaaatatcaaatggctaatatctttgaagtgtattaaatgcatgtcatgattttaatgtatttaagaaacatagatgaagatgtaaagcagactgacttcttgtaagttttaagtgcgtgtaatgatgtaaaatacaagaggatacaattatcaacatcgaaagcaagtttgggggcaacatacctcacccagcactgccttttccatagagcctttcacaatgcgtgcagacaacacatccttctcagaaagtaactcagcagtgataataggtgtgcttatctttttagcagcattgataatttccttgatgcgaggaacaccaagagtaacatctttttacttgttaaggaaagatgatttgaacagcagtgtccaagaatagcatgtatgcattactctacatcaagatatcaaatgctgtagtattgtgcaaatcaattcagattgatgaaagcttatatcttttagcgcatattattgacaatttcatccgctttatcttagatactacattccaatgcccctctaaagtaaataaattataggaaataggccaaaacgacctgctagtaattcttaaaattaaaagcagactttcacgaaccatatagtatataggatactcatgctagctactcctgcaaaatggaaagttttcaatgtcatctgagttccaggctctccaatactttgagccccaattgccccaattgatgctccggcttcaattttcttcaagtggtaacgagataaacatgtgtccaagaaaacctgagccatatggagaaaaggaaaaccattacagaatgacgacacaaggataaaatgcataagcaaaccaataaaaataatacttgaaatcagtttaacatttactgcagaaaattagcatgaccacgcaattagtaagagaccaaaaaattgatcagaaatagactgtgcttgatatttcaggtttttcgcaaaacagagatgaattggtatgtgaaaaatatgaatagacacacctgtagttgcttcacagatataccagaaatattagcagcaatggattcttcaaagctggagtgcctctctccaacatgatcttcatctaggagaagcgctctccttgtgctcttcagcaattttatacgatcctcaagaaaatacgttaacagttgcttgaacttttcgctacaaccatcatcagaggaggcatcatgttcagagagcttgtcatttaaaatttgtaagatttcacctggagataatgtattctgtcccctttgaggacaagtggcctacaacagtaaaatggttagcacacgaggcgcatctcacttgatcaagtaaacaaactgtttttacatgttaaaactgaccatgactttcataaacaattgatccaaatttaagggctttccatctttcccttccatctttgcaggatccatgccatcatctccatagaggaactgtacaataccaccactagcattgcggaccgtctgatcatagaaaactgagagatcttccaatcccttcattaatctgcgggacatatatcctgtttcagctgttttaacctacgatcacaagttcacaaccaaggaaacaagcagaaattatattccaaatttccaacaattcccaaatgtttttgagaagccagaaggcacaatgagtatgctggaaatgcccaatgggttgcaccttggtccagctgaatgcacaagataccagtatagttcacctaacagacctctacatagaactggcatagtgctgtgaaggttttcatgcagcgaactacagtgcctgagataaaacactcaactgcaaggaccaaagcctaaaaggcagagtcaaacggaaacgccagattcaactctggtatgcaagcaagttgatttagtgcccaaacaacgaacaaggaaacatcttccccaatcattgctgtgctcaaaatataaaggagaagtgggcttaattctataagaatgtgatgaatgaacttatcatttgtttctagttgatgatgtgctcttctataatagctgctaagtttcctaatcctatccctgccaggcacaaggagctaattcagactattcctctcacataatatcatcattgtactactattaattcaattgagtagtatgtactgcggtgtaagtctatgtgagcaaatttaagaaatttttgtgctgaaatacagatagagtgcaaatatcaacttatgcaaacaatagatggttttatacatagacataccgctgtatcaacaagaccttctcgcccacccatcgtatggaagaagaattcggtggcagtcaagccagtatagaaagaattagcgacaaagcctttggcctggaaatggaatacaaaacatatttgtatgtgaatataccaaaatgtgctgatttcgtgacctttaattcaaacaaaattgcagtcagaacaagttgaataaaaaaatgttttctctaacaaagctaggtggaggactacgagtcaacgaaatccccactctgaaaaggaccaatttttctacatgataacttccaatagaatcccacgatcctttaatgaaaaataaataattaattagccatttaggataccacatatatatacatcaaagggaagtaatgtcaattcagaactttctataacataagagatattgtgtttaaaataaaacattacatatattttcaatttccagcctctatctctatgtatagtgccccataaaatttgaagagtacttatttgaacagaactagaaatatccagcaccagaaatggatacacaaataagcaagtcatatttctagtactgatgttcttactgcaggagtctttgaatttataggaaagtggggaagagttcgatctatgaagccattcggggcacgacgccctccaactgattgttggccaacacatgcaaccatctgactaatgttgattggagaacctttagatccacactgagacatgatcaatgggctgttcctccagtgaagtgtattcatacagacctgataaataagtttaagtgcattcaataaaaaaagtgcaaaatcaaatttgaataattttgttttgagtcaacaaaataattgcatcgggtctccagtagaagtcaaaatcacgctaaaaatcagactcatgatgagaatatccatgcaacaaaatttggttcaggaaaattcaaagatttgctcactggaaaataatatgaaatgcaaggctaaaaatatttttctatctgtaaagaatatgcaaaagtacaacaatggattaaattaacaaaatattgacaggcttactggctaaggaaattcagaaagacaataaaattggatgaaacatacttttccagcttcttctctgatttcattcagtacacgagttatactttgctccaatgtttgggctgcgttgcaaccgggctgcaaacggagtgcacctttggaataggaagcaataagatcatggcaatctttgtaccctccatctattttcattttcttctcttggtttaaatgttctcccggttggacatcgtccacaccaattgagaaaccatggttccctataaatcttgcactgcaggaaaagatgaatgcaattcaaatcagaaaaaaaaatgtgcactaaattatgtaacaatctaacaccaacaatacaaatgagaaactcagcaaaatggtaataatagagagataaaattgaacgagtgtacaccaactaagctccctgacttaattagtgtcaaatggcaaagtggtttgcgtacaaataaaaaagatggcagattcacgtaaaataaaataaaaagaaggcagagtgtttgacttattagtgatttctattaaccctctcgcattctttaatggaacaaagacagaacaaaaaaataattgcatagcatttgttagttaatatttaggaaagaatgggtccattacgcaattttgtagctcacctaaattttgccaagcggttcatacagcttgccgcagcatgagaattataatctcttacaagagtggagaacatgccatccttattcccattacctggaaacaaaagattaaagattgttttggtttgcttccaaatttaacaagcaggatgaaaataacaaggacaactaactagcacaagtgaacaatacattttccaaacctgattaaaggaacatttattgtatgtggtgattcataagagggtaaaccatgccaggactattgtttatagtccatgcctataaactaatgttctcctaaagagaatatagcatactcctccatcccaaaatatagctgcctttctagctcagattagagaggtacctatatttttgggacagagtgagtacttaggattatcaggttggcagtcgttttagctatgaatcagtactgggtgggattctcacctaaagtggccttcccaacttgcccagatagaagttcactgtttcggaagtagacaaaaccatcattgggacacattgcttcaggttccagagttgaacccttaggagtcttataaattttctctttaacagtaagattcagaaacacctttgtacatgcgttaggacgtactaacacactgaagagttgtttaccagtccaaagctcaataggctgtacaaggagaacataatcactgaatcagtatacagagaaatcaggaatttgatgagaaagctaagatgcacaaaggcgcagctggaaaagagacaaggtactgcctcttgttatgcataataatgctgaaattcactacaaaaattactaaaacttatatgacaaagtaatccagtttgataatactgtcgaagtcaaataaaagtgatggcatgctgtcccccatgcccaaataatatctcctattaatgacaaacattggttgaagcattaagaaatagcatgtcttcaatctgatacttgcaaagtgcgttcctatgaaaaagccttaccttaatcagagcaggtgttggcaaatcaatgttttccattgcatcaccaagatatgaacataagagagaaaatgacgacctgtcataaaagttatcttttcttgtaaccagaaaagaggaagtcaaaaagtcttgcgtggatgcaaccagtatttccccattctttggggtacataaattgttctgaacctgcaaaagtattaatgattttgaatattagctacagaatagtggtagaacatcaaaaaaaaaaaaagatggtcaactgtaaaaagaaagagttagcaaatgctacccccatgagcataagcgcttcagtgcgggcttcctcagtctgaggaacatgcaaattcatctcatcgccatcaaaatcagcattatatgggttacagacagactcgttaaaccttagtgttctccagggcataatcctagcctgtgattaaatacaaagagcaagggaccaatatgaggtaacattttcatgtagcgggtgcagtgtaatgaagagcaatttataccctgtgagacataattgacattctatgcaagctcggttgtctattgaagaggacaatgtctccatcttctaaatgcctttcgactacacagccatacttcaaatctcgagcagcaattcttctatcgcaatactttaagtgcctaaaaatgtaggataattgagtatatacgctgaacttataactaatttcagtgcatttactgatatgacttacagctttgttccatcaggttgtatgatgaaatttgcccctggatgtttgtgtggaccattccgtatacactgacgcagcttctctatgttatagtatgaaactctttcaggataagtcaaaactcgagccatcaggatgggaatagccacctgaagtgttaattaatgatgacgttaaacatcaacaaggaagtgaacataaaaaacttctatattgccatgtacctctgttattctcaagtttggatcaggagaaatgacagtccttccagtgtactcggtacgttttccagacaagttaccacgaaatcggcctgtcttccctttgagtcgctgaacaaggcctcgatgttgtgactcgggaagagagggtgcgtcactgttgatatattcaacaacttgaagttgaaggtgttgccagcaatccttcaaagattgaaaagaagtagatgtaatcatttaaagtaatatcaaattgttagaatgcatatcgtacagtcagaatattttgatagcatagcaccagaggaactcttgtgaaagagtcataaaaaacacaattttgaatgatctaaatggttgttttccttcatagagacgagtgcatttttctcttgaaacagtagttactgacttagtaatttagttagctaaataggaataagcattttgtcacacttaagtcggattttcaaaactgtaatactttgaacctgtcatgctgataagacaccagcccccacatgaattctgcatatcaaaggaaagtcacaatctgacttactacagaataatcaatcctgttagaatatgatttctggctttcatattttctacttgtgtaaatcatcaagtttcctaaatattttgccttgtaggttccatacagacaaattgagattaaccctaaactagattatgggtctatcaagctgtgtgtttcatgaagatacagagacaaggtgatttctgagtttctagcaaactatccgaaaggaattctaaacatacagaagttgcactgcactaagagaaaaaaatgggagaaaataaacaaacgaagagctgtgagtgtcttacaaagcacttcatgaactgaccaccagtttgaaggttctccttaaggatggaattagtattagcaatactcttcaatatgacggtaatgctatcttcattgctgtgggaagcaagacaattcaatgcattaaaaggaaaatgtggttatgctgaatcaccatttgacatataggtactaaaaaactgaagagcaaacctcattcttccaccagccacgaaaacagaaggacgtataggtacaggtggcactgcaatctctgtcacaataagtttctcaggcctatcaccgaggtttagcaactcacaatcctgtagagtgcataatatcaaagtgagagaaaacatacataaaactaatcgaacaaatctgtagtctgtacaatacaaattgtggtactctcataaaatagtaatcttgaaagacaaaaaaataggatctacctcatcggtcattcttttgaaaagagatagaacaattgcagggtctagcatgcgaacagcactaatagatagtttctctttcttatgtgatagtgcgtcccgaagctcttctgtgcttccatccaatgttttgctacaatcatgaagaataatcaaccctgctctgccctttttagcaacacctgtactaccaaccaaagaaacgcaaaagtgagaaatgttctgtaaaatgttgacagcagtcaggtgaccattagtaagccatcctaaggaaaatttaagtggcgaggagccgaggataaaaaggagtatcagaaagtagcttgccatttatgaatccacaccaggggcaacgggatagtttgcatttgtccctcacttttttcatgatagcacttttctgtagcggatctgctttgggatttctcattttcttcaaaaactctagccgatctttctccataagaagaaccctgctgcagctctttaaataaattatggaacaagtataagaataatcacatttggtggatttagacaaaacatctaatcttattcgtgcagtgataccttgcagatgcacttcaatacatccaaaatacagttaaagaatccaacattaaaaactggaagggcgagcttcaagtaaccaaaatgacccgggcattcagcaaatgaaccatggcaagtactgcactccccaagcttgtttgccgcaccctgaaattatatgaaatgttgtataaaaaagaacaacaatgaaccatgaaacaggatccggaaagcatagcccagctgccttcctatgatgaagcaaatgaaaccacatttgctcaaacatctgcaatcaatgagaaactcgaagggcaacacgcatttaccatccgcgtgtcgagcaatccattgggcaccggcttcatctcatggttgtagatccggctgttccaaacctgcacctccgcggattggcgcacctcgttccccgagaacatgctgaaccggatgctctttctgaaccggattggttcaaatcgaatcagaaaacaaaaccaaaagtcagtaaacacaaccgcagcgcgacgacgacgacgacgatgaaaacacgccggaccgacggggccttacatcctccgcgtgccgacatcctcgatgaagggctccttcgtgcaccgcagcttctcctccggccgcgccatctcccctcccgactgggctccgctcgacgccgccgttcgcgagccggagccgcttcggatcgtgaaaacctggcggaggaggcagagtaggaaggggagagggagaggtgacggtagcaatggggaatggagctggggttttgtaggggcttagggcgagggagagggagagagagaggaggctagggcgaggtggagaaggagaggaaaccgtacacaacgcacctacgggccttctcgccggcggcgcgggagaggaggcgaggcgaggcgaacctccgacagccgccgcccgccggctcgccgctcgcgcggaaaggggaggaacgggggagagttggcagcggcgcgggaccctagatgacttcgcttttttcggcttggaggaaataaataggtagggcgagtatctacattgtttaattaattttattcccgtatcttagccgtatgttggggatcgacgggttggcttgttccgttttatgtaacagaggagtcgcgggttcgattcttcttcatatcatcaccttttttttcccctaaaaaatattttttttcctttttccctaaaaaaatcccctaaaaatttttttcccttttttccctaaaaaaaatcttcaacagttaaaggcatgtttaaatatacagcccccacacagagttatacaagagactctcacagtacctaagccaatcatgactctaaccattaaaaaaattggtatttttctttcgtttacacccttatacaacaaaagtgtttattttatatatgctaaagatcgttgttgaaccatttaaccgtagcaacaatttattttctcatatcttgtatatatctttaaaaaatatatttatctgtgttctttcctgggtgattgtgtgtgagtttgtttcgttttccgcgcgcacgcttcccaaactactaaacggtgtgtgttttgcaaaaaaaaaattatagaaagctgcttaaaaaatcatattaatccatttttcaagtttaaaatagttaataatcaattaatcatgcgataatggctcacctcattttgcgtatcttcccaatcttctctatctccttctcctcaaacacagccctgttcggatatggggagttgggaactaaactccccgcacagaaaacagaccagtccattagcgcgtgattaattaagtatttattattttttttcaaaaatagatcaatatggtttttttaagcaacttttgtataaaaacttttttgcaaaaaaacacatcgtttagtagtttgaaaaacgtgcacgcggaaaaagagaggggtgaattgggaactctgggttccgaacacacccttagtatcaacaagtattctctttatcatcatatatggcaaagtgctttttattttactggtgccaagagtcgttttgaggcattgttaaccggccaacaatgtttctctcctataatctttgtcttctatatgaacgaatagttccaattagtaaggctaaaagctccttattgatgaccattgtactggtatttcgtttatggccttgtttggctctcttgcagttacaaaccagcacaaaacagttttttgtgccttcggttgctatagcgcagtcgcaatcctgttacaagaatatctcctgaacaagccttataagattaagggtttgtatcactcttttttgttatttatgttgataaccaaatttggaacagacaaatttgacaagaacaagccttagtatttttcaaattatactaagccttgaaaaatactaatgcttgttccggagatatggctattgctctgttttctgtaacagggcagcaagaacggccaaatttgaaaaacactaagactttcccatgaaggccagttttaaccgtcactgtgtaatcagtcagaccaaacaaatatgatgtggtcaggccttcagcatagagtccgagtccaagtaaggaatttcttgcgtttccttattttataccgagatttcttgagtttgatttctttagcctaattggatcctggaaagcaaatccacctttctataaatatgaggacgaaggttgattagaaaaacaacaaatcaattgtcaaaatcaatttatcacctaaaacctttattctacatcttcctcctgtttgctatttatcccaacgtctattctcctcaaatcccacaattgtgcatcattttttttgtctttacattgttataggacgtcctggctagcctatcaaggctaggacaaactgacgcgtgttcatcttgagggggtccctcccaggtgttcattcagcggcatatacctctccatgtgacgcgcgtctttggttgttgttgcgaattgcacgtaatatgctcaaagtgtggtagcgcgattcaacgtctaacaatttcctctggtagcttttttgttgcacgtgttcgttgttgttgtctatccaagtattgattcttattttacataacagatagtgtataatataattctagagaatacataacgtgaaaaactaatttcacatgataaatataagaatgaggtttgaatcagtcatatgataaatcccgaattgatggtttttaaatatgtttaaaggtaaaagctcgatatgagcttctagttcatttcatttaaaatctatcccctcatgacaaattttagactaactttttactactttcgtttcattttcgttactctcgttcaacaaaaatctcctcttttctatttttcatatcagcaaatctggtttagcttttttaaaatcctttcttaatctaaatttgcatttgttggcaaggctatgaacgtgctatttgtaggtcttgtacatgcgcttgttttttttcccctttgtatcgcctgacgccgggtggactgttccaatttccaaacaaaagcccacaggtcaatacgtcctatgttagattcaggcccaaaaaggcctatattcgaatgcaatgtgtaccacacatcttggatcgaacgtctcacagagtacatcctggaacgggattgccgagtaaatccagaattccaaggaaggtgagggccctttcgtgaaaactgcctgcctgacatgcgggtccggctcgaaggtgggcccaacattcaacgaggaagagaaggcatctccatttccctccacggcgtcgccgccggcagccggacgccgcagaccgtcggttctcacctctcgtcattctcgcagacctataatcgccagtataataatatattattaaattttatatcgacctaaaacatgacaaaatattagcatttccattacgtgtttatacgttgttaatggattcaagataatcactagtggctactgattactatttgatgaaaacaaaaaaaagattcaagataattaccgcaaaatccacactaatggcttctgaatactatttgatgataacatgaaacgcattcgacataatcatctcaataaaaacttgcaaccatgcgtgagaatttattacaaagctggcaaaccatctaattaactttaggcttctaaagaagcagcgcgacagccgtcacggcgaggacaccggctccaccggcgaaggcaacggcggcggacgaactctcctgcgccggagccggcgcaggcgaagggtagtgcccgtagtagctaggtgcttgagcgccttcgtcagcgctaggcggggacggcggcggcggcggcgactgatggcggccgtcaccgggagtaggagcaggggaatactgaacatgcgacgacggcgccggcgccggcgccaggtggctgttcgtcccgtggatcaccgctggcgctggcgccggcgcgtgggccggccacggccagctggagtgcaccggcgccggagcatggcgatcatgatgcgaactcggggcgtgcgccggggcagtagcagtagcatgacggtggtgatgatggccatggtgatgatgatgatgcgaggggcttggcttgtcgtcacggaccggagccggggctggagcgtggtgatgccactctggggcttgcgctggctggtccgcgtggactggcgccggcgctggtgcgtggtggccgtgagcgccgtggtcgggagcgctcggcgactgagcccgcgccggccacggggcgtggtggtgagggtaaggcgcgtaggccggcgagtggtggtcggcgcgcgcggccgacgccgcagccaggagcgaggaggccagcagcattgacatcaccaaggccattggcgagatggaggtggccatggagagaagctgtgaggttcagagaatgcgagctacctcgtgttgccgtcgaaggcgagcgcgcatatatatagtcacaattcaaagatttgtttccaaagattaaaacttgggaaacgttgctgattatttgtcgggtatacttggcaag

SEQ ID NO: 29228 - DNA, 4734 bp, Oryza sativa
  unsure (1)..(4734): unsure at all n locations
cccccccccccccccccacagaaaccgatcttattgattatcttaatattggcataacttacgacattcccccaattcaaaagtttctttgcattctggaacaggatgaataaatttccttgagaattggccaattcattattacaaggttacaacatcattacaacaactcagttcattggtggcgcacatctgctagtacgcgctacttccatagaacaacacaagagttacagatatcgatatagagttatatacaggatgaactagatgatgatgagcgaggcttcaaggataccgtcagttgattaaaaaaattgggaatgacctgaggttttttagccatagcacatgatgagttgagaaaatctaatttgcataggcaacagttctctgctaatacctcctcacgccagctccactgttcattgaaaacttcaactttgcatatgttctttaccaccaggtttgaaccagaggtttctcaaccaatggagtcgagatctaaaaccatagctatgtaatgctatcgatgctggttgttacaagcctggcagtttctggcagatctggggttagcatatgtgcactggtcacacgtccaaatgttgctttcatcgacaccacggctcgagccacctgttttggagctggtactggatgctctgctcttgctactcttacttttactgccaagactcttcgaagttgcgctcttgctgcatgtaccatggctagtggaaggacctacatcatttaatccagtctccaaagcccggacaaggttctcgaaataattgcgagtcacactgtcaaataaagagagaacttcagatgaagatatagtacaaacaaacgaaatttaaatgatcatctttttacaattaggagtgatcatgtcgtcaaaacaatcaaagaaaaccttccaaaggacacaagcatccgagtaataaggataggaaacatgaaaaacagaatgatctgtagtacctagttaatccagccaactttgtacggaagtcattgaaatcttttgagggagattctgcttcaaggtatacttgaagttctttctctgcacattgatgcagccgctccaaacctgattccgcctcacctagataaataagcaacaagaataaaccagataagtaactgatacttgcgtatgctatttagtattacagcaaaactacgaaccttgcagatattcaaagaactgtcttttggcatgttcatgctctgggaggtaaaaaccataagcataagtccacttcaataccctcctacattcgacaatctgcgtattgaaattattaaactcgcccatgagagatctaggaggcttatgagagaactaaacttggcaatgaaaactaacctgtaaccaagcctctatgatgaacttgagctgtgactctggttggctttgtatatcacttaacttttcaagctgaaaaatgatttgtgaatgtcgctgttagcatatgttctggacaggctggagtagctgtattataaatgattaatacatgaacctaacatggcttcagtacttttgggtgaaattggatataaagaggataaaggagagataaatataaagtatcatatttatataccttgtcggtttgcaaactcagcagatctcctaatgccttttgcctcgactgcataacgagaagatattaagaaaccagaaaagttcttcttgagtattgattggaaatcttttttactacttatgtaaaacacaatgctttgttcaagtaacttttcttgtacccaataacttaccgactgattggctgcccaccgttcataatagtgtgtatatctctcaagcgagttctttgccatttctcttctcctttcagattcatcatactggaaccagtgcgaagcagcacaaattaaccacaatattaaataaaaataataaagtattaagaaaatatctcagattagaactgtaccgctccttcctgccttgctgcctcataacggttacaggcataaaatccaccagtccgttctccatgctccgaccatggaccaagacacagcctgcgttatatagaacaagtacatacaagccatatgagactgcaagtgctatgaagagcataaacagagagattatgattacataccagcaaaactcaaatttgcatggaggtgtgcatgtaatgtgcatgcatccctggtttttttcaatgggccgcttgcacttaggacaaggctttgaattagctagaatcctgaaaccataaccaacagaaagttcaacatagttgacacaagaaataacttgcagtaaaaacataagaactactactaatatgacaaaaaaataaagtcaaaatattggtgtttcagaaaatcaccaaacaataaaatagcaaaagttttcagaaccaaaaggaggaatgagattaggacaaagttttcagaagaaagatcaaatgcaattaaaggaacaaaacttacaataagaaaaatgtcagtagtaatgaaaaagaaagctgtgttattctgacaataccagttcatattttcagactccgcactgttcttgaggatccactttgaaacagtggcacagtctaccggacgatgagcttcctcagtgcactgcaaattttatttcaaatggtttatgccctgctgatcacaatgaaatgaaatggcaggtccagtactcacgttccaacaaaagccgtatgaacagttgcagttcacatcatagctaccactgcccatgacaaattctacagcatattcacatccaggagcaggacaccattttgtctgttccaaataggaatgaacttaatgaacatatgcttaaaaaaatagatacataaataccaaaacttgagaattggccaaatatagcacttgatcatttcctatgaaggcattcacactaattacaaactgtcagcaccatttcaaaaatatattatgattgccacattaactgtaagaacatcaaggtttattcaaaatacagagagttcactccatttttaggaaaaacaagatgcaaaggcaggagaatggctggtttacataaaacatataataattcacagtagcagccatacagattttcatttattcatttgtattatgatcaacctaccttcctattatcttcaatgtaagatctgcgaagatatcgcccatacttttccctatcctcgtcatcagccagtgaattgatcatatcttgaccaacagcagctgtgcaggacggatcaggacatcttaacatcaagcatcctggaccatcatttatagaagtgctaatataacctgtcaatgtgcactatgtaagtggtgatcccacacaaaacagaatccggggttgataaagagaaatatctcaaggttagattgtcaaacctctccaacatgcactacagaacggatggccacatgcagcagcactcattgacgtacgaggacaattttcgaaacaaattccacatgtcaactgtcaagtgaacaaaatgtattagtattgaacagctgatgatattcatgtgttctaagtaatgacaggtaaaaaccatcacaaacaggcaagagaaaaaatgagatatgaaatgtttgatgcacattcttcccacaactcacaagtcacaatgtatagcactatagtacaggcaaaactgagtgccaatacatgtgtactgcatgacacaagcatactatccatttttttctcaaaaaatcctggctcgcaggcatacaactgctagaacttcaaattgtttgtacatcccccaaagtttttaattgtttaactagtaaggcaaaggcatacttctctgtcatttggcatttcaatgagcttttccggaaaaccaacaaccttacgaacatgttcttcatcagcaaaccattcatcatgcaccttactgacactcctgcaggggggcaaaaccaaataatagatgcatcattctttgtgctctgcttcantatggcaataacagatgaagtacttccttcgtccacaaatctaagggattctaggttgtttcgcagagttcaaggttgaggtgaaattactttgatgcagggaagtttatttgattgggaaagatcacgcctagcaatgcaactaccaaaagcaaaaaatgcagtagttggatagattaggaaagtagtactccaaaatcccttatgtttgtggacggagggaatagcacatttgggctagattacatggtgtactgcattaatgagccaatgcagcatgaaataatatcccacgaccacgattaagccctcaatacaataaattttgataattcacaaccatgtaagtttaaatcagtttgtttattaatagcatgtccacgagtaaacaaatatgacatggacatggatgaattatcaggtatgagaatcaaagacataacaaacttgatacagatagagcaccaaaaaagacaaaaaaaaaaggagtatgaggcagcaatgtgaaggcaggtaatggccattaccagttataattacgaagaagaacacatgcttctgactttgaaattgaaagaacagttgaaaccctatttatatcatcctcttggcgctgttgtatatcggcttcacttaatatactgtaattttgctggggcataaaaagttcatataatgttaaaatcacacataacagaatagcgctggacaatcagttcatataatgttaaaatcacacat

SEQ ID NO: 29229 - DNA, 14253 bp, Oryza sativa
agtacgatttttctgttagctcatatgatgcaaaggcctcctccagcttttggaaataagagatttccatgagatgacctaaaaactgttggaaagtcgtctgtctttagggacaaataatcattttggtatattttcataaaaacaacatacttcaggaaccaatagcaactttcacacaaaacattccttataactgaacagaaagatcaactagagaaggccataaaaaattctttgacaaataaactggtcggcagtgagcaggatatagtgggatagtccacataagacattaagacataactcaatggatagtatgtctaactcattgttggatggagacctcggcaagtcggcatcagtttatttggctagcttaggtgacaagaaagcaagaaataagaggtgtacttgtgcagatggaacaaggaatagaaacaagcgggaaccacaaaagctaagttaggaaggatattaattaaggaggcttctagacagcgtaccaacaaaaaacctattatccacaagtaataactaataaccgcagtgctttcaaaatggaatcaagcacccatacaataatcaatatcttatctagaaataaattcaatcatctacaaccagttagaactaaatctgggtaaaaatatgcaagttatagcattttgtacctaattagttgaagggtacgccacagaaaacattgtgctcagttcctatataaacataatagaaaccaagtaccaacaccgtatgactgattggctattttactagtgagtcctacttcatgaagacaatttataacctgcatttccaattgaggatcagattttggagttacctcatcctcatgagatcgcgaccctttgcgaataatggcggttgtttcagtatggtaaggatatggatatatccacaattcatttacagttatgccatagcctatttcctgtagactatctttatcccatgaatttctcgatttgtcatggcatgcttgtattaaattaccatgaccagaccaaatatcgtcaatccaaaggtacaaagaactacagactgaactactaactactacctatcatgagcttactacctccacaccaaatgaccatgtgccaatacatgaaaaagaaaggaaaacattcagagaaacagatgaaggaaggtttgaacatgcagttcatcatctcatttgttaggacatcacaaattcttcagaactacaaggagctccagtcaactatggttttttggtacatacagaacattttttttgctgccacattattaatggctacgtacttgaataggcctagcatgagctattgtaagtttcttcctttggttgttctcccttcatttagcgcatctgccagtggataatcgaaaatctacacattacatatccccgctccccaccctcccaaacaatacacccatagaattcccattgtttttctgaaaaaaaaaacataaaactcccattgtgaattgcaaaatccactaatcttgtgattagtttacatttgtcctatggaacatgatgtagttgttgatgacagagtataagacgcctactgccccacatgtattttattcgtcaacactattgcccacaccaccaaaaatctcggatccccacacttcctgtaagaaaaataaatgcaaaaatgtataaatgtttcagagaggtcctagctagcatcgacgcattgattatggatggcagccaatgcaatatcattctcccggactacatcaaaatccaccaaccaacgaagcatatacgtgcagcatggcagcaaaccttcccatcgatcgcctagattcacgatcctgcaatttccgggcattcccaccccgtgacagatcgaaccacgagctacgcccccaccacccccacgccattccaaagcactcatcgcccacagggcgcgcgcgaacccgggatcacctgctgccggtgcgagaggagctccgcggaatcgtcggagtcgtggtcggcgaagtcgtagtcggcgtccccgtcgtcgctcccgccgagcccggcctccccgccgctgtagaagtcgtcgtcggcggagtcgttcgcgtcgagcatgtcgtcctcggagtccatcgccgcccctcccccgccgccgccgccgacgccgcccccgctcgccgcgcgccggagccccaggagcagcgcggatcgggcggatcggagcggcgcccaccacgaggaggaagcaatcgggcccgggtggtgaggcgcccgagcggattcgggccgggggggcgaggcgagaggagggggtgggatgcgaggcgaggcgaggcgagaaaagggagaggaaggaatagggtggaaatggggagaggatcgatggattagtaggtcggattcgcttgctcggggctgcacaggaaggaagctagacacgaatgcaagctatttccctctcctttttccctctcgtctctttgcaccttttttttcgtccccttgtaatagtgttttcgtgtgtttttgttaaaaaagcttttctggcttgttttgtttagtactagctgcttttgctttcctacaaccgatggtttcctaccagctttgagtgtaagctagctggttagcctaggcttcagattcaaaagcatcgtgcacacagtatcaacgacgaaaccagctaactcgatgcgtgctaacttggctgacatatgggtcacatgactaggggggccacgtatcagccattcacaccagaagacagtatgtcagtggagtcttgatcattaaaaatctggtatgagttgagtttaatgaatatgatagaaatcacaaaatgtatactcgtagtgacaaacctaataaatttatcttaagtacactatgcataggatggatatgactattatcatatacacttgtaatacgagacatttaaagagtccttaatataatatcatatgtagttacggggctggaaatttttccaataaaccaaacaaaatgtatatgggtgatcgaagatgttattgaatgttttagtaacactaggcaccttgcaccttgtgcgcaagcacgaccacctgtctaagggcaccaatcctttgggccatcaatgatcatgcatgtgcggaatgaaacaaaatgttccatgttgcttgtaaagttgcaccaatgtacacgtagacatcaataattacgcacaaatgtgtttccaattaatgaaatactattaattatttgagtaaatacatatcttgtattaaagaaaataactcttacattattgatatggtgatgctatcctatcctatgtatattactatatagttggagcatacttaatatagttattactataaatttaacatgcattgagccatatcatccataaacaagagttgttggatcatgcacatacctttttttgtgagaaagagagtacttcattgatagttaacaaaaccttgtagtaggtaggaacatgctcccgccataacgcacaatgcttcgttctgctagccaattgtgctaactcatatgctaccttgttgcatcctctttcggtacgaggaatcttcacctttgatagcaactcctttgtacattgcacatcaacgataatatggcaccatctggatcggttctcttgatgagactttggttcattaactataaataagcaatttgtttctagcactattgacctatgaacccatttggtggctagagcttaaccttcacgacatgccaatagttccaattcttccgccacactccatgttgcatgtacttccaagatgatatataacaagaatgaatcggagctatcacagataattacgccaatacctgcattgcctaaacttacacaaaaaaacaccatcaacattaatcttagccgaaccatgttatggtaattcccaggagttgcaaccattgcccgatgtcctacttatctttgggttagaggtagtgatttgtattgcacccaaaactcctttgctttattggtcaggttcttgtcccacggtttgcacgaaagggagtcatggtagacttgtaccttgtaaaaacgttgtagacctagccatcacctcttcacctttgccatggacaacatcattacataaataccaagctctacaaaacaataaaaggatatgagttcttgagttagttggaacataacttagaagcataagcagccaatttgtcctggaaaaattaaaagaactttctcatgggatatattatttcctgcgcattgcatgtcacaaagctttcgcctttgtgcatctaaccactgcatgaaaactattcttagatttagatcacatattgtacacttactagatgccactagttgtctgttggtatttcttacgatcacagataaaatctgtaagcgcacggatataccgctgtagcacttcccctacggagtattccaagggtatcgaatccaagggaacatgtatggtcatatcttcctccggttcatccaaggacaccaagcagatgataggccaggatagagaggatttactagtgagaaatagtgtctagggaaagcttaactttaatcataatgcaatacttcatgcactggcaacccgcggttcccagatgtcgctctactacatacccgaacaggagggacttaatgatttcgagggctgtcaccacctctacacctacctcaaacatactgtgggatacgcagcaattactggataacaattacctaaacaccacgtctaagcaattaatatctactttagtgtttataactcaccaaagcaatcactatattttaacaataatcccatatgctatttaggaactaaccaagagataattctcacaagataaatctaaattactcaagcagaatattatattgaattcagagtaataaacagaataaaagaaataggagaagattaccgacaactctggaattctttcgacttcttctactctactctcttcctattctagtatataatatagtaaaatagagcttctcataattcagctcaagcttggaggtgtgtgagtaaagtgagggagtgatgtctttatatagaggtaggtataacggttggcaaagggaaaatgtccgaagtgccctccaaccgtcatcagggatgcatctgggacgtccacgccaaaccccacatccaacggtggaggtggtggttcggccgaaccagggggttcgcccgaacctgggctgggtcctcctggccaggctcttggcccatcttccccctggacctcctctatctattcttcggtgttttgggctgattctctggtatttctatgaagttcacaacccatccttgtatgaatacatatcccttctcactttagtatgattttccttccaactttaggtttcatcacccgcatacaaatacacaccaacacttgtggaatatgtgagattaagcccctttcactatgttggatgttctattatctgaactttatgtaggtgttggcggtatagaatcgacatttaatagccgccaacattgtatttgaaatttattagcttgagtaggaagattgtctcgtattaagtgccaagtgaacactggggcacatttgttgtccatatcatggactaacaatgtctactcctatcacttgcgttgttagaaggacttatctcttttagatctctttcagctagatatcatttttctcatagcgccaggcaaaaaaatctttgtaggcattgcgcaccgaaagataccatttttctcatagtgtcaggcaacaaaatcttcagacatttagggtaagcttgattttttggatttcatcagcatcgagagtgaaaattatgtgccgaatcaaagcttcatcccattccttttatctgcagccatgagttgatatacccactttaatcttgatatcttctttcttgcctgtcacctcaatccaacacccttgggattcactgatctcaccaaatccacaccttggcaccatcacttatcctccatattagtcatttttttcaataactcaaagccatatttaatgctcttccaagtaactggagatgttgaattaaaaactgtatcaatgatgtcaccagaaggatataaaaatttgagtgcaaagactcttaggaaaaactaataggcgccaggactgctgttctaataacgcttggttgaatagtttcatatcatgaaaacccattccaccttaatttttagggagcatcatgtggctccaatatcataagttcacaaccatacatatgttgaccatccattcattattaattgatagaacaaataatctacatcgaccatttcattgtctcaacttaacctagctcttcaagtgttcttaggatgatttctacgttaccgcaacaactcacaaaggtatgcactggtatgttataagattccttctataaaatatcttatgttgtatgtgcttttatggaaagaaattatatattactcatcgaagaaccctcaagtttatcctactttgccattaggcttctctcatgcggctggtcaatttttcttcatgtgttagtacatcacttatgcaattgtttttattgtcgacttacttaccttggccattatatgtcatacctacaatggcattgtggcaaatgagttatccttatgtaagcattaaacactttcaatacatcgagaacaccataggctcatagccgacgaggtcgaagattcattctttgctacacaccaaacttgttagacgccttgtctgcatggatggcctcaactaattgtcagacttataaaacagttgtgggcaaatagtgtgacagagactttcgacgtggagactgcttgaaggaagaactagagaataacaacatgagttaaaatagactagttgcattggttttttttataggtaacatatgtttggagactgatatgatacaggtgctcgggctatgttttccaagcgtttcgagcacgaagactacttgattgttccagagtattggcaagtgatttaactagatttaacaaattactagtatgtacttatgtatccacaataactttgtaactcaccacacaaatagcatgggcaaattttcaagactggtaaatagctaacaacacatatcttatatgatcacaacaaaaagaatcgtaatgagtggtgaaaaagagaaactacctccgtcctaaaatatagcaacttttagctatgaatctggacacactgttgtccagattcatagctaaaaatgcttacattttgggaccggagggagtattgaacaaatgtgaagacatgcgtttacttccaacttccaaggacaaacgcaaattgcaaaaatgggttattcaatggctctctgaaatgattggttctctagccatacctggtcatcaacaataagagatgatccaagggtattttaaaatatttcaaaaggatgtttttttttgctgcctagtgggtcctcctatcggtgcgacccgatgagcgatggtcacgagcttgcgactcggtgaggaggcatgctttgcagtgaagcccatagccactgaagctcaccagtgatgaaaaacatgagcttaaagatgattttgcatatctttgttaatggtacctctagtctctctctctctctctctctctcccttagttgtcctccagtggtaccggtagacggcaatgcgctagtactccacgaccaatggatagtgctctagggagagtgcaatgtcagaggggcataaatttgggcatggtcaccactgtgagctccatatctttgcatgcctcgaatctaataggctttgtgtcgtgggcttcgacaacttatagcaaccttgaaaacacactaggtggaaaatccaggtaagcaggttatgtagacatgttcagataagctgcaagttattaggctcataaaaagcagaaccccaaaaaaatggctatgagggcaatatttggattggtgctaatttggattctattaatattttgataacttcgacaatactttggtggaatttggattaagaccgattttttcctaggtggtagcaaatctactctgtcaaatttggtagtgcctaggttttgacactatcaacgttttggtagggcttcaaaccaaaccaacattgaatttgttactttatgccttggcctattgaatcgttcttgttgaattcatcccttcaaaattgggccttgttggatggatgaataatgtattatatgattttgtgataatatttaaatttacaaatggataaattaactactctaaagttaaaaggttgttttaggaaaaaaatattctaagcaatttttatatattttttttcaaaaaatttaccatctaggagaacataagccaattatattaagatcgtggaggaattttacataaccttacaaagccaacaagttgcaagcatgcagcctgatgggagccgagcaagacacacctgcaaaatttgttgtgactttattaggggaaagctacaattttacctaagggttgcccccgtcagtcccgtagcacgccatgtccaccagtttttttgtgatggctaacccacttagcgatctgctaacaccatcgaaggtgtttcgctatctgcaaattatcgaagtgactaggctgatggtcgtgtcgagcactgctctactttgttttgccatggcttgccatgcttgggaccaccaattattgatgatatgctatacctatggcccaattgagaaattcagttgtttaatattctcctgaacccgttgggtgtatggatattgggtgaacaagtgtgcacaaatctggcaatgcgacagtcgacacataagggatggtatggacaacttggctagacacaaggttgtgtttgtccgatgttaggtgactgccccttgttgctaagaacacgaagaactttgcatctacgtgggatttttgcttttccgaatgaatttgccacatggagccaatgtttttcccaaggaaaactatccgataagcagatgtaaatgaacactattcattcgaattggacttccgacttagttcgttggtggcattcgatttcaggtcgatatttaccgagaccaccaacaaattggggtactccaacaatgtctgcttagagagaagccgcgggtgtcggcgtgtcgcgcatccattgattattgtgcatcgttgcacccctaatctcctatcccttggaacaaaagagaatatggcagggttgtgcccaaggtaatctataattcacagggggtctaagatcaaattcaatggctctctatgaatgtctgcaactcaaagaatcaataaacatgctgcactatcattctatgatctatcagcacttcattatcagaacatgtcaacacctgttgagcttctattaactaaataatacttactcaaagaatgttccgtggtgcatagatctcgagggtctaatatcgagcacgttaggacacatcctaactccacaaatgaatgcaaatggtgagttggtgaccggaacaaggagtgggaaacgacggtgatgaagatacaagctgtgctcgagcttgacgtgtgcgctaaggctgctagggcgctggatgctgccaaccctgctcgctcgcggagtcacgagcacggccaccgcagtatgaaaagcgccgaagacgcgggcttaagcctgacgagcatggtggccaattgacgaggtgtactggaacgtggtgttttggcttggccggatgctcgatgctgcatacccaacaaatcactaatcaggccccgttcgaatctccaacaaaagttggataaacttttagataaacgtggcacgtttttcaaactattaaacggtgcgttttgtgcgaaaactttctatatgtaagttgttctaaaatatcatattaatttattttttaagtttgtaataattaaaactcaattaatcatatgttattaccatctcaattcatttttcaagtttataataattaaaactcaattaatcacacgtcattaccatctcattttacataaaacatttaattttatttcatcttcatgactcaaacaccacctcagtgttcacccgtgcagcgtgcccagctagggcaaagcagtggaactgaccgcccaggagaatgacgtacgacttcaccagcgccggtggcacgtgcaaaaggcgcaacaagcgcaacaagcgagaggccttccttcgcagccgtggcgcgggggccctgcgacgacaacgacgcggccggtttccgcagccacgagccgctcacccatccgccacgagcgcatctccgtcaacctcccacagggcaatcacagccgcggtgacgtgactcgtgagaggcggcagttgggctggatggccccccgggccacccggtcccaggcggcggcgacacctcaccgcgctgatccacacccaacggacgcggatgcttctctgacgccaacgcgcgcggccggacggaataaacagatcggataatggcggagatgtgttcatccgagcatctgaccgtccgagcccgagccacgtttcctggctctccaaggaccaaggggctttcggcgatgcggttcagcagaaacggccttcctctcgtcggtttcgaagcgcgggcggtgggcccaccactggcccacgcacatctctcccgttgcgtctagacgcttttttttttcatgtgacgaaaaatgaactaataccggataaaatgatacggctacaactcattttgcagcctatctttgttcgtcgattaatgatttctccatttgcaattatagccttttctttttttctctcgttatcagcgacttcgtaagattacggaaatacattacaactttcagtaatttatttccattaaacttcttttgccttttgaatcgagagcacaagatctactttcttttgtggaggaatttcatcgatgtcatctgtgaagtgttgctgtatggattaccatcagctttgagtccgtgtttagttccaaaataattctttaaacttctaacttttttatcacatcaaaacttttctacacacataaacttttaatttcaactagaggtgaaagtggttcggatagtttccgtccgtctggaccatttttcggattcggatagtttcggtcggaactatccggaaattcccggattcggaaacgaattcggatttttttctcggaacgaaaacgaatacagtaagggtactatctgtcggaatcgaaaaacggtcggaactatccggatttttatctgttggaatcggaatacggtcggaactatccggattttttttatatccgcagacattgagcaaatttaaaaaaaaaacgtatatatacataactttttcatacggaatcagatggagacaaactttatatcaacattgtagagctcgatgagatctacaactttcttattgattattttattatttgaggtcatttaaggagtctaaatattcattataatataccatattaatttttacaagatctcagaactgcaattcaaacaacaacatctgatggagatgtgttccatatcaaagttgtagaactcaacgggatctaccactttgtagtttataacagttgtatttgaaagcatttaaagtataaaacaaacattacaagtttcgaagatgtgaagtaaaataaataacatctccaatttatacaatggtaagtaagttatacatctagtaaaaggtcttgagaatagaaaatgataatcatatttgcatatggatctctaagagcaatagccatgaaaatcgattttcacatagggttgtgggatcgtctataaaattgacgatataaatgttggagatgttgaactaaaataataagcgatatcttttccttaatcaagaaactcaatttgaggggttttttatatactggtaaatattcgctatcgtattcgttccgtctcgtattcgctccgtatctgtattcgataatattcgatttcatttccgtatccgagttttcgattccgatttcaattcaaaaaaaataaaaacaaatatgataattccatccgttttcgatccgatttcattcctaatttcaaccaaacacgacctgagttcaggtccgtggtccgtctctcgccgtctcgcggtctcgctcggtttccccctccgaattccgaatttccgatccccacggtggcgtctccctatatctttcgtcaaccaatcaaaaggaaactcgaagcgtatcggcttcatcgccaatcgatgatgcgacgatgctgatctgatcatctgaacccaacaaaatttctccttcaaaacctgcaagctcaccttcttctcccccagctctctcctccgatcatttgcccaaccaccacccagcccgccagccgtgcgagcgcagctttcctatttaagccgcgcctcgctggctcgctgccgctgcccctgcctcttccccgaatgctggtctctcgtcgccccgtcccctggaatctctccctttctaccttggtccgggaccgcggctcctgaaatctctctctgtccctagaaatttctgcgcgcgtcttccgttcttctccccggtttggttggttcccgagcctgtgacctcgggggcggccgaaaggttggattttgtagagcaggctttacttgcatctgggcaaagattggattttttttgtggagcgattttggggtcgttgttttttggtgcttgtttgctgaagtttggattttgggaggagtttggggggggggggggggggtccggtcagatttggtgggagcgaagggcatgacgatcgatttgtccatgcccggaagctccgggctcctggacgacgtaggggggaagaagcacatgaatttcttcagcaaccgctacgtgctcgcgctcacgggcgccgcaggaatcggcgggttcctctttggctacgacacaggtatatggttgcatgtgtgccatttaccttccaacttttgcctgaacgtttcatcaagtgtagctgttctcgatgaatttcccctcgcagtaataagcgacatgtttttggttgctttggacttgttgggttacttcattttcatatgatgaaacattcagatggtgtttggtccaatttgatatttgacagtatgttcaggaagcctatggttagatatcattgatacaaacaaacaaagtttgaagtggaagtctgaaatgagatttatgaatagtggacttattttgttgagttcgtgctatgatctctacagtactgcataaagatagatattaattttagcagcgggatgaaatcaatgcttgcatcattcttattaatttctagcaaaatcttcgagtgtgtgtaacttcacagaattactgtactgtatacttttgccaaaaaaaaaaaagaaaagaagagaagccagtatgataaatttgtgctcttagctaagaaatttattctatcaggtgtcatatctggagcccttttgtatattcgggatgactttccagcagtcagagacaattatttcttacaggttcaatctaatctagtacaaattactggtcattaaccatatggcacgcctgcaccaactgattttggttcttccgtaggagacaatcgttagcatggcattggtaggagccatcattggagcagctggcggcggctggatcaatgatacatacggccgtaggaagtctactcttgtggctgacatgctgtttgcacttggctcacttgttatgtgtgctgctggtggtccttacattctgattcttggaaggcttcttgttggcttgggtgtgggtatagcatcagtcacagcgccagtttacattgctgaagctgctccttcggaaattaggggaggtttggtgtcaactaatgtactcatgattactggtggtcaattcttctcctacctcatcaatcttggctttactgaggtagacattcaacctccatttaattagcatattttattccattattcctacacattagcagttttcagtttaagttcttttaacattcaactataaacggaacaagttcaagctgaaaacattgcagttgaaatttttttattgagcttccacaaaccaggtcttgcactgccatggggaacttaactgttaactgcaactaagtatatatatgagctcgcatcatatctttaatgaaaaaataa

SEQ ID NO: 29230 - DNA, 1387 bp, Oryza sativa
atgttgttgtactgacatccaggtggtttaggctctctttgcagagtagatccaatggaagagtgccggtaagcgcgttacccgataagtccagcattgtgatctggggaagaatgttgccaatgccagaaggaatggagccactgagtctgttgttagacaaaagaaggccttgaaggcttgccaatggtacaggccatggaaggacaggtccacccaatgcattgaagatagatcaatggttgttatgtttctcagctcagcaggttccacaggtatagtgccccttaacaagttgtcttgcaggtgtagctctaccagtatcgaacaattgttgattgctctcgggatgtgaccagtcattctgttccgcgacagatcaatcaatccaatgtgttgcacgtactccaattcagaatgggactcgcgcgagaaagccacgcatagctcagaagggatagcgcctgacagccgattccgggacaggaccaaggtgttgagctttgtcaagtgaaatatggccttggggatgtgccctgtcagattgttacagctcaagtccaatgtgacaaggtttctgcagttgaagagctgtattggaatgtcctcaaaaagcatgttgccactgagagacagtgctgtcacattccttatagccccgatcgatcgagggagaggtccttgcaagtagtttcctgtcgatgctcaacgattgcaagctcaagagcttaccaatgctctctgtgatcatgccagttagctggttatcactgaaagagatgtccaagatggttgatgattcccataacctgtcagggatcatccctgtgaaattgttatgtgacaaatcaagtgacaccagtggtagcaaagctaagtattctggtatctctccgtggagatggttatctagcaagcttagctcagtaaggttcttgcatcccttaaatgtctcatcgatactcccggtcagattgttatcattcaatctaagtatctgcagaaaggtgccttgacatatcttggcagggatagatcctgacagccggttggattctgcagagaaactaaccagatgtaatggaagacccggtagaggtccgtcgaacatgttctgcgcaagcgatatagatgaaacattactccagttctgaatccaatcaggaatgtggcctgagagtctgtttccttccacatcaaacaagacaacggcaactaaatctgcaagttcttcaggtatagtgccagtgaagttattgccggacagaactagagtagtaagcttcttgcaattgccgagttctttcggtatgctcccagtgaaccctgcactcttcgcaatcagctgcctcagattgcgtagctcaccaacagatgctggaagctc

SEQ ID NO: 29231 - DNA, 1225 bp, Oryza sativa
atttaaggttttcgtaatttcccatttttaactttagttttgggccgctaagaatctatactccttataaaagagagcaatgttgccacctcaccaagtttttttttatttaccgactaccccatcatgttttcttccaattactctacatgctttaatgttataaaataatccttctacatatgattctatcttatttcatctagaatgaaattgtcccaaaaaccttaatttgttttaatccgtataaaagcatgattatttagctagtagaaatataaggtccatactctatagtctatagttatttatcgccgcttgtacacatgtctttgtcttataagccgctactcgcattaaacgagagatatattaaaaaactactaaccgaaacgtaattacttgtccgatagtagaattgacttgcgcttactaattacgtttcggatagtagtacaactactccaactttaaagtttaataaactccaaaactgcacgcttgtactgctatggtcgtagtagagcaagtataatagtagactataagccggttaaatattgaggtggaggagaaaagagaggagagagaggagaagcgggctataaacttacagccggcttagacacaggaaccaagaaactctacgagagagacatgtgagccctgtattaattgtaaggagctaactattatatgggtaggctgagagaatgctacacagaaccttataaccaacaagtcggctgtattattaggcttgctcgtagtagaagtaaatgtacgtgacccgaggccgcacgaccgaatcgaaaccaatcaaccaaacgagcgggtcggaattcgggggagaaagaaatggatcgtgcttaccaaaaccgcgtcccggtctcgcggcggcgccggcagccggacgtagcagccgcagcagcctaccgcagcagggggatcccgcggcgcctgcgtgggctcgccggagcgaacgcgcaggaacaggacgacacagatcgatgcgcgattacgatccgtacctgatttggtttgatccccccacccccaccccacaatgcggttgccggcgaacggagcacgaagaccggtggcgcgggcggaggcgcgaggtgcaatcaacgccggcgagggcgagcgggaggcgaacgagagcatgggagccatggcgatcgacgagaggggaggatttatagtggggagagggagagagaga

SEQ ID NO: 29232 - DNA, 1035 bp, Oryza sativa
tctcaaccaagaattgcacggaaagcaagccgcaacaactgaatttcaagaacacgaagccctccttatcccctcggacagatcactccctccgagtccgatgactagtcaaccactaaccactgagccagtgattcttggggagaagaggagtagaaatcggcgcccttttcgtgggcggataagaaaaaagggggcaagaaatacgcatcaatcatcgggtaggatgagagcgacggcttgtgggatttcttgcacccaaaaagcagcaacgacaaggagcgacatgaaagccaagccaccattgaagcatccatccgtccattcgagatccagcaaatccatgtccggccatccccgtgacactagcagtgagcgccgcttgcttgcacgccggagctaccgctcgtcgtcgaattacgacgccggcattgtccctgtcaaaatcgcagcaacgaaagctggccgcggcgaggggcgtgtgcacttcacacaggcatttttcaaaaaattttttcttcgaacttccaacttttccatcacatcaaaactttcctacacacataaacttccaacttttctattacatcgttccaatttcaacaaaacttccaattttgacgtaaactaaacacaccctcagtcgtcgctgatcattttggatgtgtttcccaacaaacctccgtcccataaaaaatcagcctaatactagatgtgatatattctaatactatgaatctatatattcatctgattcattgtagtgttctagatttctttttttatggagggagtacaatttgtagagtaccattaatttacaatatagatttaaaaatatgtattataaaataatagatttaacaccatttaaggtagttttcatgtttgaaatatatatttcattttataaaattgaagctaaatttatagttttgtgatacacatatttcaatatgtacgtagttttacaataatttgatcaaatgtagttttataaaatttactcattaggagtcattaggaggttgtcac

SEQ ID NO: 29233 - DNA, 1202 bp, Oryza sativa
aattagaaggacaggctaatgcgactgcatgtctgcatgctcgcagcttgctcaataatgtggcatcagagtgcggaaggagtccaagattcaacattaattgcagggcaatcagactgaaattcccttctttttttcacggaagtttcaacattgaataataagaactttggtttccactctaaattagaaaaatgtgtatttctgtgcatgccaagcaagtaatgtcacctgtgttaatgcatcaacaagttctccatctatgttgagtgcttctgtacagctacttatagcctccttgcctcttccgagtttaaccagaaccttacatagcccaagataaagatgtacattgtaagaagtatgatctggatccattgctagggatgccttgtagtcctcagcagacacacgtagcttacccttggcagcattatcttcagcctgcatgcacaccatttgatcctattactatgatgcagtaagcccctaatttgttgatacaaagaaatcatactcacactcttagtcttcttcacaagatttttcaacccaaaatatgctttcttcagttctgaatgttcagggtctagacgaaggcctttctggtagtgcctaaacaattaatattgtcatcactgtacaaatatttaaagctagcacatttatctagtactgcatttgtgtgtgcaggcacaaacaagcatgcacttgtccaaacctaaaataccagacacgctttacctggatgcaacatcatgatcagcaaggtagtaatatgctcggccacgaagcaacaaggcatccaggttatcttcatcttccttcagaataaatcctgtttctgagataacagttgagtagtctttaagtgctagcaatgctttagccttgagaagcttcgcctgaaaaatccatttttagtactgcagcttactgagacaaaattagatgaaatatttatctgtccatggttcctactatcctctgaaatatacctttaagcagtctggagaaaaaacaagcacaattttgttgatgtaatccaggacttttgagaagtcatgagactcaaactggccataagcagactctaatgcattttgagcctgaagcagttgagataattccttttccactgaagaactcccaggttttagctccaggtatttgctatagtcaccctccgcttccttgaacct

SEQ ID NO: 29234 - DNA, 661 bp, Oryza sativa
catttcgaccaaattagctgatttgcaaatgatttccaccgtggtgtgacaaaattgcccctgtgaccatttagttgacttgcgtggaggagatggatccctgccctggcaccggcgcggctggggacggatcgacgcctccctcctcgccgacaacccaaactccaagctcactgtcacctacttctccccgctcgcctccgtctccctcgccccgtcctcccccatcgcttctccccgctcgcctccgtctccctcgccccgtcctcccccatcgccgtcgccacgctcccgcccttcgcgcagccgccgcggaacatcaccacgctcgccttccgcctcgaggtggatggcgcatacgtgggtcccgacgacgccgcgccgctcaagggcgggggcgttggtaccatggaggtccaggtcaggctcgccgccgtcgccgtcttcgatcgcggtggctggcgcacgcgccggaggttgggggcagcctttcccacccacgccggcgtcgtccccttccccgtccccgtccccagcttagctggcgtcgtccccgtccacagccacgccatcgagccgtgctgtgtatatgcaacggagaggaagaagagagagatgagataggataaagggtattttagtcatttcagcaagaaaaaac

SEQ ID NO: 29235 - DNA, 717 bp, Oryza sativa
agcgtttagctgatactctgagtactgagaatgaggaatcttgcacaacctacaacatgctcaaggttcacaatatcaaaccactctcctgaacattcaatctctctctctctctctctctcaatgggttcaatgcaatctactgcaggtttctcgcaacctattcagatggacaaaggaattatcatatgcagactattatgaaagggcactgataaatggtgttttaagcatccaaagagggactgatcccggggtgatgatttacatgctacctcaggcccctggacggtctaaagcggtttcctatcatggttggggaacaaagtatgactccttctggtgttgttatgggacaggtaaataaaatgcttctgagttctgcttatttaacactgctgcttttacatgaaaatattgcggtaacagtttgtcaaattaataccgtgattttagtattactttgcttgtgttttcattcgaagttgtgaaaatttgaattgaaaggcaatttatcaggtggcctgtttctttatggatcttctatttcatttacagggatagaatccttttcgaaacttggcgattccatttacttcgaggagaaaggagatagaccggtgcttaacatcattcagtacataccaagtgcttataactggaaagcagctgggcttactgttaatcaacaactaaagccaatcagctctttggaca

SEQ ID NO: 29236 - DNA, 817 bp, Oryza sativa
ttaagccaggcagccactttttttgcaaattctgaacctgacatgcctgctgcccctgtacctgcagcccaggttcatgattggatctcacagaatatatctgcttcactggaattctctaccgagaagtccatatcaaaggaagttagccagcaggttacttccgatataaaagatacacaatggctgatgccaatgctagtaatgcaaggaacagcacaccgactggtacaaatcctgcatactacagaaacacaacatttgtggaaggcttctccaaaacttctgttgtcaagcacgcgtctgatgtcaaaggacattcagtgaaggtatggatcatagctgcttaccataaactatttttggatgctgaaaagactacaaagatatgtcacttttcacatttctacatgtttgcattgtccactaaatcccccgggggggggggggggttaatgttgataaaaagaaccatttatgcgaatctagtttaaaacagtttcaagtgttttcatatgcttacatatcttgaatgtaataatttattctagtgctactcttagtacaataaagaatatgttttaatctctggatttccagtggagtattagtttgaaagggaaaaacattgttagccacatctgggtgattaaggagatgatggcttaaactggcattatttgggccaggatatgtaaaatgttaaacgaagcgaaaaatttagatagctatattttgggacgcggggaaataggctgctaagtagaattgggatgagaaaacaaatatgacaactgttctcatgatgaaaattttt

SEQ ID NO: 29237 - DNA, 638 bp, Oryza sativa
gattatgtacagaagtaagaacactatccaatataacatggaaaactagtgagcactgaccgttcttatggcactgacaaattggcttagcctggctaatccgcagtggctgaggtagggcatgagctgagcatcgagcaaaatatttgtcgctttaatatttccatgaacaactggaggagagcacgtcgaatgcatgaatctgcataagcttcaaaatttcaggaaagcttccagtatatgtctaaaaattgacatcagttcagcagaacaattaacagaaagccattaacactatgaggatgtgtataccctgcagtacaaacaaacagctagatgatttggtaggaatctaagtccacaaaaatgtacttactccaaagcataggcaactccaagagcaatcttcatccgagctttccatgacaaagccctggaccttgtggctgctgaaaacaaaatatcatcaagagagccattttctgcatattcatattgaagtgcacagtgcccaaactcgacacagtagcccacaagcgctgagatattggggtgcttcaaattgggcattttcccaagcatgtctatgagctcatcttgttccgataatgacagatctaccatgttgatcttcttga

SEQ ID NO: 29238 - DNA, 521 bp, Oryza sativa
atggttgatcacttgacctcagttaaccgagcgaagtggactcttttacatccaagtcacgcgtggctagatgtattaggaaccgtttaactccacaagtttggactcaaatgagccggcgtgagcatggagatgctgctcggaatgctctttctagtgaactctaacaggcaggtcaagccttatcttcccctgactaatcactttgtgcctttgtggtcggctccaatacccttatctttcctaaccgtcttgcattctaaaaagatacgcatcctggcagtgtatcagcttagctgtatagttcgttgtctggaaccccgggggtaacgatgttcgttagccagtgaccaatgaactataaacacgatgccatgctggtcctgatcaactcacaatgctgctcgattcagtcacatgcatgacatgcctgttctactgtgagtatattttcttggatgatatgtgctgaatccagcagatcccatccgtccgcatgacatactgccaatttctagaaa

SEQ ID NO: 29239 - DNA, 7360 bp, Oryza sativa
catcattgggtgagggcgacgacttgaagctgaactgcggtagccactaggtgaaggagagcactgaatgggggagaatcaatctagaatattctcatgggagagagcaaagcacactcatctgtgcttaataaaattggatacaaactcatccttagatagatgggatgacttggcacttaataaataagctcctactcaaaccacaaaataaacctaagacataagaatccaaaccaccaaaatagcaaattaacctattccctaaaggaaaccaaatgtcatgtgaacagtgcaccgtgaataatactgtatgctacagtgcgccgtacgggtactgtttctctgggaggccctatcctctgtattagctctttccctgttattatgcgtcgtacagggcctcccaaaaaaagagactttacaaagtaatatttctttgaaatacacctgaaaaagttatcacactttgctataatgctattagaagcctcttgccattttattgtttttctccaattctagcaggtctattggacatgatacctctggaattatccaaacaaaacatctccttctgtcagctcagactttgtagtagctttttgaaagagccaataaatcaacatcatattggaatcgctagagatttccactacctagattgaacagatcacaatatggcaatgacaaactgcctattggatcctcacacaatgcatatcaataattatggctttttttattttaaatagaaattttattgtccttgaggtaccaaattttagaccagaaaatgtggaccgtaaaaccactctattctaaaagattcaacacattcacaactattgctttcaaattcttcatagcaatcatacatcaagaagtattgcaaatgtgagtgccaatttgcagtctattttttttttgtaagtaaatgaaatcatacatgttgtatcaaaattagagaagactatgtaacatgccaacataaatggacgcatataaaaaagccactaacctcccaagatccaattcttagaacagaaccagggaaattggaagccttcaatttctctgaggcactagcggttccactatgctggacatctttggccttaccagcctgcacaagcttcatttggatcaaatccaccagagaggggctcttcttcagccgcaagcccaatgggctaggctcatcaaggaaaccatgttgggatgactgttgattggacacactaccaccgtctgtgctccagtgctgcatgacaccatgagaaaacacaatatatgattaaacgcggaacattaaagcaaggtaaccaatagtatatctcatttctcacttttaaatttgaactatttgtactataagaactaatttacaatttcatagtacaacgttatgaactaatatataacatttacttttccaatcaagttttatgtactaagtggcaaaaaatggaaaaagtgtgtttctcagatagggaaaattacaatattcctgtaagatcaattaactaaacacaaaaaaaggattggttcatttgttagatggacagaggaatcagtaacagtaacggagaacagagctctataagtgaaaagctcagcatgccaattattaaatccaaatgatgaatgcatgtgattagaagtaacaatatcataggaagaacggaaaccagttccagtaatgcaccaagaaagatttgtgatttgatttgaagcagcacatcttcagatcttcttgtgtatttatgccatttacatgcagggaaagtatcaggtgcaacttctcaattgggcggaaacatgcaacctatttatatgcaaatagcccctatcttgcgatgttgttcagaatgtttgcatgacaacaagtgaaaaggaacaaacagatatagaaactataataaagagcaaatagatataggaacagtaatttctcccattgctaaaagaatattaggtgaagtacgcaaaaaaaaaaaaagattacaagcaaagaaaagcaaccaatgaaaatgatagatcagctttttaaaaccaaagcagcattaatttttctgaggtgaaatcaaatagtacagctactggtttcgcacaaacacacacaaaaaatgagaaaaggtccagcaagtgggctgctccccagaagattagacagatcaacattttaatgttagtaataagttttaattgacaggaaaaaatctaaggtaaatttgaattcacgaggagaaaagctaaagtaaagtttaatcactaccaatccaaatccaaaaaggactctgtagtatgaagtgaccgccgatggagacctgtatagtgagagacataatacccaaattggaagactccgcacgtcaatatctaagccaactatggatggataaattggtaatacaggtaaatatcttggctaggtacagaaatcgaatcttattcgaaggagtttgattggataaagtcacaaataccctttcacttggactcaccaagttcagaattatcatctaatataatgagcaaaaatgatgaacaagacaaattgcccacggaaaaaaaaagaaaaggatgtatcatgcgaatcaaactttgaactaataatcatttttgttttcggaacgaactgagccaataataaattaacagcacggcgagaaaatgttaattgatcgtcacttgctcgtacgaatttcttcaaaacaagctgcccctccggccgctgagtcacaaaataatactccgctccaataataaattactcatcaacagtagtactagaaatagtagcagagagaataaatcaaattcctcctgtatgcggaatttcctcctagagaaacgagaggaacaccgaagcaacaggaaggagagcgaacccacctgtagagcaaggcgggacctcttgtggaacggcgacgcctctgcctgtgccgccgcgtcgccgtcgtccagcgcctcctccttgacatcccgccgcagcttcccctggtgcggcagatgaaccatcgtctctccgccgccggcgtcgttacttgtttcccaaccagaagggcaaaagagaaggaacagaggagaaaatactctcttcttgttcagttgtggtggtttctggtttgtttgtaccgtacggagagcgagagtgcgagacaaaccagcgagagatgaagcaataaatatctcggagatggtaaagcactgatggattagattggtttttcgtttcgaagcgcgtgccaactggatctggattttactctagtgtgtgtggtactgtggtgctccaccgcgaatttaccagactgcccccaccttcggccctgctgctttggcggcttatccgccaccgtagtctattgatagttaatgctcctatatcagtagtcgtatttaggatctatttaagggagtttttagctgctgcagctttttttaaatctccaactcttctaaacagttttggttgtcacctaatatgtaattgtagaatctaaaaaatgaactagaacctcaaaactggaaaatctcaaaaaaaaaatgaactaggacccatatagattctcataagctagctaccaactagcaaattctcagaatgttaagctccccaaatagagcctttatctcatcccaggctactaaatttttggacgaagggaataaagggatgttcgattgtcgaccatactttgtcacatgttgccacgttaaaaaaaaaggcaagtttgaggctgtttggttataatgatagttgtgacaagttgtctttcaataaattgggtttcatatatcaatgactcaaaaaagatattaataacgtttataactttaactatcaataacttcaaaactatttagtttaaaggcactaaaacaacatatatagatttgtctacaaaatctctactattataaaaattgaagatgtttttgtcgttactttggtacatcatctgtgttttgagttggtttttaagtttattcgcttctagaaatacaaatccgtgtttgagtcgattttcaagtttgttcgcttttaaaaatacagaaggagccgcataagaaatctctttagaaaaactcgcatgctaacctgagacaaccggaccagggttcacgattccgatgaaaaccggtcgaattccgcgaaattttgatattttgacaaggctcggaattaaatttcgattggaatttcgaaggttaaaaagtaaatttggtcaaaattcagtcgaagtttatcgaaaatcgtgataccgatggggctcgaaatttagtggttaactggtaatataaaccctggaccggactcctaattgcagctcatgattttatataaaaaatccaagcaaattcccgcagtgaatttcaccttagctaagccgcacaataataataagattaaaataactttcacccattgccacgcacgagcatttttctagtactataataaaagtgaaagatatatttttttattatattataataaaaaagtaaagatatattttcaaaacgtgctattatccaaaacaccaagaattacaaaatcggaggaggaaataaggaaaattgtctatatgcatgcatacagactcaattttgcatagatataataatattgtccatcaaacaaacaaaagatcaagagatatatgatggttaattttttttaaaaaaaagaaatctgatttttggttataggagtactggggtatggagtgaaggaagcaagggcttgtttggtttgcaaccatgctaaactattggcaatgccaaatcatgggtaagtttttgccaatgccaatattttagcaacatttatgtggtattgacaagtattggtagcaaactaaacattgccaaaattactgtttaaaatgctaatattttggtatggcaacttttggcttcaaacaaatcagccctaagggtgtgtttggataatgggaaatgagaggtgggattgggattgggaaatgaatgaagggttaggattaaatgaaagggggagaatgaatggttagcatttaaagatgtcttttggtgggtgggaaatcatttccctatcccatttgccaaacatggcctaactttgtacctctaggggcaaaagcgtcagacgaccgactcggcaattcgcacgaggcaggagtgggcccgggggggctcgccttgcgaagttgcgccgccggccgcaccgtgagcagctggggcacaacacgtggacgctgcccgctcttgttgtgacgtggttggtggacgtgacatggacgctccgcttcggtactatccgttccgtttgagggagtatactactgctactagtaggtggcttggcttgtggataaggtcgtggccggctgctaccaccatccataaagcgacaaattattgggggagaaaggaaaccagacttgggagtagtcgtcgtttccttctttcctgcctttgaatttattcttttttctgttgtaaaatgtcaagattttttctattggaaatacagcacctacgataagtactcaaatttagtactagataattttatcacaggaaacctaatcagttaactaagctaattgaactatgctcactttattatggtataaattttaaatcccggaaatacttatggttcgaaacggagaaaatagttaattttaggacaggggagtagttggtaattatctatactatctatattctttaaaaaataatctcaaaatttcaaattataactaccccaccttaaaatataacaacctctagggttgaaaatttctcctaaaatagaatagtttctctaccaatcaaaaccttctccaatttaatttcacatactttggtaataatacatgtgtccaaccgtaaacatcgcttatattttgtaacagaggtagtaagaggctaaaaaatattactccgggatttaatacgtgaaaattatattaatagaatttatggggaaaaaattttatatatttacttttttaataaatttaaaaatatataattacaaaaggtagtgataaaaatatatccatggtttgagtaatacttttttttatgaaaaatatggtactcactccatacatacatacatacatacatatatatatatatatatatatatatatatatatatatatatatatatatatatatatatatatatatatatatataggtttttagtgagttcttgttgacggtcgttaagtacaaaactttaaccatcaattcatgcataaaagatatcaaatatattatcaaaacttagtggtacgagtttaactactaaccacttctgctaatattagtaaatagatatatgcatgttatttaagaagaaaaatgcacccgacatgtgacgaaaatgaacctccggccaaccaagcgcgagtacaaggagggccgacaagtcaatcgaaaccgacttaaaagtaagaccaaccagtcctaactgccataagggcctagctagaggagaggctaggaggtgggggccacaatttggctgaaccaaccaccatagtggcgccccatcctggccttccacatggagtgtcctgatgaagtcccaatgacggttgtaaggggaaaaatgtcatttaactattgttggcagttataaaggaggtcttcacatacttgaaacacacacaactttgagctcaagtacagtacaactcacttgtagtttcatattctctccgtcgcacaaaaaactaacctagtactgaatgtaacacatcctagtactacgaatctggatatacatatgtccagattcatggtactagaatatgtcacatccggtactagattcgttttttatgggactgagggagtatttagtaatgttagtttggtagaaagtgaggggaagctctggaaggagtgtcctgaaaaattggtgttcctccaagaattttatggagtgcatgagtgttggcattctttcaacggagttccagggaaatccaggattgtcggccttcttctctcgcttgtacctcagcggatagttatttattaaaataagtatttgagtttctgtatgttctttaattagtttatttaagtgagatatattctcatcagtgcagattcgtcgcttagtgtgcaactgagtgatctagtactaggactcttggataaataaggaagtacctacgcaaggctagagtaataattaataagttaggcatggtgtttaggttagaaattatcttcgttagttgtgtgctccaccgaaagtgaggtaggcggaaggtagtgatagccctgtccgttctttgtattcctccacatttgggtacatcatgcatagagctcaagg

SEQ ID NO: 29240 - DNA, 11449 bp, Oryza sativa
gttctttgtattcctccacatttgggtacatcatgcatagagctcaaggccggacttatcctggcagagcaggggagggccggtgcccgaagcattcattagagttttacttttaactttattaactaattaaaagacataggaatactctctagccaatttatgttaggttgttgtatccttggattgaatcctggtcatatataatacacatatgttgcttgtgttcgatacccttgaatactctaaggagaactgctacaatgttattccgcgcgcttgcgaatttacatgtgatcataaaaaatatcaacaattctacaattttaaagtcattagatggcaccaaactaaaaaaaaccgttgtaccaaatttgcagaaactctatatatagagggttcatctaataatttatgagttatgcagttaacttttgccaaatagaccaatatcggttatggagatgttttaatttttcagagaaaccaactattatcctaatattctattgcttatcagattttatttgtccccgtgactatgacatcagctgagagaagcttttcaaagctaaaattgttgaagaaccatttgagatctataatgtcccaagaatggtttaaacggtctgacaactttatatatgttgagaaggaatttctggatgagattaatattcataccaatatcaatgacttcatatctataaatgtctaaagaaaatttgaaggtaatatatgtaaagttttttcttcaaataaatattgcttttggttgcaggtaatcatgatcgagtctatgctggtgatgggttgcaggagttctgactgtttctcaaaattgtctcggattgttttttctttttttttgttgtggcaaagcccatcaggcagcggaagagtgatatttggaaggacgattccgacattaaatgtttaaaagtaaatgactggtgtgctggtttttgctgctaagaaaggggcaagtttgaagcaagacggaagataattcgaagcttagtcttctttttcgttttaattttatgttgttcctcagttgtgaagcctgtagtctacgtatccacgtgtagatatagagggcagatttgttacccattatggtaaaaacaatgttgatctcgctaaaatttggtattgtcaatatttagctttaccaacatggtctaccatatttgacagatccatcacttgaatcaatcctttgagtcagggtgtatttgagaagagaggaaaagagaagataggtaaagcgaggcgagtaatgagcgtataattaattaaatattaattattataaattaaaaaatggattaatataatttttaaagaaacttttgtatagattttttttaaaatacaccgtttagcagttcaggaaacgtgtgcacggagaatgaggaagtatttctccctaagtctattcttccaactaggaaacttttccaaccatatgggtactgtttatgtagaaaataaaaaaaatgacttcgttaccgattgttttcaactataaaatttagtttttctaatttctacgttttattgaagtttccatttaatagttaaatccatacatatgaaaattcctgaccgtatatatattgttatcatagaaggtaatactgtttttatcctacattcgacaaccaataatatttattattgataatataagtgttcccctctccagatgcatgcaccatttacgaagactcatgaggtcgtgttttgccaactctcttacgaatcatagttatcccacctccaagctttcatgacttaagcaccatacaaaacttgcgtgcgttgtgtctaccgtgtaattgtaaaaaaagtaaaataataaacttttttgaacatgtaggattacttactgttaagcagctagatttgtggattgggccatgcttgtgaaaaagggtaggaaaagttcaatttgactccctcaatatagctagaatttgattcatatcacttaaccataaaaccagatatatcggtttctccaactattaaaattgttcaatacgactcctttgcctgttttgtaagtggatttcactgacatggcgttcccgtggcaacttagtatgtaggaagatcaaaaatagacatgggacctaaatgtaagtgagatgaaaaaaaaaccgtggggcccatgtgtaagcccccactcttattctcccctcgctcgtcctttctttcacatggcataacaccctggcggtgggtggcgcatgcctgctcatcaccctcccactaggcgaacagtggcgatgacgaaggaagtcgacgaggcaaccgccgttgcacaaggcacatgcgccgggagccgatgttgctcctcgtcattgtgccgaggggtccaccatggagacacggagggcgcgcaggggtttggctatggcgacatcacgataggctaatgacgtttgtgaagggcaccggtgggttggggttcggcgataggcgacgtgacgctctcgcacaacatcgtgatgcaccactcctcctcatcccgccgccaccgctcattcttgctccccaccatgttcatcgccgaccaggcccgccagaagcccaggttgaagccttcctcctccacgtgcaatctacacatcgtcattggcggacacgttcttcaagccctcgtcatgcaggatcttgcgccgcgtcaccatctccggctcctctctcgtcggctactgcccctagtcttgagcgggatctcgctccgccgccacctttgacgaggaggtggctgaagcagggtggagcagctggcgagcaggatggcaccgctgctctcgactcttcttcttgcaccccctcctccttgccgctcgccgccaccggggatggggagaagccaaaaaaatctaattgttgtattatgttgttttctgatctattagatcgaccctctcatagagtatatacactggtggagaaaccatctttcgtcagtcgggctaattccacaatagtcccggttgcaacaaaaactgggactaaagatgatctttagtcctggttaaaaagggtaacaggcatatttgatctttaatcccggttggtaataccaaccggttcagatgttgtcagggcttgtcaggcccccccgggatctttagccccggttcataacaccaaccgggactaaagtcccacccctatatatatgtcttcttcctcctccagcccgagcaagcttcaaaatttcttcaaaaaagaggggaggccatgctaaaatttctagtgaatttattttggtgattatatacaaatcggaggtgcctaaaaggttagcaacttcatcctccaatgttttttttttcatattacatttggaactatgttttgcccactttttgtctccaaaattttgttgttagttgatgagagagaaaatttgtgtggagaagaaagaatatatagaaatttagtttatttgctaaagaaggttttataaaatagttgagaaggaaaatatagtgaaagttaatcttgaataatagaaaccaaagtaaaatgaaaaattaaaataagtacagcacattaatattaatattagtttaaaactttataaatagtaaatatataattattcggtgtaatatttcataatttttgtatgaataatgatatgtcattattgtgtgactgttgaaagagttcgtaattattttataattattgtatgactgtcattattgtacgaataattatgtgtgtacgatttttttcatgtcatgtagatggatcggcaatggatgtacactgaccggcggtccaaagagtttattgacggcgtgcattattttttgagagtggccgaagctaacaggcaaaagggttttatttgttgtccatgcaataagtgtaagaatcagaaggagtattctgcatccaggactattcatttccacttgtttgagtcggggttcatgccaagctataaatgttggacatcccacggagagcaaggtgttgaaatggaagaagatgaagtggaagacgacaatattccggactttgctcagtacgctggatttgaaggaaatcaaacgggcgaggaggaaagggatgctgatggtaacgacgttgcggatgatcttggtcagatgttgcaggacgccaaggaggactgcgaaagtgaaaaggggcccataaattggacaagatgttagaggaccatagaacatcgttgtacccaggttgtgagcagaggcacaaaaagttggataccactctagagttcttgcaatggaaggcaaaaaatggggttagtgacaaggcatttggcgatttattgaaactcgtcaagaacattcttccggagggaaacaaattgcccgagacaacgtacgaggctaagaagatagtttgccctctaggactggaagttcagaagattcacgcatgtccgaatgattgtatcctatatcgcggtgaggagtatgagaacctagaagcatgccctgtttgcaaagcactatgatacaagattagacgagacgatccaggagaagttgacgggcagctaacaaagaagagaattcctgctaaggtgatgtggtatttccctataataccatggctaaggcgtttgttcaggaacaaggggaatgctagaatgatgcgatggcacactgaagagcgtcaacaggacgggatgctgagacaccccgccgatggttcgcagtggcgaaacatcgacagaaaatttgaagactttggaaaggacgcacgaaacatacggtttggtttaagtacggatggcatgaatccttttggagagatgagcaggggccatagcacttggcccgttacgatgtgtatctacaacctccccccgtggctatgcatgaagaggaagtacataatgatgccgattataattcaaggccccaagcaacctggtaacgacatcgatgtgtacctaagaccactggtcgaagatcttaaactgttgtggaagaaggaaggtgtccccgtgtgggatgaggacaaataggaggagtttaacctacgagcgctgctgttcgtaaccatcaacgattggcctgcacttagcaacctatccaggcagtccaacaaggggtacaaggcttgcactcactgtatggatgatacagaaagtacgtatcttaagcactgtaggaaggttgtgtacatgggtcatcgtcgattccttgcagcaaaccacccggtacggaagaaaggcaagcactttgaacataaggcggaccaccgtacgaagcctaaacatcgcggcgggaaaacagtgtttgctatggttaaagatcttaaagtagtgtttggaaaggggcctggcagccagcctatagagagcgaagatagtcacgtggcgatgtggaaaaagaactctatattttgggagttaccctattgggaattcttggacgtcctccacgcaatcgacgtgatgcacctcactaagaatctttgcgtaaaccttcttggcttcctaggtgtatatggaaagtcgaaagatacacgggaagcacgtaatgatctgaagcatatggaacaacgcggtgaccttcacccggaaccaaaggagaaaggaagccattacttgagtccagccagctacactcttagcaaggcagagaaggaaagtatgtttgaatgcttggagagcatcaaggtaccgtctggatactccacgaatataaagcgaataataagcacgaaggagaagaagttcacaaatctaaagtctcatgactatcacgtgctgatgacacaactgctaccagttgtaataaggggtatcctcccagataatgtccgggcaacaataacaaagctatgtgctttcatgaacgcaatttcgcagaaggtcatcgatcctgatagattagaagccctgcagaatgatgtggtgcaatgtcttgtcaactttgagttgatatttccaccttcatttttcaatataatgacacatctgctttgtcaccttgtcaaagagatcggtattctcggtcctgtgtacctacatgtcacatcctgatttttgtttcaggatttataaattatttaataaattaataatagaatttatattaaatgttctttaatttacaagtgaagttaaaagtgggaaataaaatttcctaaatataaaacatggatggatttaatttttattaaattctccatgattaagtcaactctctgaaattttctcgaatttttcagagctcaatttctaaatgatacaaagaacagttcagtaattatttgatcattaatgatctaattataattgttaagagcttttcttgtttaaaaatccttaaattataaattgttgtttaaaaggaattattagaaatgattttaaaagcctaaaagaaaagatctaattttaatttgttaaatctcaatataaaatttggctagataaaattttattaaatactttgcttaattctataattcctagatttttttgggatttatttgagctaagaaagtatttttaataaatggaattgcatttcatgaataatttaaattgaaaaaggtttttaaaagtctcttttggctttgggccgaaagtcggcccaaaaccctctctctctctttccctcggcccagtccggcccagtccgccgagccgccgctctcttctctctctctgtcgctgacaggtggggcccgcctgtcggagtcgtcgtcttcgtcgcgccgccgccgcccgaaaccctagcgcaagccgccgccgtctccttccaaattcggccgcgtcttttcttctccggtgaaatcaatagaggggaaatgatcctctcgatctcctcttccttttctcttttggaatcttcggctaaaatcgtttggaaattcgtggattcgagttcaattcggatcggcctctttcctccgaaccccgacctttccttctcgtccccggcagccgtgggccttcgccgtcgcctccttgcccctttaaaagcacccccggtgtctccgctacccgccgcctctctcgccttcgcccgccgtcgtgtgtagcgccctagcctcgtgagcttttgcgccgccgtcgccgccgttcgtctagccgtgcgccgccgtcgctacggtcgtcgtcgtcactcgggaaggccaccgtcgggatcgccaagtcgccgccgtcctcgtccgcctcttcgccgccgccgaagactgccggagcaccgccgtcaccgtcgacccgatctccgccgccgtttcttcctcgtcgccggcgccgtccgttgcttttccgccgccgttttggtcaccggtgagttcgccgcgccgcgctctacgtcctggtgccctccgttctcgtcgtcgcgccgtcgttcgccggcgagcttgcgctcccgagccgccgccggtgctgacgtcatcgctgccgtcatcgctgacgtcatcgttgctgtccccgtgagccggtcgtggaccgttcgatctcggccgtccgttttggatagggttgatctcggccgtccgatcccgtgaaccgttgccgtgtgcccggtccaccgcaaaccctagccgctgacgcaataatccttcttttccttttcaaaaataattcattattgcgtcataattcaattaaaatccatataagtgttttaatccgatttaatctttaaaaattcataactaattcatcttaactcagtttaatgtggttcaagttgcaaaagttgtataaaataaagatctacatattaaaattgtccataaattgaattaaatttatttaattctttttaaatgggctttaaatagatttaatcttgtaaaattcataataaattcatttgaagtcagaatgaggccgttcaagtctcataattcatctaaaattataatctacatgtttgtttactttttatgtattatttatttggtttttattagtctttttcctcgttttgcgtgatagcttgtcgtttccgtcgttgcgaaggttcgcgagtgcgccggaagtattcaagaagattaattgaagaccgattattgcaaggcaagtcacacagatcctaaacacaatcctttgagcatgttgatcctatatttaaattctctatttatttcaactgtgcatttattttcgaatgtcactgggtggtgtgaatctattcctttgttatggcctgtttgcattgattactttattccttgataccttgggttattataacttgactagttgagctttatatattggttcaactagatattagatatgattgcttagccatgcttagaaacattagcacactattgggataacttatgactcattatttaatgatggtttaatgatagttcacgatggttaatcgtgattggttaattaattacttgccaactaaaatttaataatggtgggttgtgagcacatggttttgagagtcgtgctcatgacaattaaggaccggttcgcgagcttctattgtgaaacattaaccgtgccaaccacaagccagcgtgggcaacggctttaccttttgtataacatgattcattgcggagcaccagactgagaagtggcggagataagcacacgggggtcgctggggagtccatgcctctggtttttgagggggtgattatgatccaggaatggtgcactgtggtgagttgtgttgtgcaaagggtattgtcacagcctctattcgggtactttccagtatcgcgacgcatggtagacatgatgttgaggctgtgtcttgtgggtacagtggtacacctctagccagagtaaaactattcgaatagccgtgcccgcggttatgggcgagttgagcaatgtttttcgtgattagtctcacacctcccacaataattatggatgttataactggtaataatttgcttagctcctggtttggagttagatctgtacagccgggtatggttgttcagaatggttgggcctgtgcagcatgggtgtgctgttcagtgttgattaaaacttctgattaattactccactgttttattactcttaaatgttttgctaaatgctgcttttgcaaatgagcctatattatgccatcctttggtatccttgtgcacttgcatatttgctgtgtggcttgctgagtatgtcatatgctcaccttgcaataatcaatcaacctcagttgaagacaagttgcgaaggagaagacgtttggcttataccccagttgagctgcctgttttctttatggtgaggactaagtgcctcttaagtaagtatttatcgttttagttaatttgatgaatctgtatattaaattgtcagtttgtgtacctcggctgattcctggacgaggattttatgcacaaataagttcggtaattacttgtgaatttccgggcgtgacactacacaacatgtttcctttcgagaggtacatgggcgttctgagggaaaagtatgttcataaccgtgctcgtccagaggcaagcatcgccaaggggtatggaacaaaggaggtcattgaattctgcgtagaatttatcgaagaccttcacccaatcggggtacctgaatcacgccatgaagggagactacggggaaaggggactctcagaaggaaagcaataatgacggtagacaacaatttattccgtaaagcccatttcacggttttgcaacaatcttcattggtggctccctacatcgaggagcacttggctctagttcgcgccagaaacatcggtaagtccgatgcatggattacaaggcatcacattgatattttctccacgtggctgcgacaacatctcatgggtaacgagacgattaaccaacaactggccttcctggcgaggggaccatctggctcgatcgcgacattccaaggatatgaaatcaatgggtacacattctacacgagggcccaagacatgaagagcacgaaccagaacagtgctgttcgtatcgatgccatgggacacgatagtacaactggcacgtattacggtgccatcgaggacatatgggaacttgactatggacctctcaaggtcgctctgttccggtgccaatgggttaggttgactggtggaggcgtaacgattgatgatagtgggatgacaacggttcaacaaggttggatactcggacgaaccttttgtccttgccaatgatgtaacccaagttttttacgtcaaggacatgtctagcaaaggaaaaaaggccaaagggcttgacgagccgaagcgccacgtggttctcccaggaaaaagaaaaatcgtcggagtagaggacaagactgacgaggattatgatcagtttgatgggcaaccccctttcacagtgacgattgaccctagcatcctcctatcaaatgaagacaccccttactcacgtagcgatcacaaggaaggaacaatagtgaggagaaagtacgtgcggtcaaccgtcaccgccgatgtattgccgtaattgttctgtacacgatgtaaactatgttggatgtattgaatatccatacaaatcaattgttgtatggtatatgttaaatatgtatgattattagaatttttatcaaattgaaatcatccatatgctagttatatatgattattatattttttattaattatgtatgattattagaattttaatcaaattgaaatcatccatatgctagttatatatgattattagaatttttaaaggttttaaatcatgcacgtggtatttacatatgttaattataattttcaacaatttaatatcatgatatgctagttatatatgattattagattttttattaaaatcatgcatgtggtaattacatatgttaattagaattttcaacaatttaatatcatgatatgctaattatatatgattattatattttgtattaattttaaatcatgcatgtgctatttacatatgttaattagaatttttgacaatttaatatcatgcatatgctaattatatatgattattagaatttgtaacaattttaaatcattcatgtgcttattatatataatccacgtattctagtacatacaacaataatttttcgaaggttttatcattaattgttcgactttaaataattgtaatgcattatttactattttagaaacacatatgcaatgaaattcaagacacagctgctattatctttagtcccggttcctaaccctaaccgggtttaaaaagaatttggaaatagcgggaaaagatctttagtcccggttgttgttacgaaccgggagtaaagatatttttactcccggttgttctcaccaaccgggactaaagatccgggggtatatatattgccggtgcgccctcgtcttctccaccaacacttagacatttttcgatctcggatcgatctctttcgccaccaccgtgcctagggcaaccccgcaccgacaccgccgt

SEQ ID NO: 29241 - DNA, 8629 bp, Oryza sativa
aacgttaacgaacacgaacgagcgtaacgaaatgcgaacgaacgcgaacgaacgtaacgaaacgttaatgaacgcgaacgaacgtgcacgaaacgttaacgaacgcgaacgaacgtgaacgaaacgattacggaacgcgaacgaacgtgcacgaaacgcttacgaacatgaatgcacttgtactaaaagtgaaagtgtgagaacgaacgcgtttatactaatacgatttactggtaatacatatataattatatatgtaacttggcccgtttagactaatacattttcctggtaatgttgcagagaagacatcgtcgtcgtccctcaagccgaagtggtagctagccatcgaaggaattcgcgcaggcaagtgatgtaaagaagtgattgttagatatttaatataagactgttagacttagcatacatgattattacaattttaatataagattgttatcgatttaatataatattgttagacttagcatatatgattgttagagatttaatataatattgttagacttagcatatatatatgactattacaattttaatataagattagtagcgatttaatataagattgttatacttagcatatatatatatgattattacaattttaatatgagattagtagccatttaatataagattgttagacttagcatatatatatatatatatatatatatatgattattacaattttaatataagattagccgcgatttaatatgagattagtagagatttaatataagattagtagcgatttaatataagattgttatacttagcatacatatatgattattacaattttaatatgagattagtagcgatttaatataagattgttagacttagcatatatgattattacaattttaatataagattattagagattaaatataagattgttatagatttaatataagattgttagacttagcatatatatatgattattacaattttaatatgagattagtagccatttaatataagattattagagatttaatataagattagcatagttttaatattacggtacgcaaatacatcctatatacctaacaaatattttttgtatgcacagatggctgatcgcgatgaggaacagatactatacgatacaatcgcagagggaagcagccagtactagaacgaaggagaggggaacgaggatccaaaccagtacttgaacgaggaagggaacgtggagaggaatgcggagggaaacgaggaggggaacgatgaggaggaggctagtggaagtcatccctccgttggatagaagagggcacacggacaacgaggtgccgcgaagaagatagagggtcggcacatcataactgaggtggacgaagacggccgacctagtgccccggcagaagcagccaagaattttgtacgccacagcggttgggttgtgagggacaacgtgcctgtcagcacagtgtactggcgcagaacaagggcatacggggataatgacagctttgtcccggactcagagaaagagatgctgtggaccacaatgctcgagacgttcacgctacccgcgggtacggagaacatagtgaaacagtggactctgaagaaaatggcagaacagttccagagcttcaagggatcattgggacgagttcgttgcttacaagacagggcaacaagggcaagcaatgatggccagaaacaaagacaatgccgccaagaagaagtaccatcaccacttggggtcaggcggatatagcgtcgcaatgccgaagtgggaggagatggaggcaagtttgattgagaggggtatcgaaccggccaccactaaatggccggatagatcgaagttttggtactatgctcatggtgaaacgcttaacctagttgatggctcccttgtcttcagcgatcagatacgcgaggctgccagtcgactaacgtacgcagtggtagcctcttctcagggcacattccgacccgacagagagaaggatgagctgtcactcgccctacagactcccgagcatccaggacaaacacgagggaaaggcgtgattccctggaagattggatttaaggaggacatccacacgtacaggagtcggatgaggagcaagagagatactgaggcgaagattgcagatcttgagtacagggtatcgagctacgagctcaacatgcaagaggaggtggcaaggaaggtggatgaacgtatggccgcacatcggtcccaggatccccagccgtacattcatcctgcaatggtcagcccatcaggcaattgtagcagctgcgcctcaacggggcaggtcggatcacagagcatggacgccatgcaaacccatgacgaaaccacctgccccgttgatgagatcacgcaacggacaccatgtgagctgcatattcccttcaagaacttatcaatcaaggtatgctcgtagtttgatgatttttgacttgtacattccgcaagttgctgcttaggttgattactaatagataacctctcatcacgtgaaggtggcatcgggaatggccatcccaacggacccttccgggacttaccactgcaggccgattccagcaggatactcgagggtcgaagttgagctggtggaagccgcgtacgaggacctcgagttggactacccaggaggagacggtgagacgcatctacgagacacaagccacaccatcatactatggcgcaagcggtacatcatccttcctgggcgacaagcggcgtctcgtgcaccatctcctacggctccgccatctcctcctgcaccatctcctccggttcctccgccacgtcctcctgcaccatctcctccggctattccgccacctcctgctgcaccatctcctccggctcctccgcctcctccgcctccaccgtgtccgcctgcacctcccaagacaaggtctcgccaagctccaccgcctgcccgcacaagggcaacgaagaaggcgaaagttgacgccaccaaaaacaaggagccaccgtacgattgcagtcaagaggagcttgatgctaatgtggcaggagaggtgaagaggcaactcaagcctcggagtcctaaaaagaagatacctattgacccgagcgtgaagaacttcttcaagggaatgtccacaacaaacaaggaggcattacagatatcggactatgaccgaacacttcagagagcctatcacaagaagtccaaaccagtccctcagtttggagaacaaccaaaccaagaggtcgagccgttggtgaccggcgaagattttggcataatggaattcatttcagacaccggtctaactgtggatcagttggttggaggcgcaccaatcccgaaggcggaagtggcatacaagtttgaactcggtaaaccgcttgtcaaacctgaacagctgtagtccctaccgacacagatgtacaaattccatgaacggtacatggaaatgagcgccaagggtagagagatgttcggagcgaggatcagaaaccccgacttcttgcaaggagaagatgttctctagatccatttcaaggatctcttcgatctgtaccagttggacaccctcgacgtctctcttctgagcgcatggattttgtgagtatctttgagttcgatttgtttcgttcaataattaactcttggcatatatgtaagcaataatactttcctttcatcgttgtagaatggagattcaaagggcccgacggcggaggttctacgatactgggttcatcgaccctcggaaaatcaacaccgaaatgattgacaagtacaagaaagacacagaggacaatctcgtacatctcctaacgcagcagcatttcaagacgtacatactactgccgtacaacacagagtgagtttttattgtcgttcgaacaaatttcgttcccatacatatagcatgtacattttcgatcatatatatctcatctcacgcatattccagattccactgggtcctgttattcttcaacttggacgcatgcagagtcactgtgtacgactcaatgaataaagaggagaagatttttgacaaggtcttcaaactgatagacaggtaatataatgtcatctattccaaagtcacggggaatctattgctattatgttgatctcaggtaataattaattaatcatagcttgcaactgcatatgtagggcttgggataggttccgtcaattggtccgcaggacttggaaagaaaaacttggatggaggtttcattttccagtgagtacatgcatgatccaaaattatattgaattgaatctctaattgcagttaatataaatagtatattaaatctctcattgtttctcatgtagtgtgcaaagcaggaccagggaactaacttatgcgactactacgtatgcgagtatgcccactgcctatcaaaccaaatatgcacaacacgagagctcgatgtacgtatacataaaccattcaaaatttcattgctcgatttgttaagttgtttattaatttcatatattgatacgtcattatttttcgaacgatagcgtattcacatgagggataatctcccacacaaggattttatcacggctgttcaagaacaactgatgggattcatcaacgaagaagtccttaatcccgacggtgaattctactacgacggatcgacaattcataacgtcggtccttcctcttctgacataacgccggtgtcgaagtcgtagctatagctaccgagcaaataaattgtactatatatgcatgtatatatatatttatatatgtacacatttacttttgtgttaatatataatttggtaacatatatatatatgcacataaaatgttaagtgctttaaattatacatatgtgtgtgtaatatatgatttatacacacacacacacacacacatatatatatatatatatgcctatatattatgcatatatatgtattgtaacatatgtatgtatgtgtgtgtgtgtctatatatatatatatatataatcaaccatgcagcaaacagggccatgcaaataaaaaaaatggtgcaccgatctttagtcccggttggtaacacaaaccgggactaaagatggtttggccggccatgtggctgatcgatctttagtcccggttggtaacacgaaccgggactaaagatcgatctttagtcccggttatttcacccaggactaaagatagctatctttagtcctagattcgtagtcccggttggacaaccgggactaaagaggggttaccaaccgagactacaaacagtttctcccccagtgatataggagtacctaagagatagagacttgtagtacaatacaaataagagtagatttatctcgattctatctctaggatatatcttatctctatatttgtatttgactcttatccctaactaccatatttgtacttctaacattccccctcagtcgtaacgggagcaaagcgaatgattgcgactggatttgaaatctatttcttcatctccttcgagtcaccatcatcaattgcatctctgatggacggcccttcacctagtgcctacgcccccttctatgttgtcccttgactctcctctgttccctcccgcagtcatagtgggagtttcatggacgatagcgatgacacagacgctttgactggagttgccacagatgattcttgttgtagatgttcgtcaatgtagccgatcatgaagtagccgtggttgtaggtgtagccgcatatagccgaaggcgaaaaaaaaattacgccatggtgtgaagacgatactacaattagtagcatcttgcaccttgtagatgtcagaggatgccattaggaacgtcttgcatatgtcagaggacgtcgttggcgatgaggccaccactttggttggtccttctgcgtcgtgtagtggtcatcacaatagtgatgccgtgttgatgcagtcgttgttgttgtagatgatgtgatcgatgccctcgttggtgacgcggtcgttgccatcgtagaggatgcagtcgatgtcatcgatgaagcgtcttgcagattaatttgtcagagcacgcgaggtgtccatctatgtgtacgagtcagcagcggcaagttgatgaagaccactggtgatgtagaatcggcgaagacgatcacatagtcatacaggttattgacacagcagttagtatgttgatggagattgaaggcagcagcactgctccaggtagagatgataattgggttttatttggctgtggctaatgaaggaattgatctaatgctaatattggtaaaatctaatctatggattatttatggcagctaatgatgcagagcccctcctaacagtgtttttcgcatcaacagccccagggagaatatggtgatcatctcatctccccagggcgatgcgagcggaaggtaggaacggatcaaacgacgttggtcttcggctatgataccatgtggaaaaaaaatctaattgttgtattctgttgttttttgatctattagatcgaccctctcgtagggtatatataggagtacataggagatagagacttggagtacaatataaaagtagatttatctctaggatatatcttatctctaggattctatctctaggatatatcttatcgctatatttgtatgtgactcttatccctaactaacatatttatacttctaacaccctcctcccttcctcggttgatttgccttcgacttgctagccattgggcacatcgcactccgctgagcttggaccgccgccgcccccacgttcttcacacgttacgtcaccccaaacactcggtgggagcatagaggggaagatatgagagagatagtggcacggcatgtgggtcccatgtctaaatttttatttgcttttaagactagttgccacgtagatgccacatcagccaaatccaatgaggaagtcattttacaccgattttaataattcgaggagtcgttatacccaattgtaccattgagtgagtcgaattagattcgtcctatattttaggagtcatattggactgtttccaaaaggcattgaattgacatctaaaagacattttcctaacaaaatattattgtagggataatatacctatttgaactttgaagaaataaggttcataagatctattttatcaagaattatcaagaaaaaaaatacatctaatgttaagtaataagccattgaattgaagaagatactagagtcataaaaaaagcatgagtcaattttctaagaaaataatattctagtatatatactgaattttgaacttagagatattagatgtactagcatattacgtgtgtattgcaacataattttaataaaaaaatatcattaacccattataactattgctttttattatatatcatcttttaatttctatatatatttgttattgacaagtgagcctctagtctcatacgtcccttttcattaaaaaaggtaggggttagtaataaaggtggttaatatgtgggttctctgatccataccgtcactttttcattctttgaaaagtaaagagttgtgggtgtggataattcatttttagaaagtaaagagttggtggtcctcgttatgccaaaatcaccgcttaccaccatcaccactttttaaagaagtacagataaaaggtagagagttggtaattagaatagtgacatactcatttatcactactccctgttttataaagaagcgtaggtaattatgagagtgccctcttattatatgtataatttaaagtaagacattaaacggaagatggtgagaagttatcgcacttctatagaatgccacctgcgccactagccaacccaataaaggaagtgtcacgtacattacatgcaaagcataggaacatgaccatgttacgcctccactaagctccatcttaaaaaaaaaattgttcggttaatttaactgtataagaagccaattattcagactacaaaaagatctcctttgaacaacttacaaaccttacgtgctatggtactattggcatatttcaccttaatataaaattgaagatgtttttatcggtactttggtacatcctccatatataaatcggtttttaagtttgctcgcttttagaaatacatatatgtatttgagttgagttttaaattcgctcgtttttggaaatacaggagtcatataaaaaatctcttaaaaaaatacatgctaacttaaaatgattggactctaattacaacttatgattttctataaatatatatatccaagcaaattctcacagtgactttcaccttaactaaaccgtataaaataaaataaaatagccttcacccattacatgcacgggtattttttctagtaaagtaaatagggaaatatattacaatatgttgataatggtaccaacaaatgccaaaaatataccacaccttgaaatgccatacgatatatgaacgaatacgataatatcgatcaccaacttccgttcctcaggcaaattagtcagcaaacgtctaccaaatatctgcgacccgaacctgaaggaaataagacagtaacaaaagctaggaaaatagctagtacaaactaagcagttgag

SEQ ID NO: 29242 - DNA, 659 bp, Oryza sativa
ttttaccctaaatacagagtaacgatgatttaaacttttctccccgtgcaatctgtagacaatgcccagtgctccagtaattggatttgggaaagcatagaagatacgtttgaatctttgatgtacaagtgccatcgcacaccttcgataagaacaagaaatatgtgagcaactgaacagaaagcaaaagcatgatgccatacttcagtaataacttacattgagcaaggttcccagactaggtaaatgtcaaatcctgtacaaaggtatggtctggtttctgacaagtcatcgcagattgcttcatgtgcaatttttttgtcgtcctgaagttcaattctgactttagccaaaacgaggagaaacaatactgataaaggcaacattgaaaaggtagaaaataggagtaacaaagctcacatttctatccaccgttagtcgttttgctgattcattaacagaataatactccatatttccatctgaatttggtttggttgatgatataattgaagggaacatcactttatccctctccgcagcattttcaatcgcaactatggcagcatgtctcagagggtgccatggaaaaccaccttcacagggcaatgacttctgctcagacggccttggtttcatccatccccaagggtttaaac

SEQ ID NO: 29243 - DNA, 14528 bp, Oryza sativa
tcacaatctcgatcaactctttcacttcatccacttccctcctcgagtctaccacgataagagggatggtatgcaagatgttaaggaactgcctcagggcttctgggaacttaccttctgtggtggccttgtaggcagccttgagtctgtcttccatttgtgagaaggtgaaaacaagtgcaggagggcctctcacattaggacttgcagactcactccaacctttctcaacagcaaccggaataatgggggcagttgcaagtgcacgaagatatgagtggctgcccatgtgcagatcgagaaataggggcttgagaggagcaaagtttttgatgcccaattgacggctaagcaatctcattgcagtgtcaaagtttcctgctgctgcgtgctccccagcaagagaagatttctgagtccaaatctggctgacaggcatgcctggaggaggagcaacaaagaccactgagagtgcattaccggcgtttttaggggtctctgcttcaggcggaagttccaggtcttctaggtcccagccaccttcctcaccatcctcctcatttgcttcaccctcctcagcatcaaaaccatcaccaccattcgccatcgcttcgcttgcatcaaccatatccaggtcctcatcaccccagtcagcaccagcagcttcatcgtcttcctcaagttcagccttcccagtagcatccagtccaccctcaaagataccacgcatcaccctaagcaatggccaatcaccactggctgtgagaggtgcaggggggatcaaaagagagcgagtttttccttcaggtagagaaggaatattttcacccaattcagcagcaagcctatcagcaatttctgtgagtccatgggtggcagcagtaatataagcaagaggtagctgtccagcattctctaggatctcaactctcttcatagcatcaccaagatacagagcattgtggaattgacccatcaggttattgttctgtccagcaattttgcacatgaaccccaccttgtccatgtaaccagtaataagatataggaaagcaagcctctcaaaattctttgtacgttggtacgcatattccacaataccaacgtttccctgcctcagggcctcgattcccaaccggtaccagtgatctttgtcatcaatctctttggcagaagcaactgcaatttggatgttaccactctcaagagctaggttaaatcttgtcttctcatctttcacaaagtggagggcaacttctggaaagcctttctgttgcaaataagaaatcacagcctgcccacacagctgggaattcttaatcatactcatcacatgatcgtatcgtttccgtagaagggccagcttgaaaatgtattcagaagcatcaactgtgatcagcttgttctttccatcacgatctaggcagaaaatattattcccaatagcccttgttatgtaaataggaacgtcaagggttttaatgatcccactatctccattgggaagacaatacttgatatggttcaaagtagtgtaaataaacacaccattctcatcccaggcaccacttttcacacggatggtttcatggagcgtacaacgatggacaagcttcttgtttgctataaccaccgcatgcttgctcagcaatgcaatagattccatatcactcgaccaaacaacatatttaacagcaggtgcctggagctcgccaagaattaacctttgctgcagatcaaagatggtcactcggtcttcagctttgcacagcaagttaccagtcccagcataataaattgcatccatcgcaataggaagagggcttttctttacaatttcattcttaagattcttcaccagaacttgattgctactcttctcgagcactgcaaacctgttgcgtgcaacaaaaacagctgacccaccagctcccttctttgcctcctgcaaataatcagtcctgccagcagaatccttcggaactatatagagttcataggagcctccatccacatcagagcaaatcaggacggcattttcagttggactatacgacagtgtcctgggtgactgattcaagctgaccgatccaggtcttcttattggagccaactgaacctccttctgtgtggagtattcaaagaaccgaagaaaacggtccttcacatagaagacagtatcaccactcacagagaaagctggacgttccctctctaatttaaacacaatcataccattgtcatgaccagcggcaagaagattcatctcagggtgggcagcaagaatccagaaacgatcatgttcccgcctgaatgtttgaataccagttcgcttggtggcatcccagacacgaatgcttttgtcctctgagttggacacaatgatgtcttgctttgcatggaacatcacgcaggacacattattcatgtgcccccgcaaagtatcaacttcccaagccttggtgtctgtccaaaaatagcacacttagattgcatcatttcaaatacctcaatagtggtatgcatataatagcgtttggccagtctaccaatgtgcagtagaataaagtgctacgcaacaagagtgaccacctttagtcccagctaaagtgatatactctaggtcgggagctagttactaattgagtaattgtgaaacatgtttcttgcattcagcttgtttggtgacaagttagttacttcttctgtatgataaattgaacaaaacaaatgaatttatcatttaaccaaatccattgttttgtagtactgttatatggaaggatgaatggataaaaacataaatatgtaagtgtttatcgatggaaaatgataatcaaaaagttcagggcgtagtagcagtattaccattcattctccatagcttcacttgccggtcatctgccccagaaacaatgagcggcaatgtggggtgaaatgacgcccagttcaccccacggtcatgcccttccaacacatattttacaactgcatcaacacctccaaacagatcagtgttcatctgggtgaggcgcaggatgtcatccgcaggtgacaccgtcttcttcctcaaagcaccaatatcccatacacggacagtctgatccagtgatgcggacacaaccagatcctccttgggatggaatgatgcgcacatgacatagtggttatgtccagtcagcacagccacacatgtgcgtgactgccagttccatatccggattgtctggtcatcactagcacttactatccatgggtactcgtggtggaattgcacggtgcgaatgtagtcaaggtgcccatgaagtgtgaagaggcagcggtgtgtcttgtaattccacaccttaatcttgtaatcatcacctgcaatgcatcacagaaatcttagaatctacgattcaacaattccatatcccaatcgtattagcccacagctatcccagaaatacaaccaggcggaacaccagtgtgacttaggccctgtttctttcagcttgggattattataatccagattattgggagtaagttgaaagaaacagacaacttattgaagtagcttattataatctggagcccagcttattataatctgataagctcatttaggtgagctttttccagattattgggtgaaaaattacccaccatgccaccccactcctctttagacttgcaaacccaataatctaggctctaataatctaggaaagaaacaactaaccgtttattctactacagattacaacaatctagcttatagtaatctgactcaataatctagattataataatcccaagctgaaagaaacagggccttagtttcaagtttcaacagatcccgaaattgaggtttcaacaaattccaaagttccatgatggcacctcgccattgctaacttgctatggtatcagattcacaactataaaagctgcttctctctagttaaggcctacacgtcgactcatatcttacctcttgtttgaaaggattgcggaaatcaatggagatctcggtcataaatagaaacaaaatgtcacctgaaggtcttaaaactaacaacaattcaccaaacagttggtcttaagctagcatgatagaagaagcaacaccagatccgaccaacaaaatggcacttgcacaaccaaagcagacctaatcgtagacctcgggtgttgccattgcagcatgcagaaatctaacgccctcaataccgacgtggatccaaccaaacgcgcgaaaggcaaataaaagagcacagcaaatgggcgagatctaggaggaatgaatgattgactgacctccggagacgaagagcggctgggtggcgtggaagtggacgccgcggacggggccgtcgtgctcgtcgaagcggtcgaggagggtgcccatgcggtagtcccacatctggatcaccccgctgtggaggctggccaggatccatggccgccgcgggtggaagctcagccccttcacccggttgctcttcgtctcgaacttggtcagcatcttcgctagccgtcccccagcggcggcggcggcggcagcggcaggcgaaacccctagccgctgaggcgagcggaggagagagagagagagagagagagagagagagagagagagggcggtggatctgatctggcgcgggaaggaggttgggggagaggacgatggtatggccttggcccttgggcgttgggtgcccaggacggagacggacgaaggtggggaggtctgggtttcggacgcggtcggtggtccctgccctcatgaggaggtgggagcgcgtgtccgccgttggatctggagaagggaagatctggaccgttggttcggtgtgaccgggttgtcagcgggagagagataccttgccgtaatgcccgactaaatattagtcatctcacatcaaatcaaatgtttagatactggttaaaagtattaaacgtaaactaatgacaaaactcattccataaccgtggattaattcgtgatataaatcggataatgcttattatccgtcgcccagtgcgggggagccggatcgggcgctccccccgcgcgcccctccccgcacgtgcagatctgggccccaccacatctctgctactatatgtcattgcaacaaattactcacatattttggaacccctctattaagagaattcggtttatttttttgttccaccaaaaatgtttcacctagtgttctcacaatgtttcactatatatagatctaatttgcagtgaactgaaatactccattacaacaaaaataaccacatattttgaaaccccctattaagggaattcgttttattttttgttccactgaaaaatatttcacctagtgtacttataatgtttcactatgtatagatcaaatgttgcagtgaactgaaatattctttcgctatttgctaaaacattgtttttatataaggtgaaacaacacccgatttaaacgagtgaaacattttcaatctactcagtgaaacaattccaatatacctagtggaacatcgtgcaacatttaaaaataattcaataataagctaattttttttcatcggaatatatccatgtgtggtcttgttttgaagatttaattgcaacgaatttaatggtgtaatcgaatcatgatttggataagtaatctgagagaaaaaccagtttaaagtagtttcgcacataaatcgagcgcccgatttttgaagattttgatcgggcgaccgatccctagtcatccccatataaatctattgagtctaattaatccatgattagcatatatgatgctacagtaaatataacctaattatagattaattaggcttaaaaaatttgtttcgcgaattagctcttatttatgcaattaattttttattagtctacgtttaatacttctaattagttccaaacatccaatgtgacagagactaaaatttagtccatgatataaacaccacctcagtgtttggggtatttatatatatacaagaaaaataccattgcatttgtaacgggcggcatacaacaatgatgaaaagtgcagccaatttactcactaaattggtacattgatcatccagccaatttacactttcatccttggaaattgcgtcttcgactgtaaaaattaggggctattgcattcttacccctacttttaaatttaattgtgattttacccttgtttttttagtgtttgtgtttttgcccctcttttttcaaatgaaggagagttttacccccggttttggatggacagtttaatggtgttaagttggacgtgaaaatgcatatatatccttgcttaccagtacttttacccctattttgtatatgaaacttacaattattttgaactgagattttgtgaaataacttaaatctgagccgaactagaacaaatattttggcaaaattttgaccacctcaaccatgcaggcctagcttgtttaattcatgcaggattgcgcaagcatgaactacatgcgtcaccacggactcatcgagcacaatccaggagtatcaccgttcggagctggccacgcggtgaccacggcctgcccgacgacatcctcagttcctcaccatcgaactcctccgccgactcctttcattcccgatgccatcgcggtgtccgggaggccatcgatgtgcaggacacgatgactctcccaccttcatgctcgcatcgagccagcgccgccgcgcgtcctggtgctcgcgtacccatggcgaggagcttctgctgcctggtgctcatgttgagaagccgccgtctccgcctcgcgtcgtcgtgccgacgagccgccgatgctgcttgctactcgcgtagccgcgccgcctgaggagttgtcgccaccgccgccgcttgctcgcatagccgcgtggcgcgagctaggagtcgccgccgccgcttggtggtcgtgtcccgcgctgagtagctgttgcctgttgccaccgcgtagcactcgtcgccacgccggctcgtcggagccaccgccgccgccggctgctctaaccccccttgggtttggggatgggaacggtgggtaagatgagagcgaataggtgtacataatagtcaggggtagaatggtaatccaatcacttatggagaaggggtttttactccggttcgtaaccccctgtagtcccggttggggaatccatcaccaaccaggactaaagataaagataaagcatttttattcccagataaagcatttttattccccagttagtgttaccaaccgggacgaaagatgctagatccggttgctctttattcttttcttttcttcattgtttttaatatatattgatttcaccccattccgtcccggcgtccccaaaatcccaaatcaatcatcctcaaattacctccaaatccacaatcgatcatctcaaatactcaaatacatcacaaaatcttaaaaaaaaaattacatcacaacttctacaaaattacatattcacatcacacacaaatcaaatacatcacacaacaatctcagatccaatcaaatacatcacacaacaatctcaaattctccaaaaaaaaaaaaaagaaaaaaaccaccggctcgccgcaccagccgggcggccctccgcgccccgccgccctcgcgccggccgccgcctctccgcgcctggccgccctcgcgccggcctggccttcacgcctcgccgccctcgcaccggccgccgccgccgcgccggcctgttagagaggagaggagaggaatagataaggttgaggagagaagttaaaaggagaggagataaggttgaggagaggaggagagacgagttaaaggagaggaggagatacctcgatccgatcgcgcacgcctcaccgatctcagcgtcgatattttttcccggttgggactataaatagatctttagtccgggagtaaagcgtatgacgatcttttttcccggttggtgttatcaaccgggactacaaatagatcgttagtcccggttggtaacaccaaccggtactaaagattaaaaagtaccctggagcttttaaaccgggactaaagatgtttttagtcccaattttttatacaactgggactattgtgaaatctggtcgaccgaccaaagatggtttctccaccagtgaatgtcttgtagattatttttcccttctcatttatgtttctttaattcaatatattgtgggacccacctaatgccatccatagtaggggcaaactgtaacttcgtttcaagaaagcaggggtaaattcgcaaaccctaaaaaataagggcaaaatcacagttgcagttaaaagttggggtataaacacaattatccccgatggctttgcggaggacggaaaaaaaattaggtgtggtggtgtggcccatgggctatcgcgagaattaggccatagcaagaagaaagggaaaaaaaacaatctcaatgcacgatattatatgaacaatatcctatcatgatgcaatctaaaacatgccaacaagcactagtcataagctcacaattcatcatccatttaccaaaagtttaaatagaagaggcactcagaaatacctcaagattttagctgtcaacaatacatcacatgaaagaactagtgtggatagatagacatgtagtgatgtagaaactgcaaaacaaatggaaaagattgattagtatactatataattgagaattgagattaataagataaagagtaattgagattgactctgcctgctccctgctgcccctgcctgcgggcagctctacctgattgctagctagccgcctgcctcccgcggccgccacgcagctgcctgcctggccggctggccgccgcctgcctccccacgccggcacatcgccgcgccgctgcctggccgccgcggcgccgcctgcctccccgcgcggcctcaccctgccggcttccacgcccctcctcgagcagtgcccccaccgaccaccgcagcgccgccgctagcccccgtcggccgtcgcttgccctcagtcagattgaggatttggggggattgggaaattttggagttagggtttcatggtcaacaaatcaaaagccccatttaacacaaaaaaaaaaaggcccaatgggcctaattaggtggccagtggcctgttcgcacgcacgcaggcacgcggcttccgtcttgcatttgcaggcagcgatgccgccatcgccatgccggagttgtcgccgtcatgccgcctgggaggctgggattcgccgcgggggggaggggcggggggtccggcgggagagcaaggtatggcaaacgccacacctcggcctaccgagccctccgcccctgattatccctaaaaatcatataaaatctatagtttttgccgttgcaaccacagccgtccgacattgtacgctactgttttactggttcactgttgcattatgccaggaactgttcgattgtttgcttgactagatccggccgttcgttttttccttctttgcagccgctaccagcttccagatattcctctggtcgttcgcatgtacgccgccgccgcggcttgcccttgattccccatccgctcctgcgagttccttcgcatctccgccatcgacgctccaccgtgctcgcctccatctctaccacgccacctcgaccttgctcctcgatgacctctaccacaccattgctcatcctactgaggaagcggtggcagggccgcgccgccgccaacacccggcgcccatgggtgcacgccgcgccgtcacgaacgcgggacgtcgttcctcgcatcgcctcaacacctcgcggggagccagcgatggtggccggctctctccgctctctggccgggcggccggcggcagtccggctctccgcgactccgcctgtccgccattcggacgaggcggcaactccgtgttgacggtcgttgttatcgattcgaccatcaatattaccaaaatagaggagaactagtgatgcttgcaatgcataaatatgttagaataataatattccactagtagtaggtatactaatcttttgcagagaatgacactaaagtggaggagaatcgacatcaacatagaaaataaatcaatcggacgatgttgagaatcagacttatgaatgaatgggccaaggacgcagaattgacacgatgaattaggccaaaattcacaagtctacgaagtgaagcagcggaggaggccaccagccaaaatgtgggctggttgggccggcccctggttcggcctctgccagcgccgatagatgcagggttttgagggaacggtggagattcactccctatggcggttggagggtattatcgacctttctaaccgccataaccgtcattaccggcctatttaaggagttcactctcttcacttcaacacacacctcaagcaatagctctctcatttctctcaagtttagtttagtagtatctagctggtggaataggaatagagtagaaatcaggagtctggaagccttcggaagagttcgggtatggctcaagtagcttttctcttctcttttgtaagctttgtacttttattagaatactcttctaaatatatttatggtattgaaatacttttcgagtatatgaatacctattttacattatgttcatgttatactgaatatacggctagcctatctaggagatgctttggtgcgggtataatgtttgcttatgcaattactccatatcatgacgatgatattagagtagtatctggtagtttaggcgtggtgtctagattacaggatatcattatttggggttatatattgcggatgagaggtgaaccgctgatggtgacagcgcagtactggtattcctccgcgccggtatataatcctaagttaattccctagggagggtattcctccgtatttagcctcggttgtatggtcatgacgggctgtcgtaaggaactcggtagtcagaggtggcttctcgaagtcccaggagggcatcagatagagggtattagctaatgcatatatactatgtatattagaagtataggaatatattttctttctcttttctttccactgagcttagatgatttattatgagaatgaatagttactgcttgtgtgtcactctacccttgaataatcttaacccctgcttagaatatgattatcacaagtaatatataaattattagttgacttctctctacatgatcttcccacgggataaaataaatacaatacccttggaatactctcaggtgaaatgctacaatggtatatccgtgcacttgcggatgaactctgtaaccataatataccagaagtatttcagcggcattgctgagaattatatttctagtaatgtcgttaaaaaataccaacaagcatttctagcaccgttgccggggaagattcataatagagattacttgaactaatactttatatttacctttgtgtaatcattttcctttgcagactaaccttggttgttttcactttttgttgtggaaacagggtagtgcatgactggtttcaatatgccggaaaacttcaaagaaaatccaaaagctttcttccggagcatcagaccgcgagtcgttgctctgcagaaaactctaccgacagagaaaccagccgtaccagcgccaccgaccttcaagactatggccagcaagactgttcgcgagttcgctgctccctatgctgacaatgtggccattgggccgcaggtcaacataggggacgtggatttcgacttaaagtccagccttatcacaatggcgcaggctagcccgttctgtggcaagcctaatgaggatgccaatgctcatctgcaacagttcctggagatctatagtacgtacaccatcaagggcgttagtcccaacgccgtcaggctgcggctgtttccgttctcacttttggagagagcgaagcagtggttttatgccaaccgtgctgctgtcatgatgaggacatcaacaccatcgatacatccacgtccacccatatacagcatgatggtcctattacccgcgctcgtgcacgtcaactaaattatcaggtgagttctttcttgagttcatattcctcatctttatacctcggagacgcgtgcactcgtgttttactcaggaacgatggagaggatccaaagggaagaggattcgcgcggggtggattcggactgcagggcagcgccaacttctgacggccgccacgacttcatgcgaactccgatttgggcgtgcaagtacttcatggaaagcttatcaagtctactttcaaatggatccagccacatgtccatatctgttctggagcggccgcaattgtcattttattcccgactattttctgtccatggtgctgcgtcacctcttttggcccaatgggctgtgtatccatattgggcccattaggggcgcgtcctagggttggagcacgaccctatggtcgttcttcccctctttttatacctctagtcgccgccaagaacaggcgggttttgatgatagagatagcttcttgctaccggctcgcagcgcgcgtgttggctaaaccgcccgtctgcctgtaatcggaaccccaccatattgtgtttgatagtgaaactttcatctttatctagcaatctcagtgcttatcctacttgttcttgcttgttcttcgattgcttgcaggatgagtgccctcgtggccgggttgacgcgcaccacaagttcgcggcgaccattggagacggtgtatcggttgctaaggcgcagcgtctttggacagttgtagtcgggccgtgaacgtcgacttcatctaatcgagttatcccttacctctcatcgaaagatcgggccacaaaccctagcgggttcgcatcaggtggtatcagagcgtggttcatcggtgagtgaatttacccttcccttcgtcattaatttttttttcctatagtccagaaaagaccaacaaaaaaatagtagattagtttttccatgatcctatagaccattgtgccttttcactagtactgcttagttaaggcttgttgagttttcgattgcatcggttgtgttaatttgctggtcttagtgttaggcgattagagtttcgagttcttgccaccaccgcacatcgccaccttcatcaattttgccgtcatcaccaccgtcaccaccgtcgcagtcacccaccaaatcactttatatttgtgtttgatctgttgccgatagcttttgttagttgccttgtatcctgccgccactagaaaggaaatagaaccctgattcgagtgaccttccttaaaacagtcatatctttttcatacggactcgaaattaggcttataatatatccacgggcatctacaaaaaaagttacatccgattctccccagctttggcaaatttaaaatcgccaaattcctcttgcaaaattctgtttttgtggcgagaagcttcgggacctattcgcatagaactttgaaaaaattctacaagcttcatactttgtccgtttgagataagattttctgtggttggttctagtgtgctcctggttgtgaaaaaaatatcaaaaaaaaaaataaaaaaaaagttgtaactcctttcattggaaaatttgtggtggtctactttgatgatatcttgatttacagcaagtctatgggtgaacattttaatcatttacgtgctgtttttaatgctcttcgtgatgcacgtttatttggtaaccttgagaagtgcaccttttgcacagatcgagtttcttttcttggctatgttgtaactccgcaggggattgaggttgatcaagccaaggttgaggcaattcagagttggccgactcctaaaacggtctcacaagtgcggagctttctaggactcgcggggttctatcgccgctttgtgcaggatttcagcaccattgctgcaccattgaatgcgcttacaaagaagggagtgcctttcacttggggcacatcacaagggaacgccttccacatgttgaaagataagttgacccatgcacctctcctccaacttcccgattttaataagacttttgaacttgaatgtgatgctagtgggattggattgggtggtgttttgctacaagaaggaaaacctgttgcatattttagtgaaaagttgagtgggcctgttctgaattattctacttatgataaggaattgtatgctcttgtgcgaactttagaaacatggcagcattttttgtggcccaaggaatttgtcatacattctgatcatgagtctttgaagcatattcgtagtcaagggaagctgaaccgtagacatgctaaatgggttgaatttattgaatcttttccttatgttatcaaacacaagaaagggaaggagaacatcattgctgatgctttgtctaggagatacactttgttgacacaacttgactacaagatttttggcctggaaacaatcaaagaccaatatgcgcatgatgctgattttaatgatgtgttgctgcattgtaaggatggaagaacatggaa

SEQ ID NO: 29244 - DNA, 1289 bp, Oryza sativa
taaaatggcacatttcataccatgtcataaaactgatgatgcttctcatatcgctgatttgttctttcgagaaattgttctcttgcatggtgtgccaaacacaattgtttctgatcgtgacacaaaatttcttagccatttttggagaactttgtgggctaaattggggactaaacttttgttttctactacttgtcatccccaaactgatggacaaactgaagtggtgaatagaaccttgtctactatgcttaggcctgttttgaagaaaaatatcaagatgtgggaagaatgcttgcctcatattgaatttgcttataatcgttccttgcattctactacaaaaatgtgcccatttcagattgtgtatggtttgttgcctcgtgctccaattgatttgatgcctttaccatcttctgaaaaactgaattttgatgctaagcaacgtgctgagttgatgttaaaactgcatgagacaactaaagaaaacatagagcgcatgaatgctaagtataagtttgctagtgacaaaggtagaagggaattgaattttgaacctggagatttggtttggttgcatttgcgaaaagaacgatttcctgatttgagaaagtctaaattgatgcctagagctgatggaccatttaaagtgttagcaaagattaatgagaatgcatataagattgatttgcctgcagatttcggggttagtcccacatttaacgttgcagatttgcagccgtatttgggagaagaagatgagcttgagtcgaggacgactcaaatgcaagaaggggaggatgatgaggacatcaacaccatcgatacatccacgtccccccatatacagcatgatggtcctattacccgcgctcgtgcacgtcaactaaattatcaggtgagttctttcttgagttcatattcctcgtctttatacctcggagacgcgtgcactcgtgttttactcaggaacgatggagaggatccaaagggaagaggattcgcgcggggtggattcggactgcagggcagcgccaacttctaacggccgccacgacttcatgcgaactccgatttgggcgtgcaagtacttcatggaaagcttatcaagtctactttcaaatggatccagccacatgtccatatctgttctggagcggccgcaattgtcattttactcccgactattttctgtccatggtgctgcgtcacctcttttggcccaatgggctgtgtatccatgttgggcccattaggggcgcgtcctagggttggagcacgaccctatg

SEQ ID NO: 29245 - DNA, 7241 bp, Oryza sativa
atctttatctagcaatctcagtgcttgtcctacttgatcttgcttgttcttcgattgcttgcaggatgagtgccctcatggccgggttgacgcgtaccacaagttcgcggcgaccattggagacggtgtatcggttgctaaggcgcagcgtctttggacagttgtagtcgggccgtgaacgtcgacttcatctaatcgagttatcccttacctctcatcgaaagatcgggccacaaaccctagcgggttcgcatcatgtcaacacctgggacaaatgctctacggcattcctctcgaaattcttcctgatgggcaaaaccaatgcccttcgtggaaggatttccagttgccagcagacaagggacgagtccattctagaagcatgggaatgactacaggagtacgtggccacctatcctcatcatgggatggataactggttgatcctgcagaatttttacaatggactcaccccaatctcccgcgatcacctggacacggtagctggaggagccttcttctctaaaacggttcaaggagccgttgaactaatatagaagatggtttccaatatgggttggagagagaaacgactccagacccgacagcgaggcatgcacaccatcaaggagacggaattacttgctgccaagctggacctcctcatgaaacgcttggacgaccacaagaaaaggtcacaaggcaccgtcaaggccttggactctcatgtcacgtgtgaggtctgcagcaacacggatcattctgggaatgactgccagaaaacccgtgaggaggcgatgtacatgggcaacaacaacgggtactgtccacaaggaggtcaggggtggaaccaaccacgcccatattatcaaggaggtaacaataactgtaacttttctaaccagccctccttgaaggatctcgtttttgcgcaagctaaaactactgatgcattaagcaaaaagcttgctgctaatgaaaaggtcctagaaaacatcaatgtcaaactagatggctttgcttctgcttttcaaaatcagctgagctttaataaaatgatagagacccagttagctcaggttgcatccttagtccctgcaaatgaaactaggaggatcccggggcaacccgacccctcaggtgaaaatgttaaggtgatcacgacgaggggaggtaagtccctcgtgatccgccatatcctaaccctgcaggaaccaatgggatgtcaaaagaagcgtcatctaatgactcggctgacaaagaggttcagccagaaaagactctgccgcaggagtactacgacacacggttgctgccgtttcctcaacggcttaggaaaccgtcagtagacgagcaattcgctcgttttgttgaagtaatccagaagatccacatcaacgtgccgttgttggaggccatgcaagtgccaacatacgcccgttatctcaaggacatactcaacaacaagagaccgctcccaacaatggaggtggtcaagctgacggagcactgcagtaacctgatactccacaagctcccgaaaaagaagaaagatccggggtgtcctacgatcacctactcaatcgtggcacaacaattcgaccaggccttgtgcgacctgggagccagtgtcagcatcatgccaaaagatgtcttcgacaggctcaacttcacggtgttggcaccaacaccgatgtgcctccaactggctgattcatcagtccgttacccggcggggatagcggaggatgtgccagtcaagatacgggatttcttcaccccagttgacttcgtggtgctggatatggacacgggaaaagagacgccgctcatcctggggcgtccgttccttagcaccgcgagagccaacattgatgtgggaactgggagtatccgtttccacatcaacgggaaggaggaaaagtttgagtttcaaccgaggacggaacagtgctctatggtcagaatgaagtacgggccgaacccacagaatattcaaatggtcgaggtggagccacccaagacggacagcctggtgaagttcatgcagaatttcctagagaaggaaacaacgattcccaggaaccgttattggaagacgccggtaaaatgcccaataccggccaaaaagctagagcagccgactcagaaaaagccgccgtccgcaccaaaaccaaagaaagtgtggagggagaagcaaaagacgctcactccatcacctccggagatgggtagaaaatccgtgaactaaatcagaaggaggtacggtcttgcacattggactttaaatgacgcgaccttcaccaacaggtaaattggtatgtatccgcatatttgctttcaacaatttgaatttttgcatcaccgcatgtttgaatttcaaatttgcatttaggatttttgaattatgaggaaattcttcaaatgaattttttttgttagagaacaaaccaaaataaaattttcagtgaaaattcgctgtgctacgaccacactgaccgttggattccaacggccgaaagtgggggcgattgggcccaccaggggttcggccgaacaccctggttcggccgaaccggccaggccaacggtcggctgcctcttcctttgaggcaacggctagtgggccccatgggtcagttgtgaccgttgtgggtgcgctacttaagccaaccggctgggagaggggacttcaccccatttcaacacattttcattccctctccaaagtttgctctcaagttcattcaagctttgatagtttccctcaaattcaaatatttagttgcatatatacaagttgctttggtaaaactaaccggcggatgaaattcttgtcattcctaacccccgccgggttagtccgttcttgctccattgtgtagaatgaggaggcgactgtctcgtctgttcaaagggtctggctcttcactaagtcatcatgacgagtctagtactcgttcatcagccgatgtctcaatggaaggcgccgaagctccgcgacgactcctgaacgacaccgacctcgaccttgtcagtgatcaggagagacaagcctactacatgctgagcgaccgggagtatgctcacacacgagaatactcatcagagctgctgaaaaagataggtatggatgttgaatttcgttctatttggaaagctgttggttggcagagatttgctgtggtagatgagcccggttctcgtttgcttactttgcaattcctgtgcactttgaaagaaatagaagatggaattttctttcgctttttccataaggagtacacacttacatggaaaggcttaagtacacttcttggttttcacgattcctataagatcgatatgcagaaaggaatttctgggttcgagaaaaataggttttgggaacacatttctggtgctccaatttgcaagaaacataggacgaatgacattcataatcctacacttaggctcatgcacaaatggattgctatgactttgtttcctagaggtgatctgagacccattaggggagataaattgattatcatgtttgccatggttagaaagatcaaaattgaattgtatgataaggcaatggttagaaagtataatgttctctgctcctgttgagtgcacttctctgattactcggatagcaaaagggctaggggtcgttagcgaccaaattgcttttatctcagccgctcgtccgcatattgatgcttatctagtgcaaggcatattctgaaacatggagtagatggatctttgatatactttttccccagttgtacaaatgaaatcccgttgccaaatgcagggtatcatttgtacaactgccatgaactaaccattcccctgcaaaccatagaagaatctcgtgcaggtggaacatacagggagacgtgcaacatgacaagaaacgaactagaaagttcatcatcctcgacacccgtgcagatgtatgaggcaggttgggcaccaactggggatgcacccggatggacccaagctccacgccatagcatcggagtctcaacctgggcaagtgccagtgaggaccggtggcatgcgcctcatgatatccaatggggggggacaatcaacctcctaggtcaagtggtgtgcctccatctccaagtgaatggcgctcgagttcctctcgttgggacttgggtgaaatcactaggagaatggacacccttgatatgcagacaggggagatccagtacaacctcacggaacacatagcttaaatgcaagaatggcaacaatctgctaatgcttagttcgccaacatcaacaacatgatgcagcaacagcataatgaccttcaggcgtactttcgtttttaggggttcaatccttatcaaggaccctgagcgaaagccaagcttggggggggggggagacatcgttccccctactaaggtaacttgtatcacattacatatttcccgttcaattgcatatttgctttccaaatgcatcttataaaaatgaaaacaacataaaagtttgcaaaatagaaaataccaaaaagataggatatgtttgagtcatgctaggtaagataagctagttctctttgttgaaatgatgaatagtttctctgttatatatctctgatatatgggttcttggtaaatactttctcaaaagttaaatataagtagccaacaattatccaggaacctgaggtaaatgggctgcacttgcttatctaagtctaggttgttgtaagatatgagatagtaaataagagttactatgatcctgatcctagttcgacttgaattccagatgttttgtttttcaaaataataagtttgaaagttcctcatttgatataaattcctaccagagccaaaaatgtgctatcataattaaaccatatacattttggttacttgccattccattgaattttgtcaaactcttgtgatttgtgtagatacttctcatgctctatgatcaaaatcatacacccacatttatgcacatgctaaactcctacactgggagctaagcactatttcattccattcccattttaccaccaaaataaattctccatgctttcatgtgctttcttctcctacaaagagaagtccttttgaaaaaaaaaggagggaaaggcatggttatgaaaaaaaagttatgctccgtcaagcatgagcatgatgttgaaaaaaaaaagaaaaaaaaagagaatggtagccatgctctctcctaatcaataaaagaaggattttgggagaaggaagtaagcacaaaggagaaacatttttttttctttttcctcatataccacacacacattttgcatgatcttgatcttgagtatgtttagttatctgctctagtctaagtttttgacttagtgataaatgtgaatgcaagtatgccatgtttgatccctaccaagctccacatatcaaaccttagagtacgaataaaataggcaacaatttggtgaggaattcaaattgatacacttggagagactgagtgaatcatttgaggaacttggttttcttttgcaaaatcgtttgaaaacttccagaataagagttgaagaaagatggagtgattggtactcgaaattgctgttctgtctttcaaccgcccaaggcaaggagaagcagtgtctcgtgggtaagggtaagccaccgtgccaaagattatttaatctgagagagagtacatatacctcgcacctgtatctttgagatatgcagcatagtagcaactcctgatcaacaaccaagtctttgttccctttcgtccttcactcaggacgagcaaaggttcatggttggggggttttgtagacggtcgttatcgatcagtttcgaccatcactattaccaaaatagaggagaactagtgatacttgcaatgcataaatatgttagaataataatattccactagtagtaggtatactaatcttttgcagagaatgacactaaagtggaggagaatcgacatcaacatagaagataaatcaatcggacgatgtcgagaatcagacttatgaatgaatggaccaaggacgcagaattgacacgatgaattaggccaaaattcacacgatgaattaggccaaaattcacaagtctacgaagtgaagcagtggaggaggccaccagccaaaatgtgggctggttgggccggtccctggttcagcctctgccagcgccaatggatgcagggttttgagggaatggtggagattcactccctatggcggttggagggtattaccgacctttccaaccgccataaccgtcattacctgcctatttaaggagttcactctcttcacttcaacacacacctcaagcaatagctctctcatttctctcaagtttcgtttagtagtatcctgctggtggaataggaatagagtagaaatcaggagtctggaagccttcggaagagttcgggtatggctctagtagcttttctcttctcttttgtaagctttgtacttttattagaatactcttctaaatatatttatggtattgaaatactttccgagtatatgaatacctattttacattatgttcatgttatactgaatatacggctagcctatctgggagatgctttggtgtgggtataatgtttgcttatgcaattactctatgtcatgacgatgatattagagtagtatctggtagtttaggcgtggtgtctagattacgggatatcattatttagggttatatattgcggatgagaggtgggccgctgatggtgacagctcagtacgggtattcctctgcgctggtatataatcctacgttaattccctggggagggtattcctccgtatttagccccggttgtgtcacgcccagaaatttagcccaaatttccagactattttgtgtattaaatccctgtccaggaccagccagggtacacaaaacgacaagtaatatacagttccaaacgtaaataaagcgtaaaatacttacaaaagaggcacttagtcctcgcaccgaaacgaaagcagtagcagcggaaaaaggcgatcctagcggggcttcagctccactccacaggcaaaactcaactgtggtctgagccttggtcctctaacttcatcttcagctcagaagcactacacttctgaaaagggggaataatagcaaggctgagtacaaccaccgtactcagcaagccacaccaacgatgcagacatgcaaggggatacaaggatggtttgtggctattt

SEQ ID NO: 29246 - DNA, 30295 bp, Oryza sativa
aaggacctggggaggatgggggagaggttaggagggggagagagggctcccagcggcatgaatcgctggtcggaggggagaacgggcggcggatgctcaccggcgcgaggggaaccgtgttccggcgggatcccggccgtgaaaagcggcggccgaggtgctcctcggcgctgcgaagcgagcggcggcgacagcgcgacttggggtggctaggagcggcgccaagcggcggatggagtcggcggcggcggtggaaggaggtggtgcgcgtggcgacggtgcttcggaggcggggaggggaaatggagctgacgccggggtgcggcacgacgcggcgaagccgctggtggcggtcgcgtggaacgacggtggtgggagcggctgtggcgaccggctggagggtcgtcggcgagcggtggcgggaggtgcgacggtggcggggtggtttttgtgcacgggagggctcgggagaaaggggaaaatggagagggaggtgcggggaatgtttttataggggaggggaggcgggatcgagcccgagagaggtagaaaccggccggcaacgtgggaggagagagagatgcgggaggcggcgacgtggccggattttgcggggagagtggggggaaacggcgcggacgtgggcgacgaccgcgtccacgcacgcgcgggagagggagtcgcgcgggagaggcggcgacgtgggacgatttggcggccatggcggcggttggggatggagctggaggtaggagatgacatgtggggcccacctgtcggaaagagggggaggggaaaacgggctagggaggaaatgtagacttgagagagagagagagccgagcgggccgaggaagggaagcccggcctaggaaggaggaggggaggaatttgggccgagcccgaaaggaaggaaggggaagattattttcttttctttttattctaattggttcaatgaactttgtgctattgaaaattatttcttgagctccgaaaattcacgggaaatttcagagagtattttagggcacaaagaatattgcaaaatattcccggccaatgatttttaaggaaaaatttaattctcccattaattcactcgaataaattgcttaactttttatttaatttctaggtaatgcattattaaatgatttttaatcccgaacgaaaatcggggcgttacaaatctaccccccttacaggaatctcgtcccgagattctgggatggctagaaagaaagctggtgtaggctagcggtctgactgatctgcacattgaactgccacattctgcttcgaactaattgattgactggttgatcaaacctgcacaattgaaatggctggattcgacctttctgttcctttgctttgccaaaactggaccgactggttctgcttgaactgacccaaccagaactgtggctgctcatgaaacttacttatcttgatctgaactgttgatactagcagtttgataacctgacaattcaccaagctggctagagaagggtgaagttgttcctaagacttgcatctggcatttgtaactcattgatcctacgtccgcttgaacgggtcctggctcgaatgacacgtaattccaggaaacctgcttgacctgtctttcgtctgaactgcaaccgtccctaatgctgcttctcaaagctgagctattgacctggcctcaccggtgtacctcagaattcaatcagataacttaagatcggtgtaactctgctgacaccttgcaactggcttcctcaagtactacccggattgttgcactgggttgaaccttcaactaaaacagcgatgaggtgagccaaaactcatctccgagacctacccccctcataaggagtagtcttacttttgcctgactgggaacaattggactattgtccttgaaaaaaataaccgacacttctctgacttacaaagaccctcacttcgaaaactgaaacttcgtcgattcatcaaaatagagcaatgacgacgcactttcatcccagcaagatttggaacttaaccctcagttgctaataggaaattccacataaagaaattctcatttagctcctgatcttactaactcttgactacttccccaaacagttctaactgctggtacaactgtcttgcttctgacttgatttttggtgtcatatgcctaaacagattgcatagttgacattccttgaaacaagcactgatcacttaacaaatccaactcaaggggtccttcccacggcatgacatttcacttcttcgaccatcctttgctgactcttcctgggttgacggactatagatcctacaacagttttccggaaaatactgcaatctgaacaactattggaaactgactttgatgctaccaagagtttctgctctttgatcataacaacttcgcttccataccttcggtaaagatgatctgttgaatagggattctgtgccatataccttgctgactacacatttctatttctggacccgactcatgtatcttcctgactcgggtatggaacaatttctttttcaacttctgggaaacattgagatggtatttagaacttatattggttgccttgaactaagcaaacacctactgaattcatgatcgcaccactagggtataattgctgattacaatcctctaacaccttccacggttagagagtttccaagattctttatatgatgtcactttcaattattccatcactcctttcatctgagtgccactgatgctgactttagagagatctcatcatgtcgagtgttgagggtctaaccattttcactccgttggtaaaccattcctctattggctcgcaaatcggttttgggagctcaacaaaattgcgatgagttagaagagaaactcttggtttcttgtagcactgacagatacacaagttaacttgctttggcatgatcaagatggaccatataagtggagaacaaaactaattgactcatactttattcaatattcccttttcattagataactgccataaacttctatgtacaagatgaaatgcgacaaagataaacacttgaaggctactgctgggatggaaaagtaaagggcttgactagagctgcaattgcttccattattcgaacatgaccgacttgttctttaactcctactagctgaagtctcaccgggaacgttgccctgcttgctgatctttgatggtggagtggcaactgtcttgacagctgtaacaggtaggatcttctttcccgtggggttaccaagcggtgatttgccgatggacctccgaattggagcaatacgaggtgcattgctagaactgacaacagtcgggcgacctggtgctggcgacacttgctgcgggtgctgacgaaggagcatacttcctctttgtaactgtagcgagctattgttctcctggcattgcttaccctgctggcgctggtgctgtaggcttgaaacgatggccggtggaacaatgcggcctctgacggtgcccttgacgatgattcgttgaggcggaggttgcacattcaggtgtcgattggtgtcgtgggcagtgctggtaacttgcgaataacgacgaactgcctttgctgctcttggaagaggacaatcactgaaacaatgtcctggcttacgacagttgcgacataattgacttgcttggtctcggggtgcaggcttctgattatgcactttggcagctgaaactggaacaagcagtgatttatgaacatccctagcgatgttgcttcttccatggttggcttgcactggggctggaattggaggaagagcagaaggattgtgactgatgtcgtctactgccatttgttgacgaatgggttgcacggttctcccttgttctttcttggtcaaagctaggaccgagttccgctgacaatccttaggcacatgatctgctccctcacacaggaaacatgtgaccttcctcaaagggcattcatctgagtaatgggtgtattcaccacagcggcatgtggggaggcataaactagcagtgtgtccgactaccccacatctagtacatgctttgaacttcaactctctttccctgaaactgtcaagggtcgcgtcatcatcgtcatcattatcatcatcatcgtcatcagcagaaaaccactatcctgattcatcatcttcgggtctgggcggaccgtactttatgagatgtcgggttagctgacgtgctccacggaagttatttcttcctctctgacgcttgggtatccttgctgcgtcttcaggtgtaaattctgaaccggtgatgatcatggtcctgccattatccatcttccatatcactgtcctgttcgctccagagttgggctgcaaagtaccatccttcttgtcggtagactgacttggagcttggttacttccggggtgctgcttctcgtcttcttcaggtgacctggcgaacaccttccatggacagttccttacataatgaccttgctcaccacagtcataacaggtagcacttactttcctttggtctgacgatgacttggctgtcgttatcttcagggatctggacagcattttgacaggggtcttcggtgccgatattgggaactcctgactctgactctgattcgggtttcgggctggcatctggactcgcacctgcggttggtgacattgacgcgactcctgacattgccgttgcatctgttgcatctggtatatttggtaccgacgtcgcatctgttgtaataactcttccactgtcttagtttgattagccatgacttggggttgaggctgatcttcaagaggctgatgtggaatactattagaattgcactgagttgccccatgaaactgacagggtcctgattcgatgaaattgtccctcatgctgaccatctgctgcaggcaccagagagagggggaaatgggaggggttactagagatgaggtactaaaccacttgcctagtgatatgttgtgagtagatttttatggtttaagttgcttaagcaaacaacctagtatggtcgcatccccaccaatgatgcaagccatacccctacacacaagcaaacaacacacgatctagaagctaacgaaactactcttcatggaaagattgggtttaggtcatctccgggaaaactcctattgatcttcgcggaacgacgagtctggacagatcttctcgctctttgcacgaagcttgaggcttagcttgacttgacttccaaacatgcacaaagctgatggcttgtccttcaggtttgacagctgtcacgcccggaatttctatccaaaattccaaacgcttacatgtgtgtgaaccctcgtccaggaatcagccgaggcacacaataacaaattgataatagagtacaattattactccaattaataggcgaataaaatgtcattacagaggtagatagttcctcacaatcaataaagatctaagcagcggaaaataaaataaacggcgcggacggctccactccacaagcagcttgaccaaggctacacctaatcctccacaccatcagcatcattgtagaactcttcctctgatgaatgattgcaaggtgagtatatgacatactcagcaagccacgcagcaaatatgcaagtgcacaggataacaaaggatggcatagtagggtttcatttgcaaaagcagcatttagcaaacatttgagaattataaaacagtagagtaattaatcatcaattttaatcaacactaaacagcacacccatgctgctcaggcccaaccatcctgaacaaccatacccggctgtacagatctatctccaaaccaggaatataccattccaaaccaggagctaaacaaattattaccagttatagcatcttttattatggtgagaagtgtgaaactaatcacaaaagacattgttagacctgcccataactgcgggcgcggctattcgaatagttttactctgatcagaggtgtaccactgtacccacaagacacaaccccacatcatgtcaccatgtgcctcaataccaccacggtacctcggaaaggagttgtgacaataccccttgcataacacaatccactacagcgcacctttcctggatcataatcacccccttaaaaacaaggcatggactccccagcgacccccgtgggcttatctccgccacttctcagtctggtgccccgcaatgaaccatgctatacaaaagataaagccgttgcccacgctggcttgtggttggcacggttaatgtttcacaaccgaaactcgtgaaccggtccttaattgtcatgagcacgactctcaaaaccatgtgctcacaacccaccattatcaagttttagttggcacattcattaattaaccaatcacgattggccatcgtgaactatcattaagccatcattaaataatagtgagtcataagttatcccaatagtgtgctaatgtttctaagcatggctaagcaatcacatctaatatctagctgaaccaatatgtaaagctcaactagtcaagttataataacccaaggtatcaaggaataaagtaatcaagaacaaaagggctataacaaacaataggttaattccacccaatgacattcgaaaataaatgcaatatttgaatagaaacagtagctttaaacgggatcaacatgctcaaagggttgtttgggatctgtgtgacttgccttgctggccttggaactcttcaaactcttctcctgcgaaaacgggctctccggaaacgacggaatctaagcaaaaaagagcaaaatcaccaaaaaagcacataaacaagcatgaacagtacatgtggatatttttaacatgtagatctcaattttagaaaaatttagagacttgaaccaactaaatcggagctaagatgaattagttatgaatttttgaagattaaatcggattaaaacacttaaattgattttaattgaattatgacgcaataatgaattatttttgaaaaggaaaaggaggattattgcgtcagcgggctagggtttcggtggaccgggcgcacgggcgacggttcacgcgaacggacggccgagatcgatccatccaaaacggacggccgagatcgatcggtctacgaccggctcacggaagagggcgacgatgacgtcagcgatgacgtcaccaccggcggcggcggctcagcggctcgggcttgcatgctcgccggcgaacggcggcgcttcggcacgaacggagagcaccaacgggtagagcgcgacgcggcgaactcaccggtgaccaaaggagcggcggaagaccaacggacggcaacggcgacgacgaagaaacgacggcggtcttcgggtcgacggcggcgatggtgctccggcgatcttcggcgacggcgaaggggcggacgaggacggcgacgggacggcgaccacgacggcggtcttcccgagcgacggcgacgtctggaacggcggcggcgcacggctggagcgacggcggcgctagggcacacggcgctagggcgctacggacgacgagaggcgaaggcgaaggtggcggcgggtagagaagagctcgggggtccttttaaaggggctaggaggtgacggcgaaggcccacggcggctggcgacgagaaggaaagatcggggtttgaaggaaagagaccgatccgattcgaactcgaatcaaacacattccaaaccgatttagccgatgtttccaaaggagaaaaggtagaagagatcccaaagattgtttcccctcaatcaatttcaccggaaacgaaaacgaacggccggattttggaaaggaacggcggcggcgcgaaactagggtttcgggcggcggcggccggaggttgacgacgaccctgacaggtgggccccacctgtcagcgggcggacgcgcgcgcgcgcggcggcggactgggccgacatgggccgaggagagagagagcggttttgggccgactttcggcccaaagccaaaagaagactttttaaaacctttttcaatttaaattattcatgaaatgcaattccatttattaaaaatacttccttagctcaaataaatcccagaaaaatctaggaattatataattaagcaaagtatttaatgaaattttatctggccccattttatattggaatttattaattaaaattagatcttctcttcaagacttttaaaattatttctaaaaattccaattaaacaacaatttatatattttgaattttcagggtgtgacaacagctaaaagaattggagggacagggaggagaattttaaaaaccgtttcacaaggaaatgccgaagggcgagaggagacattatgcaaatagggttttcagaaagtttgtccttaggttttgaccgtttggctcaacctacagtcaagttggctctgataccactttgtcacgcccagaaatttagcccaaatttccagactattttgtgtattaaatccctgtccaggaccagccagggtacacaaaacgacaagtaatatacagttccaaacgtaaataaagcgtaaaatacttacaaaagaggcacttagtcctcgcaccgaaacgaaagcagtagcagcggaaaaaggcgatcctagcggggcttcagctccactccacaggcaaaactcaactgtggtctgagccttggtcctctaacttcatcttcagctcagaagcactacacttctgaaaagggggaataatagcaaggctgagtacaaccaccgtactcagcaagccacaccaacgatgcagacatgcaaggggatacaaggatggtttgtggctatttgcataaaggcggttgtaaaacattttattgagcaaaacagtaaaactgttgagtaattagagtaacattaaatctccactgatcaacgctacaccacgttgaacaggcccaaccaacccacataaactacagtgtattgggtcgatttattaagtgtgagactaatcacggtgaatctggtcgaccgcccataaccgcgggcacggttattcgaatagttttactctgatcagaggtgtacaactgtacccacaagacacagccccatgacacgttaccgtgcgccgacatgccaccacgacataccggaaagaggccgtgacaggacccttcgcataaccccctctagccaagcacaccacacctcaggtttcacccccgtccccagcgggcgacgggtagtcccctctcgtgcctaggtgaatccggaagtgacagaggccgtcgcagggcccgccccgctccatcacgcccacccttgcctggatgcgtcagctagaggaaagctacactacaagcccaaccgttgcccacgctggcttgtggtaagtacgataagttcttcctgggcatcccgcgaaccggtccttaattgccatgggtgcgactagcaaaaccatgcacccacagcccaccattcagtcgcattttagttggataattacgaccatgaagcatggccagatgtctcgagcacgcagctcaacaagatactagaatgtctaatactgcaattatcccatcgactgagctagtggtaattaagcatggctaagcatatagttctagctaggtcatcaaagtaacataagctaggcgatttattacccatggttgacaaaggacatatatcaagtaaacatggcacaagcgagcagataggtaaaaccctgaccccatgtaattagcaaaacatgcatatttatttgcaaacagtaaaacatttgtaaattgggatcaacatgctcaaggggaatgtgtgacttgccttgcttcttcactttgattttccgaactcttttcctcgcgaccgcggacttccgaaacgacggattctacacgctggcatgcaaaacgaggaaaaactataataaaaaccaagaaaacagtacataaaaactaaacaaacatgtagagctcaattttagatgaattttgcaagttgaatggctcaattcggagttcgaatgaattaggtatgaattttagaagttttgagccatttaaatgaatttctagaattaaactcgatttattgtgcaattattatttattttctcaaaggaaaaagcttaagcgctgacgtcatcaaagaggccggcgccgacaggcgggccccacacgtcagcgggtcaagggaatcggtccaccgtggaccgggaccacggggtggcgcggctgagcacgggcacggctcaggctggcccggccgagcgacggctcgcggcggcgcggcctcctgcggcgacggccggtgcacgcgagaaagcggcggtgaggcgcggcaaggggatccgggcggcccaggcgagcggggcggtggcaagccggccggccgacctaacggcagcggcgcacggcccggtgggcgccggcggcggccaccggcgcggcagcgcgcacgggagacagaggagggaggcaaggagggagaggaggagctcaccaaggacgcggcgacgaggggcggggaaaggcgggggggggggggggtggagcttggcgtcggtgctcctcgggatgaaggcggaacggcggcccggcggcgttccgcaagcgggaaccggcggacggcggccggaaggacctgggaggatgggggagaggttaggagggggagagagggctcccagcggcatgaatcgctggtcggaggggagaacgggcggcggatgctcaccggcgcgaggggaaccgtgttccggcgggatcccggccgtgaaaagcggcggccgaggtgctcctcggcgctgcgaagcgagcagcggcgatagcgcgacttggggtggctagaagcggcgccaagcggcggctggagtcggcggcggcggtggatggaggcggtgcttcggaggcggggaggggaaatggagcggacgccggggtgcggcacgacgcggcgaagccgctggtggcggtcgtgcggaacgacggtggtgggagcggctgtggcgaccggctggagggtcgtcggccagcggcggtgggaggtgcgatggtggcggggttgttttcgtgcacgggagggctcgggagagaggggaaaatggagagggaggtgcggggaatgtttttataggggaggggaggcgggatcgagctcgagagaggtagaaaccggccggagacctgggaggagagagagatgctggaggcggcgacgtggccggattttgcgggagagcggggggaaaccgagcggacgtgggcgacaaccgcgtccacgcacgcgcgggagagggagtcccgcaagagaagccgcgacgtgggaggattggcggccatggcggcggttggggattgagctagaggtaggagatgacaggtggggcccacctatcggagagagggggagaggaaaacgggctagggaggatatgtagacttgagggagagagagagccgattgtgccgaggaagggaagcccggcctaggaaggaggaggggaggaatttgggccgagcccgaaaggaaggaaggggaagattattttcttttctttttattcttattggttaaatgaactttgtgctatttaaaattatttcttgagctccgaaaattcacgggaaatttcagagagtattttagggcacaaagaatattgcaaaatattcccggccaatgatttttaaggaaaaattttaattctcccattaattcacttgaataaattgcttaactttttatttaatttctaggaaatgcattattaaatgatttttaatcccgaacgaaaatcggggcgttacaggttgtatggtcatgatgggctgtcgtaaggaactcgacagtcagggatggcttctcaaagtaccaggagggcatcggatagagggtattagctagtatatcagctaactagaatgtatgtatactatgtatattagaagtataggaatatattttctttctcttttctttccacttagcttagatgatttattatgagaatgagtagttattgcttgtgtgtcactctacccttgaattatcttaacccctacttagaatatgattatcacaagtaatatataaattattagttgagttgtctctacatgatcttcccacgggataaaataaatacgatacccttggaatactctcaggtgaaatgctacaatgatatatctgtgcgcttgcggatgaactctgtaaccataatattccaaacatatttctgcgccattgctgagaattatatttctagtaatgttgttaagaaataccaacactccgcctctcctcgcgtgttgtgcctcgcgggtcacagccgtctctgctcccactctgcctctgctcgcccgcataaatctctgctccaactcctgctatccatcacaccgctgccgcctagccagccaccggccgctgataccgggagctagggaggccgtggcgtgtagcacagcaggcagtagcagtgcgctggtgccaccttcggccttcgcccttcgattccggccttcccctgcaggtactttacaggtctgctcctttacctaatttgctctatactgatttttgattgaaacttgctctatgctatcaatttgttatttttgattgtcgatttgtgatcgtctattagactactatcataatgtcattgccgatttgtgattagtgaatatgcattttttgtggtccattccacagtcatgaatatgtggttacaacatatgtttgcttatttacacggcaagtttattatatcgtgtgccccagtgccaggaaaaattagtgcgctgtgtttcttccatcatgttggtcgcaccagtaagatgggaagtgttttacctagcctatagtgcttctttaatcagtagattgggagtttaggactttgcttttctgaatgctcaaattgtattctcagattgcatttcagtgcattcacaatcttttatggcaatatgtcatggttaattacacattctgcatgtagcatccaacctgaaaatcatttgattactgcagcatttattcccagcaatagagcatctgtgcgagcagacgatgacatatttgtgctgtaaactatttctgtagaagtatttgtcttaaaagtaatactatttggtaatgtttctaaatctatccattttcaaccttgagttcaggtttctgcagtacacgatcccttcaaacaaaattaaatagttaataatttaattaccagtattcagagggcactttgtgtcgtaggctcttcagaccttccgttatatttgagagatgaagtgaataattcaagtcatcaaacaaacataatgaaacatccgacacctcgcgagagaaatattggagacattgctgagcccttagcctgccagtcaacttcagcctgagatgtgcccgtcaaaccactcgaaggcggcgaccagatatgttacacattcagaagacttgacaaaaatggctaaagatctacaacctctcaaatatttctaactcatactcatgtgaatatagtttccaggatgtgcactagattcacactttcatcttaagcatgattatacatagcaaacacaactaagatgaaagaaacttaagacttacaacaacttaataattacataggccgaccggccaaatagacttattagagaacagcggaagcttgactacccaatcacaagcacaccgactaggggtttaccccattaagttctcatcctagaagaagcaatcaaaacccgcatcacttaaagactaagtctaaacctgcaaacaaaaggttatatcaacaacaagagtcagtacattaaattgtttaatggcaagtacaagtcaatcctactatactacatgtaaggcatatattcaaaggaaggcaatatgtagttcaatttcagtataaagcaagttttgtttcgcaattcttttgtaaaggagttgatgcttcaattaacaaaacaaattttaagtttcaatattaagttcatcataattccatcataatcaatctcttgttgtcatccttcgacaacaagtcataatatatcaccacacacacacaactcaacacatttatcatttcaaaccaaggtcatatgttcacattttaaaacatagtctatactcatgacacttcaccaaagcgctcttgaccgtgaacacggctaatcaattagtttaaagaactctgcaaaatttgtacacctttatccacatgatgtgatagaagcccagaggctacactctagttggttcagtgccggccaagcaccccacactctacattatgagtgcggactagaggtcacaacgaagcctttacactacttagaatctagccttgcaccagcacgatacgtgttcctccatcctaggcatacttgaaaatatgtctagaaccgttaagtggcgggcccacgccttaaacttaatgccgtggtggcggacacaacgggaacccacccacgtggcacaataccgttgtattggacagacttagtcccctaaactaccacgtcagggcaaataggaagttcctctgaatcatcgactaattcctcagaattatcgactaactcatacacaccagcctaccagaatgcaaggctagttctaaatagattaatcagcttaggccatcccatactagcacatgtggatgtacgaataactttaagttggtgacacaagttcggtccttacggacttggccaaacactccccctatcggcatgcacctaacaccatatgcacatcacttgccgcccaagtctaaaatcacattttacacattttagttcgcaaatacccatcatattcattttattccagcaaaggttcatgtgtcaaaaatcacattttaattatagatggaatgaacatttgcatatttctaagcatggctaagcaagtagttgcatatagagcatatataaacccatttgagcacaaagagtgtgctctaaccatttctaggggttcaaacagcaagaggatcaattattcaaggtagggaatgcagcaaataggtcataactaccttatcccaatttcaaataccgaaatagtctaagttcacatgcaactttgcaaacaaatattttcattcctcaaatcatgggattcaatgtgttcaaaggatgggaggagaaaacttgccttgatcagagaaatgttagcacctaatccactccttcaccgattatgcaattatctagataaaggacacgttatgcaattaaacaccgaaatagctgaaaatctaaaatgctctaaaattcatgatttatgcacagtgattaggtactggtcttataatgaatttaggtgaaagaatttttattttatcttattccatttgggagttatgaattttagaggttttatcggtttatagtaatatagtcttaggtagtgttacaaaatacttttgtaaagtgatttttattagattagacttcacaggggtgtggagatgtgttttctaagactaacacatttggtttcacaaattttggatttataatgaattctttatgcattttacaagttataacgtgttagagttgttggttcagaacatgctacctactgtttaagttgaataaaagaagtaatttggttaactaaaacatttttagttcacatgtttatggtttttactactatggttcatactttataaactaggggtgctctgatctagactagcaatacattatattaacctagaaattattatatgagctaagttcttttaagttttagtggatgggaaaggaactatgctccactgttctaacaagttttatttaggtttattcatagctagagtgcattataaatacttctacacatatattttgcttaaccattactaagtaattaactcctaggttatctatttaaagattagagctatcatttgtacaaaaggtgtcttattttattttactatgttgaagctaaccatttgctggttctatagaaacttggttcatttcatttggactaaaaatgaattttctacaaatcttacaaattaaaggcttctctatgttggtaaatccttacatgattagagacttttactacacagtaagtatataattttatttcataacctgggaatacacattttgatgattctacagaacttaagtttactaaaattgaagctaagttgaattttatatgaatttctaaaatttagcttatctaaaactagtcattttaaagataatagttttagaggcttttgatgcaaagtaagtaattacttttatttcacctaatcagagagtgcatgatgatgaatttgtagaatttgagtttgtttcaaaatgagtttagatgaattttctatgtgttttataaatttgtatatgctttatgtatgacttatcttagataaatgttagaggcaaagtttgtacagtgagtgtcaagttttatattcctggaataaagttcataaccttaagaatctacagcaactggaaacacttcaaaataagctatatttgatttcttatggattttacaagtttgtgcatttttctgttaaacatatatttgtttggcattgccttaattattctccagattttaaaggatggggtccacatggctgtgagggaccaatatgcaaaaaggcccttgaggtttctaggaatcaacccgcagtcctaggcccatatgtcagtgtgtttctacaattgtaaacggatccctgcacttaatctaattcacgggagtcatccctctgctctagacagagcagagctagccatggctgagctcgatctcgagctcgccagcggcaaacgttggctcgtttgaggttgaggtcaaaagataaaatgaagagcaagctctcgcgattccattcctctagttttcttggtttggggacatcggagtagcgccgatggctagtgtgagcggaaggtgttttcgggtgatggtgcatgtgcatctacagtcatgtattggttaagtgggtgcatgcatgtgagtatttgaggttcatgggtatataccatggtgttggccagagttgatgaggtccagacgatggcggcagcacacgaaaatggcttggcgacggcgcttcactccgggatgacgtcgacggcttgatctaccaatccatctggcatgaatgaggtcatacgttgttagcgaggtctcagggatgcttcatgtgcaaagaatcagacaatggctcaccggagaaggcggaatcgaccatggcgacggcggcggattcaaattggcgccggggaagaaaagatgcgttctccgtgttctagatgtcttgggctggggttcttgaggcgttttgaagagtaggtcgaggtgagattcttggcgcagcggcttgctccgagatggtcgaggatggctagacgacgacgatgattgaagcggcggtgctccagtgcgtgctccagggcgccgtcggcgtggtcgcgttccgatggctgtgatgcacaaaacgggaggtggtcaaaagagaaatggttcggcattgtgtggagataagggaacgcgaaaaacatagagatgacctcgacccaatcggcgttggcgaaggtcgtcgccactacgaccggcggcgaggttgaggatgacggagaggctgaggacctctccctcggcttcttcagctctagagtgatgtgcggagttgggcgactcggtctggaggagatggaggcatgactcagtgacttgaaggcgtcgacacgtcgtcaccacgcgtcgacgcgtccaggactcggtcggctctcgatctctccctctctgtgtttcttggtcggctgaggatgagggacagaggaagggcaagctagagaggctgccaggtgggtccaggtcgtggcaaactaggctagggtgagagggttgggtaagattctgggtaaacttgattttcagatcatttttcggaattattttcttctctaactttgtagcttcgtaaattaatgtgtagaccagattatctagtgttgattttactggaggtagatgattacacctagattccattttctttggttgcacttaaaaataatgggtagactgctcacagaaattaaacaaagatgggctattagaaagctagattgaatttttaggaggcttaacagaggaggaaaattctagaaaagttatatttattcatgataaataatttagtatttgaataaattattttccatgttcacttatgtgcagttaaatgtacttttggatgaaatatggttttagccgattaaaatttaatttgatttcttttagttgtctgctttgactgattagttcgaggtatcaacttgaatgttaacatgttaacaaaattacagaggataagtttgtgctaatcactgttcacataaatttttccatgattttatcttgcacaaaatattttagagaattaggatgacctttgtttgtatatgtgttcccacttcataattgcatctaatattattatagggattacattaaacttcttttagactgagaagatgatatttgagtttaatattaagtccacatgctattacccaagattaactataggtttgtttagtgaaataattcttttagattatgctcatgggaccaattatggaatgcaagaccaaaactccaaatgcacaaagaactcgagcctaggcatacattatgtacatgtatgctcatatgcttggtgacatttcttgtataacgttgggaatgaaaagattttattttgctctcaaattttaatcatgcaatggtttaagttggtcatcacctaagtttaaaacggaaatttttgcctctcaaaattggagaagttaacctctaattattttgataagaaatttctgagtcctagaatttcgggtatgttacactttgacttttgtacttatcactgatggaaaattgagaacacttccctttttctagatagaaaaatctctgctttgacctgataactttattataacatgttaaggtatagtattacatatacacattgaaaaatattcccgagataaccaaacatggttactaatgaaaagttcgggaatttacaacctgtctatggctattccctacatgtcttgctaaaaaaaatcgaccatccaattcaatatgtttgtcaagttgtggcacttcctagctttaagaatttttttggtgtctactttacatggtccgctgctgattaaccacggcatatatattatatagtaattgcttttttttatctggcttattattctcttttcctgaaccattcattatgcagttttactgccataaatcaagctggaatcatgtttgcctgcaccaaccatgctctgtagaatgcttttaacaggcatacaacacaccattagggaataatctacaaggtttgggccatataacttcccttttatatactttcttttgcacttattttccaaatttatctgttgtatgtacatgatagataatactgtcccagcattgactaatgtttgaagttcaattgtaacaggtccaatgcttgctttgagtacaaaaatgttttatgttttgtcggtgctttttttcaccagctaaagatcaataggaactacaattatatttcattttgtcattcacaccttagcttccagttcactaaatgaagatgaaggctgaagtcaacagagatatgaactgtagggaaaatgtaccttttgttgctttgattaggaagattgaatgttaatttcaagatgcaaatggagatcgattttcagtctttcatatgtcagcttaagtttgttctgttaaaaatgaaatgaaacttaatttcaatgcaaatgctgaggagggaatgcttgatctcaaaataaaatgctatctttgcttgctccatatgcgcttagcccccatgagcgatgatcttcatgtaccatattactcacattacctgtatttttttcgaatatctactgtagttttagagcatatgtgacagtgcaattataattgttcattcttgacatgcactatgcaggaatattgcttcaaggcaaaagaaccaaacaacatattaggttatcccattatgaacagttaggttaagctgcaccttacatggtgagatcactatccatattttattatacacatgtaatctatttatttaaactaccctgtcaatccaatctactttatatccttattttggtgttagctataaattcaaatagctttgcaatatggatctatgctgattaccacttatcaacgaattgacagaatggacatatgttgacaaggtgacatcacaacatgtatatacaacgtagaatctatgtacatcaactgtgtcttgtgcttcacaactatgtgtggagctttccaagtccacaaaacatttaagttttcttttaccaatcagcatatgctatattattctaatatgtgcatagatatatcttactccgttacaatgtctctttgaaatttcaaatttatttttgtatagttcaaataactaatatggttacaagcattatacccgcagcaacgcgcggggccactgactagttatatagaactatcgagtggccgtgtacattgcagagaacgttggacggcaatgcacaggcctataaaaagttttgtggttccgttgtaactcagacctaccataaaacccacacatctgcctcatacctcgtgaaggtctcacagcccccgcgcacgtataagaaccatagccacatccgcgcgtgggtcggttcgcgacacacgaagccacatccgtaggaggctgacacccgtgggatcggactgacggacggacgaaccaaaaaatcatcgtgcaatgctttttggtatataacggactcataagtgagtacataatcatctttaattttttactagtaaaaggcacctgcgttgcaccgggtaacattgaggtggataaaatttaactaaacgctttttaagcaatttagtatgacaataataatcacaaatgtattttttttgacatttagtatgacaataataatcacaaatgtattttttttgacagttatatcatgtgtacgtgtataatatgaatgttgtacttgatgcgttagcgtaatgattgtactacgagaggaacgagcggtgagtttttgtcactttcatgcaagaggcgatgtaaataaaattgtgtgattaacaaaaaaaattcatttgaaataggtgactttatcataatactaatgatgatcagaacggttcaaaaatacgtttgcatatttactcataatcttgtagtggtcacgcgtgctaattataaaatgtgtacctaaatttgtttgcgagctgttggtatttcttaacgacattactagaaatatgaattttcagcaatgatgcagaaatagccctgatatatttatggttacagaagtaatccgcaagtgcacggatatatcattgtaacatttcactcggaagtatttgaaggtatcgtatttatttaatcctaagggaagatttataaaagagagaactctaccaatagcttatatatgttacatatgacttagattctctcacttaaataattcaagactaatgtggaagaaaaaatagaaaagcaatcattcctatacttttaatatacactcaactttagtttagatttgctagtatacagctgtaacgaccattaccccctaacagtgccctcctggtgctttgagagaccaccccggattgtcgagtttcttacgacaacctgtcatggccgtccaaccagagctaaatatggaggagtactctccccagaaaattgtcttaggaatatatactaacatggaggaatgcacgtactgagttgccgccatcagcggcccacctctattgtcccgtagcatatatacccaattaatgatatttaataatctaagcaccattcttacattatcaaatattactctatatcctctagaataacatagagcaatcatttgcatgaacattaaacccacaccactgcacctatctggtaggctagtcatacaactatatcagcacaaatataaagtaaatccagtgttcggacaaagcaaagtaccaaaggtatataaagaaaaatattctcttaattccaaaagtcttacaaaagaagatagaaaagctactagagccataccgaaatcttccgaagatccgatgactccgataactatcttattctactccacttagcactagagcactaacaaaacttgagagagagatcaaagcttcttgcttgagtgtgtgttgaagtgaccccttacatagcctctcaatgatggttatggcagttggaattgtcagaaatgccccgcaaccatcattgggagtgaaggtgcacttaaacctcctagtgggtttcggtgattaatgacaaggtggttaaaggggactaacgtgtttatcaagtttattcacaggagtttagtcccaaagcaagttgtgatggctaagaatgcaaggagaccccccaatttgaatgttcctaagtgcgaaaaataccgaaggtgattagactaggtttttcactttcgaaattgagtttaggaaaaaccgtactattaagaggggattcaagtgtgattctagggtatacaaagtgctcttagtcatatccatgagtcaaaatatttttggaatcatttttgaaaaatgattttctccccgggacagagagggctacccggaggttctggccagaactttcgggcaccgtttctttgcaaaaaatttcctaagtgctgcccggaagctcctggcacttttgcccggaacctcctggcaggcttccagttcaaacttgtgagtaacggctagatgacgtcacctagccgttatatatatggatttcatccccaggtcaccctttggccattccacttcagctctttcatgttctagggttttctagccactcccaagcgtcctttgcttcctccactcaaatctagagcctatcttgtgagattgagagattatatgagagtgtaggagtgttttggagatggattgaagattaggtttgtttgagcactttggatacctcgtgggctgtcacttggtcttattactcttggagatcttctcctagacggttaggtgtcgcccgtgagcttccaaagatcttgtggatgtcccgggaaagtttgtgaaggttttcctcacctccgcaaggaaacgaggtaaataagtaaagattcttgtgctgagttttcagaggttgtcctaggtagagcaacttgcacttgtggtcttttctagaaggaattgtgagttggatcttggtggtcactcaattctagaaaacgacctagaagtgttgagttgaaggctgtggacttcttctgggatctttgcataagtgaggcaaggggttaattgagacccggctctttgagcacctcaacggagagtaggatccgtgtgatccgaacttcggaaaaaaatcgcctttgtctctcttgtgtatgatctatgtttgaattggctggtatcttgtgtttttcatcttgtgcaatcttgtgcctgtttttccctagctaggacctgtttttcttctcatattttcgttatctctgttgcccggaagttcctggctcaagaactccggaagttccgggctgctcatcactgccaagaagttccagtgttcatcaccaggaggttcggggccctgtcaatttaaccgctgcgtttgttgagaaaatttcaggaaagcctattcaccccccccccctctaggctacatctcttcacgttcagggagtgcatttggagcgtctacgtggagggccaagctgagccggcgctgccagggttcggccaaaccccctggttctgccgaacctgggccggcccagcaggcctccaaatttggtcagggggctgacaggtgagtcctcatggcggttgtggcagttatgatggtttccaggacggttacacctgacatgtgggcccctctatccttaagcttgcttaggagtgaagtttttcttcatttttttctttatttatgtgctaatctctgcaaacaaataatactccatgtacaagtagaaatatattattctaaaataaatatgcattgcaatcataactagttctcctttattttaagtatattgacgtcgaaattggtctataacgaccgtcaacatgagccatccttgatattgttccccttatatatccttgtttcctgagtctattacttatgcgtggtcaattatcgacactgcttagctttgcctatatagacatttgcaccctccatactcatgctatatggatgtgattgtgatcactagatgggagtgaatgtcgggagtcgggtggagacatgagtgccacccgtatcacgaaaatcttgtgaaaagcaaaaacctaataaaacaaatgttttcgattgggacagcatggatagaatatgggtggttctatgaaacaactacttgccgaccctagtcaaccaaggactgagtcaggaagctatacagggaatgaaccaagtatgatcgcatttctcgaatgggtagacccgatggactaggaaattctcgtgggggcggcaccccagacatggtaggttctagacgatgatgattgtgttgatgcagtgttgtgattggataatgacgtctaaaacctaaaatgcaccctataagtataagtattatgtaacccttaatcccgggagtgccaggactcccctcactttcggttcgaggtagggattgtgtgtcggggtgcaatggaggctcatagtccttggagcgggtgccgcaacgcgagagtgactgaaaagttgggaagtgacaagtctcatgtgttgggtgcatcatggagtgcgggattaaaagcgtacatccactgcagtgtgagtaaactaatctattcgaatagccgtgctcacggttaatgagcactgagacttgtactactcttgattagactcatacatctttaatattgtttagaacagggctggacaagattgtgtgaccttgcccaatgggcgggaaggtcaaatatggtaaacaatatgaatctggatgtgagggtaaacctgaccaagcgaggctcgggctaggtcgatgaaccctcactgttcaacttaacgacgttttcagttaaaactgctaggtttacaaaacaatttgtgaaatctatctttattcaaatgacccaaacccttcttgtatcctcgtattcattacatttattctagtggtgacttgctgagtacggttggtattcacccttgctccatcaccctctcttagacttagatgatgtggaagtgccgctcgagactactcccgaggaaggagaacccgaggagatgccctagggactgatccccagttgtgcctatggagtttagtagtcccgccgtaccttcgctaccgctaccttatcttatcatttggttcttggtattgtatctgaccacacatggtctatttggggacccactcgggctttcattgtaataatgcgtaccgtaagactatgcgatgcagactatgtcataccaaatgtgtaatgtgtgtataccaacctactgatgcagggatttagtattgtgaacacatgtggtttcctgtgtcttaaaaccgggggccgactttcaactccatcacgcccaccctcacctgggaacatcggaaagggaagagccatactacaagtccagcagttaagcactgttagtcttccagggtttcccgtgaatcggtccttaattaccatgagtgcagccaacaataccatgcacccacagcccacctttgagccatattttagttggataattacgaccaataaaatatggccaaatgtatcgagcgcgcagcacatcaagatactaaatgtaaaatagtgtgattatcccattatgtgagctagtggtaattaaacatggctaagtatatgtaattttagctaagtcaacataagcgacacaagctagtcaaattattacccaaggttcgacaaagaatggatcacaagtggtagctgtagcttacttaactgatcaaactaataatctagttttccttttcaaagttacttactatatagatacattttggtgacaatgtttctaatgatgttaactggttagaaatatttaacgtttaaatactcacttcgtttaaaatcatttgtcgttttagtttgttctaaacattataaatctttaaccatgaacttctttagacatatttgactttagacaaatttaaaataacaaacaatttgaaacggatcactagtgcaaaactgattttaacaccgattgggaacctttttggtactggttgtagcaaatcaagactaaagatctcgactttagtaccggtactcaaaacaattgtgtaggatgtgggatttgaacactactagaaaaagcatttttgccgacgtgggggtcctatttttgcaggcggacatgacccttagagccaaatgaccgcctacaaaaatataagtcggggtgaaatttgatgtctgcctacgaaaatctattttcgtaggtagaccacataagcggctcctgtgaaaatcaggcgccacttaattggtccgcctgcgaaaatagacttgaatataaatagacttgcgtgccctaatttttttctaagtcctcacacctctcccctttcccctcccctcacctttcctcaccggcctctcatcccctcccctcacctctcctactctcccctcccctcacttctactcttcccggcggcggcggcgggcggtggcggcgacgaggaggcgaggcggcaatggagaagggcggcgcggccaaggagcgcaatggagaagggcggtgcggcccggcccgtccctcccagatctggaggggggcggggggagtgcagcgacgactgcgggcggtggcggcagagggcgaggcggcgtggctcccctccccccttcctcccagatctggccggaggagggaggggggaggtcggcggcggcaattacggcgtggagcagcgacagcgcgggccgggcggcggcggcggctcccggcgcgggccggcgatttttttttgttcgtttcctccattctcgcaggcgggccgttcgttgtggtgcaagcggacctctctcccgcctgggaaaattagttttggccacctgcaaaaatgccttttctagtagtggaactcgagatctctcaccttatctctcatgcttactaccctacctatcacacacatctaaatagagatgctttctttttaaactaaccatataggcatatttagtacctgttggtactaaaaatagtactgcctcctcggttctacgaagatctcttcgtacttgtctagtctaggataactgggatcttccggtctccgtgcgcggaagtagttgaaacaaagaagagtctgttccgctcttcatttaggcatggcccgcccatctgctgctaggtccaagaatgagttggtaacacaaacaagttcttccgtctttagtcttggttggcagaggatctattggtgttactaactggaactaaagatgttttggggacttggacttttaaaactggtagtaaaaatatcgtaccggttctaattctaaccgagatattagtatttttggtatcacgataaaaaatcagttctacactcgtggatagtataagatttgatcaacttttaaaactttgacaatcaattctataaaagaataattttataaaacttaataagtttgtaatattatgatattactccctccggttccatattaattgttgttggttgaggtaaaacttttataacttcgaccactaataacttcaaaaatatttagttcaaaggaactagaacaacatatataaatttgtctttcaaagcactataataaaagtaaacatacatttatttattatatatattataataaaaaaataagatcaaagatatatttatattttgtagaccatgtcattgtccaaaacgtcaattaaaatgaaaccaaccagaggaagtacttgttaaattaaatatgcacgtacctttcttttttaactaatcatttgagagaagttattaatgctcaaagttccaaagtatctaaaagtcaatatttatgaacggaggaagtattacttttatttttcggcaaaaagtttatccatttccctgtttctgaaataaacgtatactttttctaagagtaagaaatgtataaattagaaaggactatatcgacgagaatatgtaccggatgcatttgccctatcgaactaaagaagcttactatacaatctacagttatcctatctatttatgtacaaaaaaaagtaagaagaaaaggggtcaagacatttcccggcaaaaatttctacaagcaagagttctcaagccaatatgtaccccaatagaataacactccaactccagagttgctccgtcagatcactcacaagaagtgaggaaatgatgagatgcgaggcaggtgcgtcaggagatccccaaacgattcttgcctcggcggcaatgaggtgttgcttccactgtctgctgacaccggaagcgcataaggttggggcttcctttcttgcatctcattgtcaccatgaatgctgctgctggggtttgtctggcctgaacctgaatctctctgaatcaggctgcagagggagttgacccttgacatgagcatcctttcatcagctgcgttggttatctgggaatcattgaggagttgtctggtaagctcatcaaatgtcagtttacccattgagccatcgccatccccatcgccgatgatctgggtgctgcccaagaggaatcgggttattccatctaatgttactttacttgacgtggaatccccacgatgaactgcaggtaggttccctgaatacatctgtctgtagatatgattcccaatgtgatttgcaatctcacttttggacatggagcgccttatccccggtaccttgataccgttccaattatagatgctttcttgccgttcacaatcaccagaagcagcatcttgtttaatcacttgagtaccactaactggaatggcgaaagacacattattagtaaaattattcccactagaaatacggaagtctaatattcttaatattatgtagcaaatatactggcgaagcaatttgtgaaatagatcaaacaaattaaatttgacgaatattaacagacttgtctggtcctaagcagtgacctccagtgagtgagaaaagaagtcattgatagctaacaccattatagaaatatagcctaatttgaaaggcatgattttcatatttcattgacacatctggatgttttcatatttcaatggaatataagatacaagtatggattttgaagttcacctgaacaagggaaatgttgaagtaacttgtccggtgttcctgagagctgtctggcttcagtatctatcctacctgatgcagaatgaggcggtaacagttctgtaaatctttggggagctaactgatcgccatcatctttatgctcaaaatcttggccttttatgccctctgcatcttcaaatatagaagactttgattcaaagtacggattatccaaattgatgtcgttctgctggcttagtgaatatagacgtgggtcacaatgaacaagcttctcaacatgcttattcatcattcctggcgggcactgaagaaaatgcctccttacataaatgatagtcaaaagtcaactcaccactcggcagtattaggaaattagtcagcataaacaactgtgagagactaattcgttgtgataattgtctgatttttttttcacaattgttcctcatgattatggggtaaattccaaaatgctatcaaaatttccctagttagacaaaagggaaaaataagcaccatatttgcgaacataggggtatacattttaaaattaagcacgcatgttaccaacgtgtcattcatttttactacctgtgaatgcttgcttgtccaccagtgaaatcagatgttgcctgccataaagtgtgtttccttggctgtggattagtttctcgaaagaaaagtggctgccgggacaactgaacagagcacaaaagagagaattagcagaagcaatgatatgccaaaaaaaaaacactcataaaggccaaactacacagaaattttagatcaacgattagcat

SEQ ID NO: 29247 - DNA, 10972 bp, Oryza sativa
gccatttagacatcggaaattaagcaactgtgacacataattcaaacttcctatttgaagaaactatcaacaaaacaattaaaattccaatttcatgccaacatacgaattgtaatcaatatatgtacattctttacaattaaatcattatataagcttctgttaaattagttggggtttagattctgaatcccaatgattcctgaaatgaattaaacaaatatgtattcagtctttttgacaagaaatattcaaattaagatttttatttaactcttagacgatgacataaagaaaaagtcctatcaagagaaattaaattcgaaatgtaacattataaaattcataatacagcgtaacctaaaacaatgccatctctctgtttttttatcgactaaattgcgcagaacagagtaaacaatccattcaagttcttggtaaattcagttctaaattcctgaattgaaatttgtaaatgagaatgctataattagcattaaaaagggagaaaatgtggagttccagtcctttaccgaatgagactgttggctaacttgggctcaatcttggcagcaatcacttcaactgcccaagaaaataaataagaaataacactatgaaactagcatagggaaaaaataactagattgaataaaacagaaacctgtagagccacggagggagggagttgggttgcctgggacctcagtgagttcccatgccatgaagaccaattcgcaaggtaaactggagtcgagaacaagagatcttaggcagaggttctaaggtagatacgccatcaaaaatgaaaaaaagcaaggatgcacacattttgcctcagtaatgctaaatcgtagatcaaagaatcaactgccccctgcatgtttatcaagtgcatcagctctgttccaatttctccgaccacccttaacaaaattactacttccccattcctattcatgtcttgcccaataggccaataccaaaacatacaatgacagcagcgacttacttgcatccagtcattcacaaatctagtattggcatgtggcctgtgggcggcaggatagcagtgggattttttgtgaacaagggatcctctacacatgaaattcacttattttggctggcagtttttgttctatgtgggaactaataagaagataagatcttttgtgcagaataatgtgtgacaccatatgtttttagtgttttactgactataagagtatgttatatttgatgatatatataatattttcactaaaaatatatatatatatatatggggcgagtccccgaatccttttttttttcagcttgccaagtcggacactcgagtccgagtcggactccgacacctgtgtccgtgtcccggtaacactgcgttgagtaggagcctcggatgtggaggcatgtgccggagcggggagtagccaggattttttggttgggtagtcctacttcaaaggttcacatcacatataaaaaatttccgaacaccgcaaatcccatatacaagtacaaatttaattaaaatgtgataaaaataaatcaataatatcttttaacatcaataatcgactaattttaaaaagcacgttcaaaatgtgcaagttcaaacgatgcaatatccacattactcttcatcagaatctacaaatcctacaaactacaatggcagcaaatcagcagcatatcgctgactcatcatagatgagcaggcccaggattttaaagttgtgtattcaaaacgtaaaagggtaggaatttttttttagagcaaaagactaatgtttggcatgtataatatcacacaattctaaactattagttgtgtatattctatagcggatataacacaaacttgagcataattttgtatattcatagaattttcatataaaatcctccacatatagaattacaacatttaatttacaatttttcaacatatcaatatctagaacatggcaaatgataataaataaatcttacaatttagaggacaatttgccaatgcttttttttaaaaaaaaaatgaatgatgctgtcctcatccttaacttgagaagaaatccctttcaataaatgtaaccaagcaaccattcaagtttttttgcccttgcttcttaaattgtttttatatagttcattgaagaaaatcccttaatgactctagttctattgatgcatgcaaacttacaaaatgtaaagtcgcagcacatacagaattggagccgtggaacaaacctgagacaagatagtgaggacttgaaacagtcaaacgctaagatagatagacaaacagacagagtcagtgagggcgttgggcggctgctggcctccaggggcgggcccaggattttcaacttgggtattcgaaattagaagggataaaatatttttttccaacccacaaagtctaatagttgtatatttataacggtataaagtgttcatagaatcgaccaaaaattgaatgtgttaagcatattaaagtacagtactaaactattaattgacagaacatatcaaatttatagagcatagaaaatggaaaaatgataagaaatcttacaattcagaaaagaacattccgcttcttgatattttgaaaatatgtgcactgataaatactacaatatggtcttccaatttaagtactgaccatgctaactctgctaaatatgtgcactgataaatactaactctgctacaaagcttcagaaatcagtgaatcacaagtttcaaagttcaattgttcaaccatgaaccatgaaccatccctggatggctggattcaaatcctaaataaaaaaaatgttcaaccatgaaccattcctgattcctggattcaaataaactaatcctaaatcctaaatcaaatgaaccatcctagattcaactgtgaacaattcctaacccaaaatgtttctaaccaaagtaaccatcctggatttaggcagtacagagctgagaaaaaggacaatatgccactccattcggtgggtttagataaaatgccacccaatacattgcaaatgataaaatgccactcaatatattactttcaggatattttgccactttgagggattttaagaccaaaataccgctggctgtggatagagaggaagagggaggagcggaaggttgacccggacgacgctcatgctcgccggcggcgggtggcgagcgcactggggcgggctgcgacgggcggacagggggaggaagacggcgacggcgatggggaaggaagacgccggcgatgggggaggaagacgccggcgaagagggaggaagacggcggcggcgatgggggaggagggcttaccggcgtcttcttcctctcctcgtcgccgctagcgggagcacagacggcgctcgttcttccctcgttgccgcccgccgccggcgactacagccgacgccgttcgactcccctctccggctctctcccccttcctctctctctccatggtaggggcatatttgtcttaaaccttcttaaagtggcaaaatatcccaaaaataacctattaagtagtattttatccttcgcaatgtattaggtggcattttgttaaaaaccctccgtatcatatgagtggcatatggagtggcaggggaagaattaccttcgtgtggagctccgggaggcgtcgcggtgcggggagtggagggtggcggcgcgggccgcgggacgccgggacagcgtggggaggcgccgagtcgacgacggcgcatcggcggtcgcccggtcgctctcctggctgtggcggctggatgggttaattagattttgggatgttcttttgggccaatgggcctgaaatagtgaggagagaaggaataagttcatctgaagtcccttgacttgtaaaggaatccgatttaagtccttcaaccagaaaaccaaatacgacgggtacctcaactatcaaaaccgatgtaatataggtcccatggcagtttggatgatgattttagctgatgtggcgcctacattgctaatttaactcgtttttcatctaacgtggtattcacgtggtacatgaagcaaaatttaatctttattattataaaaattgaagatatttttaccggaactttggtacgtcatccgtgtttgagttgattttttaattttatgttatctctatcaacatttccgttgtctgttaataaagaaaaaaaaagtcctactcaaagaggtaaaaacgaaaaaacaaagtccgactcaaaagcaataataaaaaaaacttctgtcgacagtaaaataaaaaaaaaagcatcttgcgtccgactcccataaaaaaaaggaaaaaaaagtctcgccaataaaaagaacaaaaaagaagtccgtttggtttctttggcacgggtatttttttcaatttttttttacgcgaaagagttttttttcgcacgcgcctaggctcttggttttttcatctttttttaatcccatcgcgcctcccggcagcttttggtttttttatcaatttttttgtcgccggttttttctcctatgtgcttttggtttttctcatctggttttttaatccgatctttttgccgcacgcctcccgagttgaaccctgtagccgcgccgccgctatattgattgtgcgttttctcctcaaaataaaatcgattccccactcctccctcatcatttcctccattattttccctttcgattcggatttaatttgtcatatttaatatccgtttaacatttgccgatgataatagctatcttccccggtatttttatcttgagttttacactctgattttagaaaaaaaaatataaagaggagatcgagtggatgaaacaccctcaactaatttattttgggttatcgagaaagattcgactgatttgacgaggaacaaagagttttacgctctgattttggaaaaaacggaaagaaaagattgagtggataaaaaatcctcaaccaattttaagtgatcgagaaaaattcgaccagatttaatgggggaattttgcttcggtaaccatccagccacggactatcttcgaggggttgaagatggtagtagactatgctagctgagcttacggctacttggctacaggccaaacagagggacgtagcagactggcctagggcaaaaatgaaaggaaggctatctaccctagacccaggaaagattttcattaactttttcaattaaaatgtatatagcgatcccaatatttcaatttattgctcagcttttaatatataagtgaaaaaacgtctttacaagttgcaacgcacgagtcgttgcaacgcacaagcattttttctagtaacttaaaaaataaaacaaaatatgtgggccaacatgtcagtcaaataataaattttaaaatattaggacccacatgtcagtggcccacttcctccacctcatcccctctcttctctctctttcccttctccttctcccctcttccctttcttcttctccatatgcggccggtagcgcacggctgaggtggtgggcggcggaagagaggcttttaatggacctagtgcggcaggtccaccagtcgatggtgaacccgacgacgctatccatggctacgccgccgtagagggaagggagcaacggtagatggccttgagagccatggatccacgtcaggtggacaccttgtgccctcgtccgtcgttgctcccgtggtggcggcgtcggcaggcacggtgttgacgcccttggtgccgtggctgagcatggagagggccttgaggtcagtgaggctcagttgcggtgacacaaccccattcttaaggagtggtaccgatctgaatcccctgaactcatctcaccggtgtgtggctactgtgggcaaccggcgaagaggggccttcggtggacttgatggccgacgagctgctctaggagatcctgatacgcctgctgccccgcagcatcatcagtatttaagctaatctacaccatcgccgagatctagaggcccgcggcggctcgtctccgtcgccaacatgcgccgcccgtcggctgtattgctgcatcctgccttctaccattttcaaaaaaaaaaattgcaatttggtcctcggcgccaatgtcgttagcgccgtcccccttcacatttctaaattaactttcatcggggggctagggggacggcgccaacgtcattggcgccgtcatattggaccacggcgccaaagacattggcgccacgaaaaggatcattctagaataaggttttttaagggtctatttgtaggataagtttttcaaaaggattaaaatgtgaaaaatccagccttgcatgacacgctcacagtgttcatggaagttgactcaaattatcatggggtgcgcaatatctcagcaccccaaagcaccatagcccttgcacactctagaagcaattgatatctatacttctatatctacggcctgtttggcacagctccagctccacccctcctggagttggagctcagccaaacagtttcagcttcaccaaaagtatgagtggagctggatggagctctctcacaaaatgaactagagttgtggagctgagtttaggcagctccacaactctactccagactcaacttctgaaactaaatttaggagttggagctgtaccaaacaggcccctatactagtataaaaaggaggagttttaccctccaatcctacagccaaatcacacagataacgcggtatccggcatctccatcatgttcaatccatcgctaatcctcgccgcgttccccgcctccgccctcgcacccaaatcccacggcattcaatccatcgcgcaatctcgccgccgcgacaaatcctcaaaaccgctgcgctcaccccgccaccgcgcatccatccatccatcgccatgtcgcgcatcctccccatccctcaccggtgagagagaggaagaatgtacacgccctctctcccgcatctcgcggtcagcctcgcgctcaccacctgcccttgattgccatgccagtccgggctccagcgccacggccggcttctgtcaccagatccgcctcgcctaaagcagccgacgcctgattctctcttgtgcaacttccatgcttgtatggatccaggcaggctttcagccgccagcggcggccgctggatgtggcttatcatctctgccctcgctgctggatcgaggatgccgctcaccaccatagccgttcaagcaggggaagctggtcacttctgtggtagcaccggtaatcatcgtggtaaagtatatgcacgattggtagattgattgatcaatcagaagatacgctcgcttggtctgatggtcttgttcagtgttcactgttggctgagatagattgattggttgttttctcgggaatttgcaacagaggggaattttcatgaagctcatccataggtggacgatggacagcaatgccacggaaggcgaaagagcacgccgcgacaagaaagctcatgaaccagcagatggacccttttaatcagacattgctttcttttatcaggttttacagcttgcttacacacatacagtgcttgctttaacaagtagtatatgtttatcgtgtttaacctacagctttacaagtccaggtgttagattagttgattcgaaggtaatcatttagtttctcagggatggtaatttgaagattgtaaaaccttctatatttaggcctattatatcagagttaataaaatgggactggaagagggatttgtgttctaatatgaatgtcgacaagaaggcaaaacttttggaaaggaataatgagtagaaagaagagcaacatctggtatgaaagatttctgtaacatacacctaatttatatgaaaccaacctgaaacaacaaattgtgcttatcaaattgataagagtacttgcattagcctatggcttgtgttttttttttttggctatgaaaagctttggtatacattatattatttgtattcttccacggtttcagcttattttggtaccatatttgaaggatggattaattcccccgagcaccccaattgatgttgcacaacataagcaccagctgttaaactatgtcacgtaaatggagatcttggcctcactgtctgcttgagtacccctacaggtgaatcctctttcaatattatataatctatcaacaagttcaagtgaatgattgagctattagaggatggcacatatctagccttgagcttaatcgatatcgtgaggcaaaggggttcatacaagtatacactagaggttcagtcgatatgatctttatatatgcccggtgggtcaatatgttctgctaggggccgccgttgacgcgtggaccgaaaaggagttttcgggtttcaaccgagtgtacatgaacctacagggtcgcacgcttaatgggccggaataaggggtttggatggagatccaatatgagcttaattcggatagggatctgaataggattcctacgggccttggaggcccgagtgatggatcctatatattcgtgaggggtgcgaccggcggaggcattgcatcacgtaagaaaccctagccgtcacttccctccccgagcaaaaccctagccgcgggcgggtgctagcacatctgcgcgtggtgttccgtccctgtacgtgtggataccggtagaggcgccgctagtttgcggtgctgatcggcgtgggagtacggcgagaagaacgcacgaggaggagaaggtcgagccggtgcgatcgactactttctctacatcgccgcgcgctacttcgcaagaattccttcgacttattagcgcctttttccgttgcgcagcgcgtcgagtggtaatgatctatgatctaatacttgcatggttcctggtttacgcgatagaaaattttgatttatgctgtcgtagcctacgcgtatcccaacagcttgtgctctactttggcacctaccgtcctgggatcccttcgccggggtgttatctggtgctcaacacctgggccaactcggtcgccatcatcccgcctctgcacaccacctgcgttaccagcatgtcgcactgcggcattgggaccggggtcaccatcctacgccacaacgactactacgactacgtcctcgtcgagctcttctcacatcaggacacccgaacccatctcgcctccaataaggtcactctcttcttgtggtggtctcctagctctggcccgcggtcagtggatacagaaagaggtgctactccccatccctgcttccaatcaagaaaaggacgacgtgacatggccacccacctactccttccgtgcagacatggtgtttgctgttttgactacctcgctttgctgggttgatcttaggacagggatcttggtctgcgatcacattgacaagctcagcaccggcactgacgacgatgatgatcacctgcttttgttcttcatctcattgcctgaggaatgcgtcatgaagcctagccttctatcttggaagaggttggcagaagagcaccgcaccatgatctgtagggacccggagaccatcctgttcatctccatggacaactacatccaaggcctccccattggcgatacagtgctcacgacatggactctcaagttcccactcacgaaccattggacttgggagaagcactctgctccatccttgttcgtgggagaccttctaaatgaccttccagtcttgaaattaaagaatccaaggatgataggaaggcgctgcacattgccaactgcccggtcagtagcattgacagtcaaaaccatcttatcactagcctcactattaccgagtatgagaggaagcatgagcaagggcattggggagtcacgggattctgtacgagatcagcattgacatggatggtagaacggtcttggagtggtcttctcttgaaagtcgccactcaaagatatttgcagctgagtttaactgctgcttacaacaggtacactactccctcttttgtccatttaaagtgtatataattttgatacggcaaactcttggaaagttaatttaaagggtgaactccatttcatcgtcacatctgcggtttgctcctttcccatttttccccttctttttttagattgccctaacttccttctcttttgtgaactttgtttcttcgaaacaatggaatgggaaagtttgcagcggagttggtcatcaacatttaagtcgttgagcgacgaagaagtggttgatgaggatgatgaaaattggaagtgggtgttcccggatgaagtgggtaatgagtgacttgtttaagcattttacaaaactagtaatgtgcccgtgctaacgctacggcggtattttataatgcaagtgttgtatattcacattgttggaaaatgctattgacaattcttagtacaaaatgtaatagcaatgaaccgatgttataatcgattgatgcatatccttgttgcgttgttccgacccaccatttcaatctcaaaagattattgacataatcataaaaaaacaaatttccccaattgtacactggcaagaaacctaggaagacagtgtcaagcacatatatagtcgaagacactggcaagatccctgtggttgaagcacataaacaggtatgcagcctagctaaggaagaaggaacgtttgagaagtgggagtagctactacataagtgggatcgagctgcatagatctcagctacttcttgttggcttcttccccaaccatgcaaagaattgtatatagagccaccatacgcgctgcaacatggccaactgataatataggatttagtacagctaggcaattgaagagactgagcacatacactttggctgttttaaataaaacattttcttttgtattgtctctgcaagtgctcaatcagaaaaggttaatcagaattgtcaccaggtgacaatctcacaaaccaagtaggcagtttctttttt

SEQ ID NO: 29248 - DNA, 1097 bp, Oryza sativa
ccgcacatcctcaaatacaaagcacttccctagttagatgtaggttagacttcccgttcgagaaattttaccttctacctgccctcaatttatgcacgattaatgaatgccacctgggtggaagcgagaggtggaaatggaaggtcttagttcggaggtgggatctctacctgatagttgcattgccattcatgatgatcccctggcattcgtccattcagccattcaccattcacccattcaactggaattttggttgaatgccggaattgtgtccacaaattgtggatggatagttggttggctggctggatggctggctggatggctggctggatggatggtgaatggctggcggcggttcggttgctttgaagcatttgttgctatctaaattccatttaaggtcgtaccttatcgcccagcatcatcttattctctatttgtattccctccatctttcagatacggatgtagccttggatgtgcccgtgcccaatgaagaggaagagcgcaacatgaaacgtaagtacaaaagtaccggacacccacccagatcccaatagaatccgccaaatcctgcgggaaattgtaatcccattcaccagctcctacatttaattaacaagagaactattgtatttatctaacacctggattatctccacctttcatttgatccctatttatagattacgctgcgttgctaacgggccgcacctcctatttcctcaagggtgaggaaatgaagtccatgtacaccacctacaatccgcagaatgtggtggccaccgcccgtttcctgttccacaagaagaatctatactactccttctacacctcatcgcgaatcggtcgtccgcgtgccattcaattcgttgatgatgcgggtgtaatcctggaggagcatcaactggagaccaccttggcgggcactctcagtgtctatcagaatgccacgggcaagatctgcggtgtctggcgacgagttccacgtgattacaagcgcatcctgcgcgacgatcgtctccatgttgtcctcctctggggcaacaaacagcaggccgagttggctctggccggaaagatggccaaat

SEQ ID NO: 29249 - DNA, 1159 bp, Oryza sativa
caattctgactttagccaaaacgaggagaaacaatactgataaaggcaacattgaaaaggtagaaaataggagtaacaaagctcacatttctatccacctttagtcgttttgctgattcattaacagaataatactccatatttccatctgaatttggtttggttgatgatataattgaagggaacatcactttatccctctccgcagcattttcaatcgcaactatgcagcatgtctcagagggtccatggggggggaaaaccaccttcacagggcaatgacttctgctcagacggccttggtttcatccatccccaagggtttaaacatgaggcttccatattcaggctgttgcatttagaaacattggagtttgacaggaacaacctgctccctttcttctcagttacttcaagtgatgagaaggggctgtctgaattcaattcagcacatttgttactttttaaactatcatgttggagcgtttggtctgtagcctttgcaataatctgcatggttatggattaacaacaacagcagcattgcccacctggtacaagcaaggaacccatgttgaattaaacataattatttgatctacactgaagtaaacagcagagcatgacagacatcatatgcatgtccagcagtttcgtgttaaaggaagcacatatatggacatcgtgcttaataacaaggatttaaatcttctccaatagaggataaatacttgctctcaagcatatgtacctcgcaatttattaaacttgttaggttcgcacagataggttgccacgcaatactacaagaatgtcttattactagctccttaaattatcacaggtaataactatattgaggaaggaatgacatcaggcctgaattggagggctttaggagagaaaccctagggtggggtgatatttaaaacagagaaactacttcactgatttgcttgattcacaatgataactggctcatgtagtggaaatggcatctaaaggacacaagatttgaaagaaattccaaaagataagaactagatacaggtagcaagttggatacaacttatattgcttatcatattttcttcccacatcatagccggccatgatcctgtctgcctgagtctttccctagtccctactccctacacaa

SEQ ID NO: 29250 - DNA, 39557 bp, Oryza sativa
  unsure (1)..(39557): unsure at all n locations
ctgatttgcgtcgggcgttctgcagttgcatatgtaactgatcttttcaagcgttggaagtatttttttttagataatggaataaataaatattccggcctttactcaaaagagctacagccaattattacatagaagcgtttgacaaacatagtgtagatctaattgaatagaacacaccgcaaggaacaataaagaatccagtctaacaaaggagattacaattattgaaatctatttgtaaatttccacccataattggcaaaaggttgcataaccatagtctccaacttccgacatgcaacttttagaaactcttcatcatctttacacctttgtagttgtgctcaaaactgaagccaatgggttgctctgaaaatgacctgcatataggaaaatgatggtgatttgtcaaaaactatattgttcctactcagccatattgcccaacaaatggcagaagctccaacaagtatcagtttactcattttcttatcaacttccaaaaaccacccatcaaaaatatgagatacgctaactggaagattaaatccaaaagaaaactgaactgctctccacaaaaacttcgcaacatgacaatcgaaaaagagatgttgaatagacttattcttcaaacaaaacgaacacctcaagctgctattccaattacgtcttgccaagttatccttagttagcacaacccctttaagtaagtaccacataaaaattttaatcttaagtggcatcttaagcttccaaatgcacttattcctgtctatataaccattattaattaaagctaggtacatagacctcaccgagaacaacccattctgatgaaaattccatctaaaagtatcaaacgaatcattcaattgaatatgtactatagaggaacataattcatgccaacaatcaagattctgaccaactaaaactcttctaaaaaaacattaagcgaaacagaacccattacagtagcaatagaagatgttttcctacgagcaattgcgtacaaagatggatacttgtccttaaaagcccagttacgtagccacttatcctcccaaaatctaatttgtttcctattattgacaatccaagaacccatatttaagaaagtacttttaacattcataagaccagaccaaaaataggaatcatcttgtttcttgtcaacttgggttatagacttattataaagatatttcctcttcaataagtcatgccaaaccccttcctcattaattaacttaaacaaccatttacttaaaagacatttattttgtaccttcagattatgaatcccaagacccccctggtccttgggttgacaaacaacatcccacctagtgagcctgtatttttattatgatcatctccttgccaaaagaatcgcgatctataaaaatcaattttatgaagaacccttttcggcacctcaaaaaaagatatcataaacatggctaaacttgaaagaactgaattaatcaacaccaatctacccccaaccgataaatgcttgcctttccaactaagcgttggaagtatatagtactaaaaggcgtgtttcaaccatgagatttattcacaaataatccatcaactgtcataaacggaagtatataatgctttaagtacattgtagtactcatcgttgctgctgctggtgttgcaaaataacgtccacgtcacggtgatggtctttatttgccggtgttcccagctgaatgtccgcggtgaaggtgatgatccttgctggtgtcgtcatcgtcatcatcgtgtcgtcgcaggatccacgacgaggattgtgtgttgcgtgccatcggtgccaccactatcttggcaactcccattcttgcggctgcgggagccggacgtacgacgtccccgcccttcagcgtgacggaaccgaaaatccaacgccagcggcggcggctcccaccgagccgcgttcacgaatcacgccgacgcgggcgaccagccgcccagtttcgcgtacgtgtgagctaacgagcnccgtacgtcccaccacgttattcgatcggggcctcggcctaatgcgtaccagggcggcccaatttgttatggctcataggctcgaagccaccgtttcgccttcctcgtgaaatgtaagcgcaacagggaaagcatgtaagagcatcagggaaatcacgtaagagcatctccgagagattctccgttccaactcttcaagttaaattttggccatccaagagaaaaattgctcaataaaaaactagccatccagtttgctaagccatcctactagctaaaagtgccctcggcctggccaaacttggccatcctatctcgcttgccattcatgagtcccactacttttttttctctatcttctctcattcccaccgaagtgcaatagggaggcggggggcacaggcgttgttggcagcggcatggtagagggggagactccggtggccggcgacagaagcttagggatagtgtcatctctggtgagcagacgaaagcacgtgacacggtgctgtcggcactgctccaggaggatttgggtcccgcaggcgtagtctccgtggcatcggctacggcaacggtggcggccgagcggtgggacttcagctccggccagatcgatggtgcgctcgtcacccctgtcggtgtgagcaagaggtcccacgccacctggccaaggtccaccattctgttcgcctcctgccgatgtcgatgccgttcgcctcccgcatcgctgtcgtccacccaaatttatgccgccatcgtcttcctggatctgtgtcaccgctgtcatctccccgaatccgcgctgctgtcgttgcccccacatcatctatgctatctacgggttgtttctaggggtagacaaaaaactcgaaactcatgagtagctgcctagctcaactcgtgtaaaactcggcttgactcgagtcgagtcgttaatgagtcgagttgagtttgaactttcactcgcttgcttaacgagacaactcgagctagctcgtgagttactcggttagctcattgagctcatgatgcattaagatggaagttaattgttcatgtaggtataaaagtcgtaaactcataattatacattgtagcacaatcttgtgagtcatgatatacatagcatgtcaattataatctttggtcatagaatcacaaattataccgcatgtgaattttaaaccatgtatttcggtgtaacgagtttaatgagtcaactcggactttttaacgagtcaaattgagttccatttttaactcgttatgttaatgagtcgagccaagctagctcgtctacttaacgagtttttacaagtcgagttggcttgttagccacccctagttgtctccacctccaaacccacacttccagctctgctaccctcgcctttgctagctgctgctgctgctcccggccaaggaagtggtggtggtggcggcacggagaaaggggggagcggtggctgtgtggaggggtgaagaagggtaaggaggctgacatatgggacccactatcatagactcatatttgagagtgtagatggagagactgttgaagtgaataatgagtttgacttgccaaatcagatggagagttggctatataaatgtttggagagtcataatttaagtagagcgttgaagatgctctaacggcaagtcgacaaatacaacagccaacgtttcctctattttgattatgttctcctcaataattaacagaagaatttttgttcttaaaaaacaaacacgtacaattaatcctagcccctgcggtatacgaattaaccctatacgggtggcataaatcatggcaaattggcaacccctcacctggtagccaactctaggggattgacccattttcttctcccagtttcactgacatatggacccaccttgacttgtccggtgctgtacctcaacacgtgggcaggtgtcggagatggcctcacatggcgctcgtgggaaggatcgcttcgcatccaaccgttgcttccaaacgagcgacggggataaatccaacacacacgcttcccgttcccttcgtcttcaacattcgttctcctcgctgtcttctcccccctctctccaaaacccaaatcccccaaaccacccgcctcgcctcccccctcgcccaagcaaatcaaacccgaagacgccgagtcgccgacggccatggcgccggcggtgctcgtccccatcgacgaaggcagcgacggggagggcggtagcgccacggacgtcgcagccccctcccccgctcccatggacatcgacggcgacgacgacgggcgcgaccgcggaggagaaggcgatggcgctgcggcgagcgtcccggccgccgacggaagtagcgccgcgctctccctgacgctgggtctccacgtccacggcgacggaggcggcgcggaccgcctcagcgatctccacgaagacatcctcgccaaaattctgggccatctcagggacatccgcaacgtcgccaccaccgccgtcctctccaggcgctggctcgacctctggaccctggtcgacatcatcgtcttgcagtatgacgagccccccgactccagaatcgtgcaggaagttctcgccgcccgcgcgaggaatggttccacggccacggacatccgcctgctcgaggtcacctccctcaacagcgccacgccggacgccacggcctcctggctccgcgtcgccgcgccccgcctcaccggcgagctcttcttccgcaacaggtcctcggttccgtccgaaattctcaacgaggagatggacgtcgtggagcagctggtcgaggagcttggggacttggtggtggacgaatcgggcgccttcgagctgccctgcttcatgagggtcaccaagataacgctgagcctggggtttctcggcctatcgctaccaccatcgggtgtcttcgccaagctcagggagctgcacctggtgcacgtccagttcaatggcgaactcaccatggaagatgccatgctcccgtccttggaatggctagagattcgccattccagtggcttggcctccctgacgctcaggctggcgcctctgacccagatgactctgtacaatgtgcggcggttgcgtcggctcaacgccgtgcttccagggctcgaggtgttgtctgtaacggaatgcttcctcgaggatctggagggtgtgagcattgtggcagaggagctggaggacctgcggtggctagatatgtaacagcctggattggtctacttcaagaggatgccgcgcctgcagatgttgttgccccccgctgtttatccttatggattgcagaacgttttcttcaatcggagctgtcagatgcttctcaatctctgtccaagcattgacggtctcctgctgttcgttgaaatttgtggagattatgggtaccccatacccacacggcatggttatccgactagttataggggataacttatatttttgtaatatgtaacagatcatgacttgggtgttacgtttccttgtatattacggaacggcctaaagtcctggtttgataatattgtaaagtagatttaggaaaccgataccgtattggttaaggtttctatcttgtaatcctgccccccatcctatataaggtgggtaggaggccctctagggggcatatgagacaacctgatcgtcagatcaatacacactcggcggattcaaatccccaaacaggagtagggtattacctctcattgagagggcctgaacctgtctaaatcctttgtctccgcatccatccacttttaggtctcgtacgctacccccttttattattgccgaaatcatgtttcgacagttggcgcgccaggtaggggttgcgtcgagtttcctatcaacgagcgcgatggaatcaatttcatgagtcgccgacttcgttttcgctttgggagttttcacttcctttccgtcgaccacttcttcaagctcctcttctctgacttgatccaaatcagtcagggggaaactcaatctgatttttatcattatttatcatattgatttttaatctcagattaattttttgctattttttgttgttgttcgcatataactacgcggcactattgaggcgattgatgctggtcatggactcgaggcgtctcagctttccggtcgatcggccgcgagtccactccgccggcttgtcctcgccaccgccattgctgatagcaacaacgacttcaccgccggcctgcctccgtcgccgccgactggtgtcatcgcctatacggttggtcggtcacaccaccgttcatgggcgtccatgtcttcaccgaccggctggccttcgccgccgccgactggtgtttccgcctgcacggctggcctattatgccgccgctgttgggcgtctacgacttcaccaccggcctgcctccgtcgccgccgagtggtgcctccgcctacacggctggcctattatgccgccgctgttgggcgtctacgacttcaccaccggcctgcctccgtcgccgccgactggtgtccccgcctatacggtcggttggtcacaccaccgttgatgggcgtcgtcatcttcaccgccggcctgcctccgtcgccgccgactggtgcctccgcctacacggctggcctattatgccgccgctgttgggcgtcttcgctttcaccaccggcctgcctccgtcgccgccgactggtgtccccgcctatacggtcggttggtcacaccaccgttgatgggcatcgtcatcttcaccgccggcctgcctccgtcgccgccgactggtgcctccgcctacacggctggcctattatgccgccgctgttgggcgtcttcgctttcaccgtcgaccgccttcgtcgccgccgactggtgtcttcattgttattgatggacgactttgttcccacattggccacttctgccatcaccaaggggaatattacaaagctaagtcatcatttattttattctttatatgatatttttcctttcctctgcctcactacaccaattggtcttccattgagtagtgagtcgggggctacagatgttatatcatatttttttataatatttatcttgattgcttgcgacataatctgagtacaaaagtacctatcgagttatggagttctatcttcctatgctttccgtttggtttgccaatggatggttgcctttgggccgattcctagcacccgggggctcgttggatggaccgagtaacgcaaggtgctaagtattattcggaataaatcaaaagcatagagatgagataaatttattttctgctcttaataattgcaaaagtacccgagtagtaaactccgatccgtgaaactttgttccattaatgacgaactcatgtcactcatatgcatgtttgggaagtgcttaggtcgactcccagtgcttgggggctatgactagttgggcagagcgtttaaacgtaatgagtcatctgctcggggaaatcaaaattgacaagaggagaaatacatatttataaatattttaaaatacttgattttttctcgagtattatatttatatcagatactactcatcctatatgtttgttctgcaggatccagatccagatatgcataaaagggattcatggctttaggcttatctcttacgctccaggaatggatcagtcagaacatcaccgactggcttgccttcgccgctgccgactggtgtttccgcctgcacggctggcctttatgccgccattgttgggcgtctacgtcttcaccgactggcttgccatcgccgctaccgattggtgcttccgcctgcacggcagacttattatgctgccgttgttgggcgtctacgtcttcaccgaccggccgccgcatccgccgctgactggtgtcaccgcctgcacggctggcctgttataacgccaactgatgctaccttcttcacggctggctacatcgctgtcactactaataggcatcagtatcttcaacacaagctgcctacgtttgccatggctgccgactggtttcttcacttccatggctgcatgattctgccagtgttgattggccttatcttcttcaccgccggtcgtctcgtctgctgttgactagtgccctcacctctacgtctggtttatacagctaccactactgatggacatcatcgtcttccgttgccgactggttatgccgccgccgactagtgcttttatcttcacaactgcgcgtcttcgctaccagtttgcttctgttgccgccgactcgtgttcacttcatcacggcgatgcaactttgtcatcatggtggagcgacttcatctttattatcttcggcactggcaaactctattgctgctacttcacaagttttactacttcaccaaccacgacgtctttgtgaacctcgacatctcggcatgcaatgccatgatattttactacaacaaatgactctccaatattcaggatttctacttggacaccttcaacacatatcttcaatcaagcaatgactactcgacgacaagaagctataattctcgactctatgttcagttgtttcccaactaaccaaagagtcgggggctacacaaatataaggctcaaaatttgacaaattttatgtcaagctgaagaaatcaattaatcagccaatgagtcaactccaggagtcattatcttcatctttgcttcggaacagacattctacttcaacaacttcaaatatttcggtttagacgagttgggcaacaacatcaactctcctccaattatttgtcttcacggttggcctactacgcaactgccgatagaggatctcatcgttatcatcggctgctacatcgctattgactggatcaccgacatcgtcatcttcatcaacatcttgtcaagcctcatcaacatagccaactctgctgccgttgatgggaaacttcgtcatcatagtcggctatctttgttgccgttaatcatcattaccgttggatgcgtttgtcgccgccgattattttcttcatcttcatgattggtggatttcgccatcactgttgatgcgcgtctacgtcttcatcgtcggtttgcttttgtcatcaccgactgttctttcgttgttgttgggcgcctacatcttcactgctagctgacctgactgttgccgactggtttctttgcctccatggttatgcaacttcattacctttgattggtgtcactgtttttactaccactgacatcttccgttacttctgatgagcaatttcgtcttcatgttggtcatttcatctccatgccgactgcgtcagctattgccaatagacaattttgactatgacagaaggacaagctatatgctcaggggctcatcaactcaagcgtgaggattatatctccaatttggacttgttccggatacattccacatggattcatagtcatgagtctattttctatgctcaaagactggaccaattattattccccgtaagggctatcaaccgaatacttgcgccagtcgggattcaattattatatttattttggagtatcccataagggataatcattcagatcagaagctattcatatgagctacacttggtctatattacccggaagatttattactcgggagcatgttacatgcgtcatcctttaaagggtgtcgaaggcatattttttggcctaggcctaatatgtctgcagcccatattttcaggtgtggcctgtcacgttcttttagggacttaggcactttttgcttaggccaaagtgcgcgtgatcaagtgcccaataccttaaaatccttttataccgcagttacttaactttttaggagttggtacaatgcatcttaaaaggtgtcaaacagtaaagctttatatagctgtcccgctgacttttttatatagtcaaggtgctgtttgggtttatcaagcaattgattggatacaatatcattgctttttgccacgtaagtgtgcatttttattgaccaatattatggcttaggctgattatatattatggtcatttttcaggcggttggtaaatcctttatgagtttacttactcggatgttataccacatatgccatatatttccaggtgtggtgaaaccatgtgtcttttagggacttaagcacatctgttaaagcagtgtgcgcatggcgtatgcccaatactttggaaatttctttattcacagcattcaagcttctttatagctattttgctatatcactcatcatattttacaaagcagttggtatatcacccggatcatgttatttggaggattcacaccgcatatgctatatattgatatcaagtcacttggttgattacgattatcaaaaccactcggttggttggattatttattccttgactatatgcttggtttgttcaattaaccacattgtcgggggctacacctattaggtgcatctagtcggtgcacctgactatatttttcagccctccacagtcttcagatttggtaaaagtactcgggagaccatggcgaagatgattgaagcactcggctttggagtaatctagttcgagagaaggttatcttttcgactgtgaaggtctcaggggctactgtggagattatgggtaccccatacccacacggcatggttatccgactagttataggggataacttatatttttgtaatatgtaacagatcatgacttgggtgttacgtttccttgtatattacggaacggcctaaagtcctggtttgataatattgtaaagtagatttaggaaaccgataccgtattggttaaggtttctatcttgtaatcctgccccccatcctatataaggtgggtaggaggccctctagggggcatatgagacaacctgatcgtcagatcaatacacactcggcggattcaaatccccaaacaggagtagggtattgcctctcattgagagggcctgaacctgtctaaatcctttgtctccgcatccatccacttttaggtctcgtacgctacccccttttattattgccgaaatcatgtttcgacaaaattgaactagtgagtgcctcttcttcctctgtttcagtcaagtaatcaattgtgtattgctcgaactgcaatgtggattatcagatgattatccttcagaatatgcaattttctattgcaaacttgcaattgttaagtttagatcatctaagctcatgagtgtttaggctcaacactcaatgctcgattcagctgcagttttttgttggcctatcttttgcattgttgagagttgaatatcttgaatactagttagaaagttgcagaataggagaacaatcttgaactgaacttcaaatgtatacttgaccttaggaaaataattttatcagcacattttcaagtgatacttgtttctgtacaaaggatcaattgctgcattcatgtttactgagctagcataattgcgagtcatccatgcttgcatttctcgatatgctgcagtttctgagttgtcgttaccaaagagatcgtcattgattatcagttgtttcaccattatgtggttgttgaacatgattacataagcctgcagatacatctaattcacttgcactacaattgaattcagattatattaatttctattacatctggccgaaaagcagcatccaaagttccaaactgaaaatgttgactctgcagcaaattactagatcgttacttgtctgcaagcaaattactgattcttcaactgtatggccttctgtcaaacatttctttgctctttcccagttagttttgcattttgtctgagattacctctgttaacttcctacaaattcataggagcaaggcgacaagcatggcgttaggcctttaatggaaggcattacccaactccctcacattaagatcttgtgcttgaatttactaacacgagggcatgcttatggagctagtgtgttgcatattctgacaatgtgtactggtatagcagtgctgggcctgagaatagaagaagatttccaggtaatcatgtttcctatgaattccgaacaactgcgttttttaattctaatttctatacctgcagtaaattcttaagtgtaattacaaacgctctgttggtttaggcaggaagttactccctcagtcccatatttgactcatcccatttgtgtcccaaaataagttcatttttaagcaaacattgcatcagagtttgcgaaagtgaaaaataattgtataggaagtagataaagcgagaaataattgcattgggattgaataaagtagggatatactagttcttagtgtttgtattggtatgtgtgggatgatagaaaaatgagcttattttgggacataggtagtactactccgtcctataatagatgtcgctttgactttctgcttgcaacttttgaccattcgtcttatttgaaaaattagtgtaaatataaaaaaagataagtcatacttaaatacttttgataataaacaagttaaaaaaataaataataattccataattttttgaataagacgaatgatcaaacgttacaaataaaaactcaaagcgacaagtattttgggacggatgtagtatcaattatgcctatttatgacatagcaaaagctaactcttgatatgaattaatttaatctgggccttttgtttccctattcacatattacttgtcttatcatcatagccctcttggacaatataatttcctactgtccttttaaatgatccagtctgtcagagatgtaatagatccatgaaagttttggtagcactgaaagtcatgcttcattgtgtgaacatattatccagcctatgtgacatgcattaaacctgattagaaaaacaaaatcatgacaggaaaaactgctgtttcaattttcatcattccttttagggtgtgtttagttcctgaaaaaagttgaaagtttgaagaaagttgggagtttagaaaaaaagttggaagtttacgtgtgtaagaaagtttttgatgtgatatgatgtgatggaaagttgggaataggggggaaactaaacacggccttactaggctgtgtttagtttctgaaattggggagaagtttggggaaagttggtagtttggaaaaaaagttgggagtttatgtgtgtaggaaagttttggatgtgatgtgatgtgatggaaagttgggagttggggggaagtttggtgtgaactaaacacaccctaggtgccgaacaatatgaaccttccgcagttactcaacgtgtcagacgatgaatctcattaacaccttgtactttgttctgatcttgtaatttcaggttgaaaatgcttgtccagtgaactgcctctgtgaccggccacgaaactggagagataaggacatttcgatgagatctctcacagaaatagtgatcctcaacttcagagggaagcaacatgagcttgaccttgtgagggtcttagtccaggtagcaccagcccttgaccttgtaagaatgacatgtcaccgttcgttagctgcttttggggtagagttgctacgtgcctatgtacgaagttttgcaagctttaggacttctgtggaagtgagtcaaagtaactgaagcaagaatagctatgcgaccgtagcgaactgaagtataggctactgatctttgaaatacctgacaaattttgatcctgctatgctgtagagaaacagagaaactggctggctgcaacgaacttagttgccacgcgttgttcatttgtcttcataagcaaatttatcatttgttagcaatttggaatgcctttttcgtatgtttgtcagagctgaagtaatgtgtttggcgcacccgctcactgtagcttttacggctttaccggtaatccaccacggatgcactgggtgtacatggcatttctgatttgcgacgggcgttctgcagttgcatatgtaattgatcttctcaagtgttggaagtatatagcgctgaaaggcgtgtttcaaccacgagatttattcacggataatccatcaactgtcatatcggaagtatataatgcttgaagtacattgttgtactcatcgttgctgctgctggtgttgcaataacatccacgccacggtgatggtctttgccggtgttcccagctgaacgtccgcggcggtgatgatccttgctggtgtcgtcgtcgtcatcgtcgcaggatccacgacgaggattattgtgtgttgcgtgccatcggtgccaccactatcttggcaactcccgttcttgcggctgcgggagcgggacgtacgacgtccccgccctccagcgtgacgcagccgaaaatccaacgccagcggcggcggcgtctcccaccgagccgcgttcacgccgacgccgcgccgccgcgggcgaccagccgaccggttttcgcgtccgtaggtgtgggcgtgcgtgatcgatcaagaggcctcgactctatggaaaatgctatatgtactactaccttctcttattgtacgccgttgactttttatccaacgtttgatcattcgtcttattcaaaaaatttatgtaattatcatttattttattgtgacttgattcatcatcaaatgttctttaagcctaacataaatatttttatatttgcataaaaattttgaataaaacgaatggtcaaacgttgataaaaaaatcaacggtgtcatacattaaaatacggagggaataactttttcttactaggtggttatcttttctcttgaagatgaagattaatttttttacgcagaacgaggtggtattaacgtttgatggattgagtttaattattaaaaatttaaaaaataaattaatatgatattttagagcaactttcgtctagaaatttttttgcatgagacacaccctttagtagtttgaaaaacgtgtcaccaaaatcttaatcttcatccaactcttgttgaagaaaagaacgggacctaaatttatacgatagatgaagcatgaaaattctgtgataattctacaattctgcagtaaaaattatcctgtgacatgttgttgatgcaagtttatttgttgcatggttagttactgttttttaaagtacaaattaacatggcttaattctagcccttgaggtatacgaaatggcatagatcatgccaactcctcacctggtagccaactgggatctggaccctttttcttctcccagtttcactgacatatggacctaccttgacttgtccggtgctgtacctgaacacgctggcaaaaggtgtcggagatggcctcacacgatgatcgtgggaaggatcgcttcgcatcccaccgttgctttccaaacgagcgacggggataaagccaacacacacgcttccccttcacttcgtcttcaacattagttctcctcgccgtcttctctccctctctccaaaacccaaatcccccaaaccccgcctcgcctcccccctcgcccaagcaaatcaaacccaaggacgccgagtcgccgacggccatggcgccggcggtgctcgtccccatcgacgaaggcagcgacggggagggcggtagcgccacggacgtcgcagccccctcccccgctcccatggacatcgacggcgacgacgacgggcgcgaccgcagaggagaaggcgacggaggcggcgtggaccgcctcagcgacctctccaacgacaccctcgccaaaattctgggccatctcagggacatccgcaacgtcgccaccaccgccgtcctctccaggcgctggctcgatctctggacccatgtcgacatcatcgtcttgcagtatgacgagccccccgactccagaatcgtgcaggaagtcctcgccgcccacgcgaggaagggttccacggccactcacatccgcctgctcgaggtcacctccctcaacagcgccacggcgggcgccacggcctcctggctccgcgtcgccgagccccgcctcaccggcgagctcttattccgcaacgcgtcctcggttccgttcgaacttctcaacgacgagatggtcgtcgtggagcagctggtcgaggagcttggggtggtggtggacgaaatgggcgccggcttcgagctgccctgctttatgagggtcaccaagataacgctgagcctggggtttctcggcctatcgctgccaccatcgggtgtcttcgccaagctcaaggagctgcacctggtgtacgtccggttcaatggcgagctcaccctggacgatgccatgctcccttcttggaatggctagacattggcaagtcccgtggcttggcctccctgacgctcaggctggcgcctctgacactgatggctctgcacgatatgcggtggttgcgtcggctcaacgccgtgttgccggggctcaaggagttgtctgtgtccgaatgcttccttgagcatcttgatggcgtgagcattgtggcagatgagatggagcagctcaggtggccaggtttctactggcctggattggtctacttcagcaggatgccgcgcctgcggacgttatgcgtctctgtctctgattttgctcatggatcgcgcgaggctttcaatcagggctctcagatgcttctcaatcgctatccaagcattcaccatctcgagctgcgcgttgtgatcaaaacagtgagtgcttctccttcctctgtatattgttcaaattgcaagatgggatatcaatttagctgttgccatggttatgttcaaatcgtctttaatatgtgcacatgtcatttgggttgtaagctcagtactgaatgcgtgatttggctgcagttttttattggaaaatctttttctattgcttagtgttcgccaactgttttgttagttgcagactagcagagcgatcttgaacttgatgtgataatttgttgatgtgctaaagattcagtttagtgttttctgtcttccactccgcatatgctgatgcggtttctgcgttgcctttaccaaagagataagcaattattaccaattagttatcgttaccattatctggttgctgaacatgagcctgcagatatatctaaatttacttgggactgtcattgaattcagacaatattgatttctcttcctgctggctgaaatggaacagacatatggaggatatacaaactaaaattgttgacccaagctagctcttgtacaagcaaattactaaatcattactagtcggaaggcaaactactaattcttcaactgtatggccatttgacaaacattttttgttctttcctattagttttgcattttgtctgagattgcttctgttaacttcctccaaattcgcagggtgttacgcctttgatggtaggcataaccggactcccttacactaagatcttgaccctacatttagttacagagggccattcttatggagctagtgtattgcatattctgacaatgtgtactcgtatagccaagctgaccctgatgatcccaaaatatttcgaggtaattatgttccctatgaattttgaacaactgcatttttcattctaatttctatgcctgtagtgaattcttgagtaagtggaagtgcacatgatttatgaagttatcaattatgccctatttatgacacaacaaaattaaatttaactcttggtataagttaaatgataaataggcccatttgttgtaaaattcacatacttgtcttatcagcatgtccctctttgaccatttctttcctgttgtccttttaaatgatccagtttgtcagcgatgtaaaagacccaagaaagctttggtagaagtggagtaatttctagcactgaatcatgcttaacggtgtgaacatattttccatcctatatggcatggattaaacttgaatagaaaaaatataatcatcattagattaagaacagctgttttcagttttcaccattccttttacttactgaagtgtcgtattcacagttagtcgacgtattagacgattaatacattgtactctgttcttatccttgtaatttcaggtcgaagatgcttgtgcagagatttgcatctgtgattggctaccaaactggagaaacgagaacattttgttggagtgtctcgaagaagtaacgatcctctactacagaggggaggacgatgagcttgaccttctgaagctcttagtcaggggagcaacaggccttaggaggataagaatagcccgctactgttcggttgctgattgggagatagagatgctacgtgctgatctacgtgcgtatgcagaagaggttggaagaagtcagatttccttggaagtgaggcaatgtaacgagtaactgaagagtgaagaccgtagtgagctgatgtgtgcggcgccttcttgctcagacctgaagtaaaagaagagctctgttggctattactgatccttgatgtacctgacaagttttgatcctgctatgctgtactgtaacagataaactggctggctgcgacgaacctagctgccttgcgtggacatttgtcttcataagcaaaagggttatcatctactactaggattttggaatggctttttcagcatgtttgtcagagctgaagtggtgtgttttgcgtaacagctcactttagttttcactggcaatccagcagggatgctctgtgtgtacatagcatttctgatttgctacggcgttctgcagttgcatagtaagtaatccatcttgtccaagtgttggaagtagtatatatataatgctaaaaaggcttattttaaccatgagatttattttccaaataatccatcaactgtcataatggaaatatataatgctttaagtattgtagtcttggtcattataagtaacctagtaattgtcatagcgtccaatgtccatactactcatctttgctgctggtgttgtcatatgatccatggtgatggtctttgccggtgttcccagctgaagatccgtggtgatggtcctttgcttgcgtcgtcatcatcatcgtcatcgtcgtcgcaggatccatgacgaggattgtgtttgcgtgccatcccatcagtgccgccactatcttggcagcgcgcccgtcttgcggcgccgcgggtgaccagggacgacggcttccgcctccgatacgccgcgggaaaatccgtcgccttgaccagcttcttctgcctcggattcggcacgtttcgtggcaatggctttggttttgggggctattgccgcgccggcgcccgggcggccgtgcgcgtgatcgatcgagagatgtcgatccactccacgcgcgtgccgcggtgcacggcgtgaggttggtttccggagcgagacatcgatccgaccgcgttattccatcgggggcctcggcccgatgcgaaccaggccggcccagtttgtcacggctcatctcatcggctcggcgccaccatgtcgccttctcttgtgaagttgtgaggaggagcagcagagcacgcaacggcaactcggcattcggcatttcggaaagcagcgatgttctgttcgaacgtttgctgagagaggcttctacgtagcggggaacgtgtgaggctgctctaaattgcaacatgatcccattcgaaaaattgctccgttttgaaaaagtcgcgtcattacaattgtttagtgatggttatcaataggtatccaatacctactctctcaccagtctaaaaaaaaccctactctctacatcttaaaaaaccaacctaaaaataatgtgatacaatctagtacaacaaatatagatagatacctatccagatctatctagatttattgtatctagattgattttcataggacagggagtatactcaaaccattagtttaaacttatttaagacttatgtgccacattatctcgcctggacggaatgatgtcgaatatatcatatatggtacactataggtacaacctcatacctgtcaggtaataggcttggtacccgtcggtattatctgattattggatctgatgtcgggacggagtgaggagggatgggagaataaggaatagatatggtttaccggtgcaagttctcccatgtggaaacaatgatgcaaagttcaggtggcgccaaatccatcgctagggatcttggggtttcaaatccgccacgaccgagcaacaaggacgactacggtgctactctccatctttcctcggtgcaacaatggtgctgctccgatcctcactcaacacaacagtggcgctctccatcctccctcgtcgtgaccccaagcaagaggaggtgcagcaggacgctccctaatctcctaggtgagaggaagagcaataggcgataggaacagcatgagacgacaaagaaattaaagggaaggaacataaggccgtggagaaaaaagaagagccacaacaggatgcgatgatgtcgaatgatacaaggcatcgtgtgaagcggaggtagacagagtaggcgccatgagaagcggacgacgggttcccgcctagatggtaagaacgggatcccggtagatatcattttatttatttaggttgcgttcgttgtaatgagttctgggggattgggtgagaaaaggatatcgtattccgcgcgcacgcttcccaaactactaaacggcgtattttttacaaaaattttctataggaaagttgctttaaaaatcatattaatctattttttaaatttaaaatagttaatactaaattaatcatgcgctaatagctcacctcattttacgcatcttcccaatcttgtcaatcccctctcctcaaactcacccttaatatctgagctacaatcagtaacattattttttgtcaacatgatcatttgctctcccgagctatatctctcttcccttctcgtagtacgcttcctgtaatctctcgctggcatgtggacccaccctgacttgtccatgctggacctgaacacgtggcagtatcggcgattggccgcccgattgcctcagacacatcgcgatcccgccgttgcttccacacgagccggtggaataaaaagcgaaggccacggctctctcccccctcccttctccttagctcgtcttcaaatttatcctcctctgcagctctgctctcgccgtcttcttcttcgtcttcgtcttcctcctctctccaaaccccccaacccaaacccacctccccaagcaaagaaaaaaaccgcctcgaaggccatggtggtgatcgtccccatcaatggcgacggcgacggggagggcggtagcggcacgttcgtcgccgacaaccccccggaccctgcccccgctcccatggacatcgacgacgacggcgacgggcgcgaccgcggcggacaaggcgatagccccgcgacgcaggatctcctcagcaagttgaacggcagcggcggagaaggcgacagccccgcgacgcaggatctcctcagcaagttgaacggcagcggcggagaaggcgatagcgctgcggctgcgcgcgtccccggcggcgaaggcgatagcgccccgctctccctggcgctgggtctccacctccacgtccacggcgacggaggcggccgagacggagtggaccgcatcagcaatctccccaacgacaccctcgccttcatcctgggccaactcggggacacccgcaacgccgccgtgaccagcgtcctctccaggcgctggatcaacctctggacccaggtcgacatcctcatcttgcgctacgacaagccccccgactccagattcgtgcaggaagctctcgccgcccacgcccacgcgacggagggttccgagaccacggccatccgcctgctcgaggtcatctccctcaacagagccacgccggaggccacggccgcctggctccgcgtcgccgcgccccgcctcaccggcgagctctacttccgcaacaggtcctcggctccgttcgaagctctcgaccttgaggtgttctcgatactgtatgaggctgtcgtggagcaggagatgatctggtcgagtagctggttccagctgccctgcctcacggaggtcaccaagatcacgctgagcctggggttcctcggcctctcgctgccacagtcgggctccttcggcaagctcagggagctgcacctggagcacgtccggttcaatggcgactacaccctcgacgatgccatgctccccctcttggaatatttaggcattcgcaggtccaatggcttggcctccctgacgctcaggctggaatctctgggctggatgggactgtacgatgtggtggggattcgtcggctcgacgccgtggtgcctggactcaaggccttgtgttcggtcggatgcttctgctatcatgatgtggacagcgtcagcattgtcgcggaggagctggaggagatcgagtgggaggatttttactctccacaatcgttcaacttcaacgacttgccgctgctgacgatgatacacacccactgtgttttttgttctgaatcgaacgaggctttcatcgaaggatactatcagcttcttctcaatcgctatccaagaattagccatcttgacctgcgttttgtgattgaactagtgagtgcttcttcttcttcttcttcctctgtttcaatcaagtaatcaactgtgtgttgctcgaactgcaaggtggaacatcatctcattatcaatttagtgttgcaatagttatgtttagatcgtcttttaatccgttgtaagctcaacactgaatgcttgattcggctgccgtttttattgggaaaactagctagaaagttgcagaccagtagaataatcttgatctgaatttttttttttgtttgtttctttgacctttggaaaatattgttatcagcacattctcaactgatactttgtttctctacaaaagatcaattgttgcattcaatttagtttactgagctagcataattgcaaatcatgcttgcattctggatatagtaatgcagtttctgagttgtcgttatcaaagagatcagcattgattaccattcgtttcgccaacatctggttgttggacatggttacatgatcctgcacataaattgagttcagactatattaatttctatttcttctgggcgaaaatgttgactcaagctagctattccgcaagcaaattactaaaacattactagcctgcaagcaaattactgattcttcaactgtatggccttttgtcaaacaatcgttgttctttccttgttagtttttcattttgtccgagattgcctctcttaacttcctacaatttcacagattcgagatgaaaaaagcgttacggattcgatgatagacaatatccaactcccttacattaggatgttgaacctagctttgaaaacagaaggccatgtttatggagctagtgtgttgcatattctcacaaagcgtactactatagcagagctgaggctggtgaaccaagaaaaattcaaggtaattatatttcctatgaattttgaacaacggcattttgattctaatttctttacctgcagtaaattcagttaactcttgaaaatttcttgtcttatcgtcaaatccctctttgaccatttctttcctgttgtcctttaaatgatccactctgtcagcaatgtaatagatccatgaaagttttcgtacaagtgtaatatctaccactgacaatcatgcttcacgatgtgaacatgttttccatcctccaagtctatgaaatgcattaagcttgaatatataggaaaaatataatcataagatagagaactgttcttttcagttttcatcattccttttacttagtagtgtggcacaaagtgaagctttgacagttactgaatgtgttagacgatgaatctcattaatgctttgtactttgttttgatcttgtgatgacagtctgatgatgcatgtaagctggagtgcatctgtgatgggccaccagattggagagaaacggacatttcgatgaggtatctgaggaaagtagagatcctcaacttcagaggggaggaacatgagcttgacctcctgagggtcttagtcagggtagcaccagcactgaggatgatcagaataatctgccaccgttcgtgcgctgcttgggagacactatctgcacatatacgaggttttgcaagagaagcgacttctgtggaagtgagtctgtcagagtaagggaagcaagaatagctctgcaaaccgtagggaactgaagtaagaagagagctctgttggctactgatctagtctgatgtacctgacaaagttttgatcctgctccgctatgctgtaaagaaacaggagaagttttagctgccattgttctttgtcttcgtgaagcaattttagcattctgcattctggaatgcccttttctgtttgtttgtcagagctgaagtgatgtgtttggagcaccgaaaatggagcacacggatgagttgagccgctgaacgtttgtgattttctacggcgttcggtagcagcatgaaattgcttgtgttagtcgctgagaagaaaatcgttgttgtatagagcgtgaaattgcatcagaacatgagcagtcctgctgtatgttgatcatgcataatcctgtgggttttttttgccgtgccaactgccgagttggcctagagcaccacagcccacagcgtggcgggccgcgcggcacaacctcatgttccgtcacggtcgcgacagtatgtggtcgatggcctcgcacggcgcgcgcgtgggattcctcagtttaacatcctgccgttgattccaaaccagcggcttggacaaaagccaacacacaagcttcccgttctcctcgtcttcaacaatcaacactagtcctcctccaccgtcttctccggttctcccctctccccaaaccccgcctcctcacaagaagagaaccaagaaatccaaagaccccccctcacccacggccatggcggttctcgtcccgatcgacggcggcggcgacggagagggagagggaggtagagccacggccgtcgccgaccccgcccccgcccctgctcccatggatatcgacggcgatcgcggcgcgctcgacgtcctcgcccccgcccccatggacctcgacctcgaccgcgaccgcgacgggggcggcgacagagccgcgctcgtcgcctccaccagcaacgggggcgggcggggcggcctcctcagggatctccccgaggacatcctcgccggcactttgggctgcctcagggacaccagcgccgccgccaggaccagcttgctgtcccgccgctggcgccacgtctggaaatgggtgtccggcctcttcttgcatcattacccagccccacgactccagccccgtgcgcgccgccctcgccgccctcgccgtgcacgcggccaccagcatcaaccagctctacgtcacctccctccatccacagcgccacgccggacgccaccgcctcctggctccgcgtcgccgcgcccctcatctccggagagcttctcttctgcaacaggagctcgattccgttccacatgcttttcgacgaggtattcagcgataccatcgaagaaagaggcgcgctcgagctcccctgcttcacgagagccaccaagattcggctgcgcctggggtttctttgcctatcgctcgctgccgccgtcgggcgtcttcgccgcgctcagggagctgcacctggtgttcgtccggttcaatggcggcgaactaaccctggacgataccatgatgccgttcttggaaggggtagagatctggtgttcccgtggcttggcctccctgacgatcaggctgaagcatctcatctcgatgaatctgtacgccgtgcggggggttgtttgggctcaatgccgtggtgccgagactcactcaagtttgatcaatccatcttggagcatatttgatcttctgtacacgcaattaatttaactctgccaaatttcattgctatttagctctgcccaatttcattgtgacataatcatcggtgccacaaattctgtttcaccaatctagcaaatatattatgaaaatcataacgagttgcctagctaatctaaaagatcgaggatacatagtccacattcaagatttattgctgtcatataaattacaatcaaaatatatatgaagctattcgagattcccagaaattataattaagtcactcgaattatgtttggattgtttggttcagctctcttattaaatgttcccatatataagctttgccagcagaatgatcttgggaaaacaactaactgtaaagaacaagtatatttgccctctccgattagttacaagaagaatgtttacatttcagcaaatgactagtcaaatccatgtctatttgtatgcttgatgcaattttttcattacatcattattcttccttacagagctaaatttgtactgagaagcatcctaaaggtgacaagctcatgatcttgtcataggtctcttcatccttggcttaatagatttagcaacaatatattatgattttctcaaggcacattatggttgcatactgaagaaacattagagaaaatccagctcattattatagtgctccttgagatttatctgtatctctgatcttccagcaaaaccaagttaaatttctgatctattctatccaacttgtagctcaaagaaaacgattggaattaatttcatgtaatagagaaaggaattagcaatgcatttaacttgacctcgggggcatatataaaaagaagggatcattttaatttcaatagtatgtgataaaaaatattttgaattgcatatgtattacattccagtgtcttaagaaaaatgcagttttcgagcatcttttctcctaaagataaagataaagttgaaaaattaagtgtgttacgttagtcgagatagtattaacgtatgattaattgagttttaattattacaaacttgaaaaaatagattaatctgatattttagagcaaccttcatatagaaagttttcgcatgaaacacaccgtttagcagtttgaaaaagcgtgccacgaatatgcaaaattttatccattttttgtagtgaaaacgaacggaacctaagtgatgaagtattctgtggtagttacctttcttagggcacatgcgcatatcttaagagataggagtacatagcgcatacttaatacttccttcagcaccatgtgtgggtgtcatgccctactgtagtaattgttgttgtccctaattaaccagatccaatcaactgattatcatacgaaagtatccgaggaatttagttaaaacaaaggtatatatactaattaacctttgctcacaatttatttcagtatcatctgtttttattagctattcaattcttaattagtacggacctaattaatggggggagggaattgaacaaatatttcatataaagcatccaatctgaagaaaatgatggaatttttttttaaaaaaggtctgttcatggactgctatttatgcatttaaaccggttactaggaacttggtgtgccatccaagtgtatatgagcaaaacagcagcagagcttatatactgacttgtaactgttgtaagctaaatcatcaagaaatgataactatatatatatataatatccttcccagaattcttcaagacaatgttagatatcttttacaaaagggtaaattggaaccatgccattgtaattttacaaagagcattggaatttggacagacccatgggttagcaaattaaatatgagaatatatccctttttgtcttcctttcaggacatatgatcaattgcacacataaggtattatatctaacaacggtcaacgagctctagctttgaaaaatacatcagtttcacatttttgacaaatctactatatatgctctcctgattcctaccaaagtgtcaccaaatgaataatcagtgttaacacaagttgcactaccaaattttatttaaaaactctgatcgatctgcttgtggggtatgttgtaatgtagtacgtaaagatatttatactatgtaaattgtgttagtcacatattttaagactagctagcaaagttgtgctattgacacaattaaatgaaaaatatatttaagtcacccatctgattgattaattgaacataattgacacactagtggatggacttatgtgtgacttacacaaatgtggaaagcaaatatgtaatcaactcctagctgagatcaacacaacacaataactgtatgtcatacacacacaactagtatcatcaatttattaatatcacacacacaacaactaatacaaattaatacacagtcaattaactactcaatcgattatatccatatattaattcgcatctcgcttttaattagccggcagctacaagctagtaataatctaactaagttgatataattaaaatcatcggcatataatataaaaagatgagagacacatactggtttaataggaaatttgatctgtggaacatcagtgcaggtactcgagaaaagctccaagatcctactaaaatgcttcgaagaagtgtcgattgatgacgaatatgcacttctggaggcatccggtttccccgatcagcttgacctcctcagggcagcagccttcctagcagaactcctccatcgccggcatcgagagtgacatggccgagtccttcaattcaatgacgaagcaatccttcacttgcatctttgtgagattggctgcatccacttccagccattgcagatcagatcattgacagacacgaggaataaggtcaggagtgagctggtgtggatggtgagctctctcacgcaggagtagatgctgacaagctcgaggatctgcaggcgaggacagccctacgacatgacctcgctgagatacgtacccgccctcgtcatcggtgatgacagtctccgataagtgaagcttcgtcagcagtgcaaacgttggcttgtcgtcgtcggccagcaccagctggatcaccatgttgacggagatggtacgtgatctccgttgccctcttgaagcatgggagctcaaggagatcagtgtcctcatcatagttgtcgaacatgtcaatcccatgcgacacgaagaggtgaaatcggctagtgactagccggacgacagtgtcgatcgacgcacgagatgatgtcattattctcgaagccgaattcatccccgaggaccgatatagcgaggtagcgtaagaaacaaagggatatcctctcgagagatgaaaacactttcccgacaggagagcacacgggtgcggatggcctcgaccaagggcaagaagacaaggatgtggcggagaagctcgtcggcaagggagctgatttggtcgggaccctcgtaagcactaccctttctgccagatccgccggtgctagaagcctaagctcttgcacttcgcccatgggctgctgctggcgccccgagctatgggagagaattcaggatggggagggagatcgaagcaacgaaaggaatataggtcgggttatgtggctgtggcactgcctcgagagagcaagagtagagtagggaattggaggtggctagggttccgtgaaatgtgccaagctctgctgctaattaattttctgaatttattacacacaagcatttgtcgagtgtctgcttgtgaggaatggtgacgttagctacacctaatattagattcatctaggccgtccatgtcgagatcgacggtatagtcatgtttgtactggccggcggtagtgggagctgtttgtgcactagttagcaaaaccactgaaatatgtagggaacagctaccagtatgcccctactttggaaaataatgtactatgcacaacttaacatgactacttacattcttctcaataaaatgtgtgcacagttgcacatataacttgagaaaaaaatgtttcttacacattctagagtagatatgtgagttttttatatggtacattaacccaaaaaaatgaagtgtggcttgtaaatgaattcgagcctagggagggtccatgttgttgaaagtgccttaggggtgtggctggtgacatggggcggccaaatatgccccccatgaacccaccttggcgaggagcgtgtggaagcggtggcctatgttttgaggtggaagaggaagtcggctagagttgttgtggttggtttgcgtgcaagaaggaagaccatcatagcactctgtgtttgctggctgcagtgggcagtggctacaaggatgcatggagcacacgcgccggcaactgtgtggctatcgccgcgagccatggggagaactcttgctagggagggagatctaatcaaagagaggcatctagctagggtttgtgtcggcggcgctacctcgagagaacgagagtgaactggggaattggtggtggctagggttccgtgaaatgggtcggactctgctaataattgtcttaatttattagtttattacataaaagcgtccaccaactgtctggttgtcaggaatggtgacgtcgactacaactaatgtggccgttaataagattcatctgggccatccatggaaagatcgatggtgtagtcatgttcgtactagccagcagcagtgtgagcttttgtttgtgtggttggtctgttagtgtcctgggcactagttagcagaaccaaggaaatatgttggggggggggggtacatgtattctttggaaaaggatatgctctatacacaacttaacttttttttaatgaccttgatttttctcaaaaatatgtgttgtgcacaattgcatgtatagtttgaaaattaataaaatgtttcttccacattctcaggtagatatttgagggtttttttatatagtacattgagcgtaaaaattaaggaggagtttcaaatgttgacctagcactaggacatcattaaggtgaacataacctcaattggaggcgacctaggttggtcccaagacccaggccagctataaaaatatctccaaagtgcctctagagtaaaagtattttctacgattttgaaagtgctaactcctgaatttacagccaatctgaaaaatcactctagaaaagtgtctctacttaagctttttgttgtagtgggagcattgtagtatcatcaaaaaaacataaatcccccttccttctgcaccaagccaaattcccagacagtaccccgctgatgaagtgcgatactatagatccccgatgcaaggaaaatcaatagctttctaatgatatgctcttccatgtcctcttggttatgcccttgtgtcgaggtcaggggtggacctaggcctcagcctgaccatgcatttttttcaccatgtaacagacttggttagcaaaagttcaatgggcgcagtcccacttgtcatattccttctcccctttgcaagatcgtggtgttcgtggtgtgtggcaagctcatgccctagtgttctttggaaagagtgagggctttcacgtagagcacgttgtgaagaagaggcagcagggaggaggaatctaatgagtgggaccaagagcatttttgacctgccacactatttatccctgccatgagtaaaaccacgatgtttttgttgtagtggccctatgtgaccatttgtttcatctgagccgtccattatattattgtaagatatatattgtgaagtcacattataattatttctatttgctagctgtgggagcttgcctatttaattatgactacggattagcagtttgccgcacagccaatgtaaggatcataatattcactagctagctagctagttaggtttgaaatttccatttaattagttgatcaaggagaatgatctttaatggatactcaacagttttgtggaaatttgaatatgtgcatacattttgatattgtgtaatatgcagtctactactttaccattttgtggaaagggcatacactactcttttttatgtgtgtgtgtgtgttggggggcagggggggctcaagtaatctaaaaatgtgttgtatacacttgtatatatagtttcagagggattgaacaattaaatcattagtaattatgtgtagtttagacaattactccctccgtttcataatgtaagactttctagcattgtccatattcatatatatgctaataaatctaggcacacatatatgcctagattcattagcatctatataaatatgggcaatgctagaaagtcttccattacgaaacgaaggaagtaattattatgtatattgttcaccgctcaacatttactattatttaacttacctccgagtccaaacaaagttgtgattttcccttacgtgacacatgaatagacccaacaacaaataaaaaattaaaaattggtagactccaccaatcttgttggcctctctccatgtgtgtgtctctctccctctggcgtctctctagttaccaatccatgccctatgcgcaaactgttgtccaagaagaaatgttgcggattgcttccctgtgtagattccttgctccgttcttatactctatatgtcggtgagccaaaaaaacaaagtctcctcttttcctctaccggatcccctttcccctccatctctggtggccgttggtcgcctgccaggggaggggggtttggggagccatcggttttatcccttagtcgggttcattctattgtaaatcgagtttatctagtactaggttctctgctccttccctttcctgtatagctcgatggagatgccataatacccatcttcttcgtcctggctacctcctttcatggccggtttgagttccaaatccaaagcttgatctgccttgcgccatttgaaaagttgttacgggattttataccaatgttttagtcaacaagtgcagcatatttgccccatggtgggaggtctccttcctccacaacgatgagttgtggtcggccgtttaaatcatctccgacgagtttgctgctagcaatttggtgcccttgtctttgatggagctttttcaatgttagattgaatctttttgtgttcatcgggttcacttcaacctccaattatgagatgccatcgtcggtttcattgtcttggtgattagattggaagacaaagtgaagcagggactcgattgcctttttgttttctgttggagtcatttgcttattttcaggacccctgcgtaacttgtttatctttgaggagtctttttgcaaatcatgttgtatgtttatctacatgtccttctataggcaacctaatctctctttctttgagagatgtgacgtccactcatgcaagttgtgtataaacatcctatattaaataaatgcgtgagttctaaaaaaaagagaagtgttacagaagttggacagcaggttataccatcgtggttcacgtttaatccttagggaggaccaaagggggcagcaggtacaccatgtcgtactcacagatccggatggggcagaccttcagggaggcggatactccctccgttccataatataagggattttaactttttgcttacactgtttgaccattcgtcttattcaaaaaaaattgaaattattatttattttatttgtgacttactttattatccaaagtactttaagcacaaccttttgttttttatatttacacaatttttttgaataagaccagtggtcaaacagtgcaagtaaaaagttaaaatcccttatattatggaacggagggagcagattgtttgcagggctgtcaacgagccaatgtcgactagttcagaaaccaacgaaaattttcagtggagcatatagaggtatatacagtgaaaatgcaagttctgagttctgacgctatttcatatcaccctccacagtattgtcagcgcctcaaacaactaattacaatgcagcaaatcagaaatgctatacatactcagtgcagcactgcatgatcatcaggaaaagcaaatcaggactgctctttgcaccaatgctcacacttaacttcagttctgagttctgaccaagcaacaagggcacactgctccgtactaacaaaaatggcattccagaatgtcaaatgctaagaatcgttcatgaggacaaactaaaatggcagctaaattctccgcagctagatcagttgctctgttcctttctttacagcacagccggatcaaaacatgccaggtacatcaagggtaagtagccaacaaatattttcttacttcagctcactgtggctgcatagagggagtgtcctgactcacttccactgaaatctctggtcttgcaaaactttgtatgactgcagatagtctctcccaagcagacaacgaacggtggcaggttattctgatcctcctaaggactgttgctaccctgactaagaccctcagaaggtcaagctcatgttcctttcctccgaagttgaggatctctacttctccgagagacctcatcgaaatgtccttattatctctccagtttggtggccaatcacaactgcagttcggtgaacatgcatgttgaacctgaaattacaagatcagaacaaaatatgagctagtaatgagattcattacctaacacattgagctagaccagtctaaaaaaaacacattgagcaactgagaaaactttattttgtattacaaagcatgatttcagtgctataaataactcttatacttaaagtttcatggatctatttcatggccaactgattgtacgatttgaaggacaatgagaaagaataaaaagtgggacataatgataagacaattatgtgaatttggtcacaaaaggccctgtttatcagttaactcgatcatatcaagagttacttttgctatgtcatcaataaggcattattggtaccttcctgcctaaatgtaactgacggagcatatacaagagagtaaggattctttagacataattgtgtgtgtgcacctacacgtgctatcgtggctgtcatggctagctcactccaaaattctcgctacgtttgggtacagggtttcaaagaaaataatacgaagcatttaattataaatcaagacagcttgcaggccatgttagaggtgaagcgcaaaccaagcagaaatttcagcaaaatagacatgaaggggaatatccctattggaaacaatatactcgtttttgtgaagcatgatattcctatgttggacatggaaaaaaaatgtgttgataggcacaagccaataaaacaaacaagtgcactaactatcagcactaaaaacatccatgtttttttaataataaaaacggtttacatcttcggcctttgctgttagacacacaaccaatgatttctatctctaaaataaacgatattagattatgggaaaaatcctgtttctctccaaatgataaccaattgaactaatgaaataaaactcacatagactataacatggttgctagaatcacgttaccagcttgcaacttatatatggagttcaatatatgattgtgtttcaattaatgaagcaaattcatttcagttgaaggatatattatctcggtcaggtgcttcttatttatattgacaacaaatgaaagatttgataaatcgaacaccgtcgctaaacttgccaagctgatatgggacatcttgtttcctttgctctatatatgaacgtacggccgtacgcctcaagatatatagtacttatcctgtacctattgccacacatcagtggagaggtgctttattttcagcatgcaatgcaaatagtaaagatattggcacatatatcatattggcgatcaatttatgaatgattgtgtattacaattgtatgctttgcagagcaagagctttctatagctaactacaattctagctaattgatgaacttatcatcgttccttattttccaaaaaaataaaatatcataaagggaaactatatatatatatatgagaggtaacaactgctataaagagaattaatttattttgttgcacgtactgtgttttcgacagatatattcatattatattatatatatgttactagtttattacaagccacctatgagtattaagaataatgagttcataataaaccccgtgtcacaaaaggcgaaaggacctgtagcctagtggttacaagagcctcagtagcacctgaggtcctgggttcgactccccgtgggagcgaattttccaggatttaacggcgttgtgctttcagtggtaggcgacgtacccgtcgacagcgaggcgcctgtggtgacttcatcaatctctccaggatttgcccgtacccgtcgacagcgaggcgcctgtggtgacttcatcaatctctccaggatttgccggcccagtcttcgaagatgctcataggggtaggccggtttgcgtgcatgcgttcataggggtgactgcgtgtgcgttgtgagtgtctgcgttgtactgtgtaattctcaaaaaaaaaaaaaaaaccccgtgtcttttttgcctatctccacccctagacggactcggcggtggcaaatgagcatatcggcacactgcaggttttgaaattttgtaacccgcctcccccgggcaagcacatatctcacccgaaatgttcagatttttccaaatatttatgaatttggtcaaagtttgttcaaattcaatcaaatatattaacatttcaaatagtttcattaaaaaaacaccataattctcgaaattttggtggtaaacataactatactaaccctggcatcctagcgcctattgttcaggtagatttttctttttttaaatccattctagcacaaatagttcggaattcaagtcatgtgttgtaccacacattagaataattaatgttggcaaacttctcgaaattttggtggtaaacataactatacaaaccctggcatcctagcgcctattgttcaggtagatttttctttttttaaatccattctagaacaattagttcggaattcaagtcatgtgttgtaccacacattagaataattaatgttggcaaactttgataacaacagtgaaaaatggaccagaatcaaacacatgcattcagcattgttggaatccatccaaacagatcgaccaatcatcatgttttgctcagaagattaatagtgtgaaagacacaatcaagccacacaacatttaatatcccaaagttgtacgaatcttacaatttaaatatctaggatatgttccacatggcaatatataagacaaaacatagccaacaccaaaatagtacaccaaagtcgctattccggtcaatctattacagccattatagcaccatgtatttatgtgtatctttttgtctacactaaattattattgttcaactcgatggtgcaatctgatgtgcatagctggcgtagattgtctaaaaacgatttgtatgagtggagattgacagaggaaaccaatgacaccttcctaagtaattttgagttttctacaataaatagtaccaactgcttctcatcatacgtgcccccaaagccattgatacttagttcttcaagtgaacccaatgagatctcttgatccctccaatttggcggttggcgacaagtgcagttgggctcgcattggatatgatttttctgagatacacaaagaattgaaatgatataaaaaatataagcccattttgatatatgaagtaaatcgataaaatgtattcaagcaatatatatatttaattgctagaaacactcaacacagtaatacaataacagacatacctttggacatatttcgagagaaaaccttttgatccacctgcttttcttgaggaggtgtacaatggttggggcgagagtatgttctttcttttccacaatgagttctagctccaagcaatagggtagatccactgtgtgtagaaatttcttttgctcctccgattcctggcaaagtgtcacgaaataaataattagagtataacacaagttgtattaccaaaaacactggtctatcgatctatttatggtggttaatgtaactgtgtgatgatatttatatataatagctaattaaattgtgttaatcacatatttagttagctaggaacaagtaaggttgtgctagggacataaaagcatgaaaatatatttagatctcatccgatactgctaggggatggactttcatgtgacagaaatatagaaatctagaattaactcctctagcctagataattaagctacagtgacaatgtacttgtttagttataataatcattctctgtgcacgatctttataataatctaatgcattaatgctcccatactgaacgtaatcaattttttaatatcatatagtaatgcacaacctaattaactagaccctccccgcaaaaaaaaactaattgactagaccagaaaaaaaaaacatagtaacaagtcaatttcaatttagtactcacacatactaattaacatgtgcctatatatatataaccggccgagctgactaatttgtatgtatatatactctcttgagcagctgcacttaatactactcccctgctcgttgcggttaggataagatttgatcaatttttaagattcgtaccatcaattattaattaggataagtttctaaaatctaatgagttcatgataataattttcaggataaagtatactatttgttttcaagataagcattaatttgagaaatatatattcgtaatggttgagttttagaagcatacttggctactaaatcctgttctaaaaacatcaaatatttttttactgtaaatccgtaatataattaagtccatatactaaggctctaataatgcaaaatcatgacggcataataatatataagagatgagatctagatcatatgtaccggtttaataggaaattcgatctgaagaacttcagtgcaagtgctcgagaacagctgcaagatcctagtataaaacgattggcttccgctgatgaacgacaaatttgtcgaagcagagtcgacgcatgcgatcttgtggatgaatcctgcaggttccctgacgagcttaacctcctcggggcagcagtccttccagtagaactcctccatcgccggcgtcaacagcgacatcgccgacccctccgtctccgccgcatcgatgtcgaagcaatccttcaccttcatccatcggagattggctgcgtctacatcaagcagttgcaagtcgttgattgagacgacgcacagggtcaggagcgaggtggtgtggatggtgagctccctggcgccggcgtggatgtcgatgagctcgagggttttcaggcacgggcagccatgggagacgacctcgctgaggagctcgccctcgtcggcgacgaaggtgttcgacaggtgcagcttcgtcaggtgggcgaacgtgcggccgcggtggtcgtcgggcgccagctgcaccgccatgtcggcgatggagatggcgatctccgtcgccctctcgaagcacgggagcgcgaggaggttggcctcctcgtcgtagtcctcggagatgttgatcccgcgcgacacgtcgaggcggaagcggccggtg

SEQ ID NO: 29251 - DNA, 6911 bp, Oryza sativa
cgacgggagccctctcgtcgcgctcgagcttggccggtgagctgcttccgtcgcgagccatggggagagagatcgatctagggtttgcgcaagacggctgagcggcggaagcgcgcgctgctgcttcgaattcgagacgagaacgatggagttggggaatttttggcggcggctagggttttgggaaatgggccggactctggtctctatttatattacacacaggcgtccgctcgagtggttgagtgggaggaatggccgttagattcatctgggccgtccattgagacatccaacggtgtaatcacgttgcacgcacggtcgagccttggtcgtgggaatttctgtactgaggcctcggtgtgtcgttgtctgatgctggttcgcttcttcgttacggagtacataacaaaaaagcgactcctgtctgctcctctgtccctaaaagaattaaactctacggataaatatgaacacatcacacacacacatatatccatattcatctatagagtttaattttttttgggacgaagaaagtatatattatttgaaataaaattctcacaaatcgtaaattctacttccttcgtttcacaatgtgagactttcttgcattacctacatttatatagatgttaataaatctagacatacattcgtatagatgcctagatttattaacgtatatatgaatatgaacaatgctagaaagtcttacaatataaaatggaggaagtactatagactattggaccactttaaaatttgtacattatacctctaaacctaacccctcatctctcctcttgtcactcccagcgttatcaccaccgcgagttgcgaacttgcgctcgatgccccaattgtagcctagcctcgcaagctgaacgaaagggatcaacggcgtcggcaagccctcttccctgtatacggtggctctcagccactagatccatcaccaccagttgccacatccaaaccacaagattcagtttgcccctgccgccaatgccgcccaccaccctcctccacccccgtggctctagtgcatttctgttcgcccgtgtccaccacccaccactgggtggccacctcctacgaccatccctctaagctcaatgatctctcctcccctaactcaccctaaacccgagactgtaaacccaaactcgtcggaccactgccagtcgctgaaattggaggagacagagttggatagccagaacacgaattgcgaatattagaaatttgcaagattttaaccccaattttctgtcaataaccatgtagtgatttcgaaaaaaacggttagtagatagccgtacttagaaaaaaaacatacaagtcacttttatacattatataaattaaaattacttacaatgtaatcacttttggggaacttttatgtgaactacatgaacagatcagacagttccgtgtgaaaatttggggattttcttgaatgtgaatgttaattagggaaaaaaattgggttgaaaatgtactctctccgtcccaaaaatacccaaccttgtactaggatgtgacacatcctacgttggagtatgccacaaacctaataagcccatatatatatatatatatgtgtgtgtgtgtgtgtgtaaatgcatctcgtggtaggcgtcttaatatacatgtggaattttgtttttacagtcggctacttatcccctcctataaaaatgggcatttgaatactcgttgtacattactggagagatgcacatctctcctagttcgcaaccctctttattccgggtatgcaaccgggagcgcgaatccgggactaaagattcatctttagtcccggctagtaacaccaaccgggagtaaagttttttttttcattgtttcttctgtatccatattgatttctaaccaaactctcaaccataaaatcatcaacattcacaaaagcatcacaaaatcatcaacatccgcattaagaattcacatcacaaatatacaaatccaaaggcatcacaaattaaaaaattcacgttcacagataataaatcaacaaaatcctcacgttcacagataagaaatcaacaaaatccaccgccgcgctgtcacagttgcctcgcgccgaccaagccgcttccgctgcccgctccagccggcgatgctcgctccccgtaggccgcgcggggacgtcgccgcctcccgcgccagccgtcggcgtttgctcccgcgcgggccactgcacgtaggccgccgccgccgttcgctgcgagaaaaaaaaagagaggataagagagcagcgagaaaaaaagaggagaggataagagagaggaggaaaggggatgaggaggagttttcgttccagagggtaagtgttagggaccggacgcttttttcaactgggagtaaaaatgatctgtagtcccggttgataacactaaccgggactaaagattataaaagtgcgttgagctttttaaccgggacaaaaaatggtttttaatcctagttccaataggaaccacgactaatatggttttatgctgaaccaacaaagatcagttctccagtactccagtctccagtagtgctagtagaaacgactaccaacccgcatttgaaaatgcattatacttgcttgtatcgtattagtggaatttcagagattaatctagaatttcaaacaaaagtttcaaataaaatttaaattttgaataacctttttttgttgttgcatttgagcttacctttatacgttgcctcgtcctcgcctcttgcatcccggccaccaggcctggcacatcaggtgttttccctctggacctccgcaaacctatagtactcgcgccggcaccaactatattcctgtcaaccgaccgaggcctcacaccgctaggtagcgatcccaattttttcttcaaactttcaactttttccatcatatcaaacttttctactcacataaacttccaactttttcgtcacatcgtttcaatttcaaccaaacttttaattttagcgtgaactaaacacagcctaggtcaggagcaacggcaaggaagtcaccatgcctctagagaggaccagaggctgttgcatcgccttgcagagtccccgatattctagtgaggagagcaagctgctgggcaaaatgcagggctgtcggtgagggtgtgcaaggtgcaggcgactgaacatgcctccaaaattagaggccctaaaattttcatatgttaatccacttcagatttggaccgctgtgaggatgggggtggtgattcctctggtttgaaaagttgaaggatgtacaatattttgtattgaagttgagtggtgtaaatcgaacttctgcgatttatagttgagggggtcaaatttgattgaacccctatagctagtatgccaagagtttatacaaaccaacaatttacaagtgacttttcgatcaccaatgcagtttgcaataggctgtaatgaatcaaattataagcgcaaaccaacaaagcggggcatgcacttcgatcatttagttagttgtctcgcaatgatttcaaatgcatgaccactagactagttataacacaaaaaaataactctctctttcattacaatattattctagcaaacatacataagctagtaataccagaatagtgcacaaggacagtagttctccacaaccaaatttggtacacatactcaacaaaagttcaataaatcactgcatgcttcttgaatattgccccatcaaacctttgtcactataattttttccagtccactatagcagtatttctctctacacggaaagttcaactcgatggtacatccagtcattgatagttttcgtacatggcacagaaaccgtctatatgaacaatgaccattcgagaaaacgagagttatctttttaagtacttttgaatttcgtataataaaatataccaacttctttgcttcacgatggcccgagatgtgtttgatggctagttgttcaagggagtctagtgggatatcttgatcccaccatttaagtggttcgtggcaagtgcaattagacatgcagcatggagcaaatttgttttcctgaaacagagagatatagtgatataactaaactgattgataaagcaaatgatccataactaacagtgccaaaaaaagtagatattttttgggcaagagagatgaaattaaggtaaaacataccttaggatgatatggatttagtgtaagagttaagtttctgatggagctatttctcttgaggaagtgtacaacagttgagccaaacgagctatgcccatttgttatcacgccgaggtctagcgctgaatagtatggaagttgcacgctgtgtataaggctctcttgctcttccgaatcctgcaaaattaacaacatcaccaatggaataattaaacaaggtatatatatatatatatatatatactttcacacgaaatattaaaaaaaatgctgtatcctggaagaagtgacacaaacgaaaagttcactacggaatattgtaaatacacactgtcattagtactcatgtaaggtcagtgcacaggccaaattattcggtcccaacttactaattaacttcatatttccctaacgtatgtatatgtatgtacgtagcttacattgtgattgcctacttcttgatctgcagagggcacgcataagaagatatatagcatcataaaggcatgcaagaatttcagcgagatccattagttgctaaactagttgacaaacctaactaagtatgagtatgtgacttacacaaaaagatgtgtacactgataaaaaaaaaaaccaacctagctgtgatattgacaaacttattaaactctatgcttttctttaaaaaatctaaattctatgtacctaaacaatctcaaggacgcaatttacgcacgccaaaatactaattaaacatcaacaagataaataaatataattaaataagtaaacaaataaagaaagaaagaaataccagtgtagctgtagcagtcataggagaagtgagccttaaaacatgagcacgagagaaaagcttcaagatcttggtgaaatccgattgcccaatctcgtgaataatatgagaaggaagctcgacgacggcgagctccatgaggcagctaggtaaactaatcagctcgaccttgtcggggtacgcgtcctcccagccgagctcctccagcgccggcgcggcgagccgcatcgccgcgccgccggtccacggacagcggctcgtcccgtcgaagcagtacttgacccgcatcttgcgcatgttgccggccgccacgtcgagccgccgcagcgggacatacgcgaggcgcaggctcagcagcgagtcgctgcggagggtgagcgcctccatgccgtcgatgtgctcgagctcgaggcactccaggcttgggcaccggcgcgagacgacgccgctgatgccctcgccggcgtcgctgaagcggagctcggacatccgcagcctcgtcaggcgggtgaagcctccggcggcggcggcgtcgtcgagcgccgggaggcggacggccatcccggaggagtagagggagatctccgtcgcccgctcgaagcacgggagatcgaggacggcgtcgtcgtcgtggcctacctgggtggtcacggcgaggtagaagcggccggtgacgctgcgggcggcgaaggccgcccacgcggaggcccggtcgccgtcgacctcgggccagtcccagtggtacgagatggcgaggtcggcgatgtccacgtcggcggcgtagcggcggaggatgccgtcgaagtggtccgggatgtgcccggcgctcgtcgcctcctcctccaggaggtgcagccgcgggacgcgcttccagacgccgacccaccggcgggacagcgcgctggtgcggacggcctccggcgtggtcacgaagctcaggacatggtggagcagctcgtcggggaggctgctgatacggtccggaccaccgtagtagccacggccaccgccggcgccggcgccgacggatccgccggacagagaagccttcttgtgcgcggcgcacctgtaagccattggggaaatggggatttgagctagctctgaaggagaagaaatggaggagaaatctagggtttcgtgtttcgtctcgtggcggcgttgctgcgtcgatcgagcgagaggaggagtacgggaggctgcctctgctccgaggctttacatagcggctgtgtgggagagagacaactgatgcatgtgaccgttggtttcatccgagccgtccatcgcacgagtaccgtatgtgtgagtgtgaaaccgtccgaaacctagcttatttcctataatactggtcgatccttttattttctttttttgaaaatggattcaaaccagacatctacatccaaaaaataataatgtgtgaaaccgtccgaaacctaagtgcctgttctaaaaaataataattacctattctgctgatcatatatccctgtctggagctgaagtctaatggaaatatggaatgatacattcccatgtaaaaaaaatatatgcctgcgtttgtatgatgaaagtacagtaattaaattaattacttgaacatgaaaaattagcatcacaaagtgctgcttatatttcattggtttcgatcagattctctgatgagagaagaatatgaaacaaaatcgtctctaaccaaaaactatctaaagtcaacaaggggctgctcacttccatcaaatgttcttcaattcttctactgcgcatgcacttccaatcaagcagatgttgcagacgtaggagtacgtcggtcaagaaaccgcgcagtatatactatactcccgtcccaaaaaaaaaaaaaaagacaaacattgggtttccgtgtccaacgtttgactgtccgtcttatatg

SEQ ID NO: 29252 - DNA, 57943 bp, Oryza sativa
ttatatgaaatttttttataattagtattttcattattgttagatattgataaaacatgattaatattttctgcgtgacttgtctttttaatttttttttataatttttttaaataagacggacagtcaaacgttggacacggaaatccatggtttgtctgtttttaggatggagggagtagagtatagatatgcagacgagatttcttggtatgcaagtatataccgtgttcttggcttgcaagatcacccacgcaagttcagagcgaacgacggcagttaatgcaatctactccatctttctaagttttctggtgctgccttgattaattagttccgcacaatcaacctcatgctaatttcagctgaagttttttcccggcgaaaaatttcagctgaagttttttcccggcgaaaaatttcagctgaagttttgcaaagattattacttcttcaagaaatggcatgcgcgctaatgcaatataattcagtggtcacatgatattctttcccctgaaatgagaaaataatgtaactatgatattatattattacacgggcatatattaagagataccctcccggtaaaaaatatttatcatttaattaggacaagattgtgtggcatatattaagagatacccaccccggtaaaaaatatttatcatttaggacaagattgtgtggaacctttcacaaagtacatatatttagttcgatcactagataatattaatgactagaaaccaacatagtgccggatgtgacacattgtagtactacatatgaatctggacatatacgtagtatatataacacatttcagtatatatatgccggtggtgtgtatatatatatatatatatatatatatgtatatatatatatatgtatatgtatatatatatagtgcacacaggccctcacgtgtacacacgtgcacaccaactaaaaaatatcaccaaaaaatctagaaaaaatcatacacatactttcaattgtattacacctagggttcaaatcttaacgtcaaattcattatattttagccgtaacaaaaaaaacaaaaaatctgacagttttaaggttgcaattttgtcagaattttatcttttttgttattctctatgtagaatgaatttgaagatgcgactttgcacgtagatgtaatactattgaaagtacatgtatgaattttcctagaacttttttgtgataatttttagttggtgtacacggtgtgtacacgcgaggtcctgtgtgcataggatacgctcccatatatgtatatatatgtatatatatatatacggtggcgctacacagcgccacccacaggtgctacgcgccacgaaacaaaatggcgccagacacaaacgaggagaggtcagcccaccaccgacaaaatcccaccaacgaggcatccaacccacccgcggagttaaaatttaacttagatacagttggtggtggtggtgcggtgatatcgttgaggagttaatattatgcgatgattcagttggtctgagttaaagtttaacttagatacagttgggtggtggggtaaaaccagcggagttaaattttaacttagatacagttaggtggtgggtgcgatgacgtcgttgaggagttaatattatacatggtttcagttgatatgagttaaagtttaacttacgtacaattgggtggtgggatgcgatgacatggttttggagttaaaaaattacttgttgttgttcaattctggatgatatgtgattgagtctggttgctgctgagttaaaaattaactcgcgatacaaaactgcaggacatcgttgtagagttaactcagtttgtatgagttaaattttaacttgtgtacaacaagattttaactcaacatatacgtcttcacaatctataagcataagttaattttttgtcggcacttgctccggacatcaacggcggagcgtcatggaggtgttcgtcgctgctcctccatgtccttcggtgttcgaacacgccgccgcggaggtcgccgccgtgtgcgtggggcgcggaacggcggcccgatccgccgccgcctcggctgtcgcccgcagtcccgcagtcgccccgtcacgggatccgccgtcgagccacctgcatccacgcctgacacgcaccaccgcaaccggatccgtgtacgtggggcgtggagcggcggccgaatgcgccgccccctcgcctcgccatgccatgttggatccgccgacgcctcgccttcccgggcaggattatccccggatccatcatcacgccggatacgccctaccatggccggatccgcgcgcgtggggcgtagatcggcggctgggtgcgccgcctcgtcgcctcctacacgccgtcaaccgtcgcctccacgcctgccgccgtgtcgtaccggatccgtcgacgtcgcgcccgccgccgctcggcagtggaggtggcgctcgacgtcgcgccgccagccgtgtcgtgccggatccgcccaatgccgccaccactcgccgccacgcccgctcgccgctctcatctccgaaaaaataggatctacatatgtggttggttacggggtggatgtacaacactggtatatatatacactaaaagttgagtaacatcaagttaaattttaactcaaatacgtggtggtgggtggggggaaggtgggacagggtggtggtgcggctgtgtcaggcgccatctaatacgtggcgcctgtagcgccatatagtagttctatatgtatgtatatgtatatatatgtatgtatatgtatgtatatatatgtgtatatatgtatatatatatgtatatatatatgtatatatatatatgtatgtatgtatgtatgtatgtacgtgattgaaaatgtgtcatttcatatatatcaacaatatactgaaataatggagaattattttatttgatgataagctgctttagcagattatgtatgcctcactgacatgtagtagatgctaccataacatattaaatcaacgtaaagagtggatttgaatctttttagacctacatgacacccaagacaaattcgagaatttagaaatacattttgagagtgatatctagatgacacactcgcataagtttaggatagtccttatacttatcagcctcatcttttcgcttatgcttattcttatcagccaaaattcgaattttcaactttaaatttggagttgattttgaggtttttgttactgggattttgaggttttttcatcggagtttatttttcagcttttgcttttagatcactaagaacacgtatatatatataaaagttttattcacagattaattttcgtttgcatatatgccgtttcccttattcccggaataagcgaaatgatggagcacttcactcttgttttttattttggccggtttcaattctggaacgggcagaacatctttcagagaaatcatcatcgatcagcctaaaatcaaccagggactgttcaccgactttacaatatatttcttctgaggaataggtacaatcggggactgttcatcgcctttacaatcggtacatactatgctgcaggcaacagctcaggctgcatttagttcgacgtaaagtttagattttggttgaaattggagatgatgtgactgaaaagttgtgtgtgcatgacagggtgatgtgatggaaaaggactgaagtttggatctaaactttggatctaaacacagcctcagagcagctagctagccacagataccgaggaacgaaatttccttggcttggaaggcactgtattttctttgctagcaagagatcaccctgttttaatttgtaaaatattacaggctgcacgttcagaacaacggatggcgacgcaatctctcataaatttatgattctatttcttctatgagacgtgctcgtccaaaaatcaccttctaaatactctatgtctcaaaataaacaaacttaatacgagatgtggcatatattactaatagtatatatgaatctgaacatgagatgaggaatgtgtccagattctgaaaccaaagaattaataaaaacagcactatgtgatatatggatgctaacttcctccgtttcataatgtaaaactttataggattgtccacattcatatagatgttaatgaatctagccacaacatctatatgaatgtgggcaatgctataaagtcttatattatgaaacagagggagtacatgttatgttatcatattacttgttaagtatatatgagatggaacaaaaatgaatcaagcgacggtaattgcagtggtatttgtgatatttatgttttgagaaatctaggaatgcttatttcctgataaacatattacactaagattaacataattttgataatgattttaatgtttatctataatcattaaggcaataaaacttagttgtacagatcaagcgtacatcaggctagcaattggagctgcatcttatatagctgatctattattatattctgattgataacacaattaaagttaaaagataaacaatagaataaaaaacaaaagaaatagaaaatatgcgcgcagttggcatgccatccatatggcttgcataaaccatatttatacagtaaatgcatgtaatatttattatttatttgtaaaggagttatattttgaatagatctttaagcagttttaaaattgtatatctatcaagcctaacaaaaacattatgctggtaaatgtttaaattacatataaaagaaataaaaataaatgtttgaaacgtggtacgtggaacacaagtcttgaaaaatatggtacgaaggggtatacctcttcaaaacatttgttcgaagggtgaaacacgttccatggattttttaggatgatagtccggaatgatatggaaaatcaggatgcctttgttatgcaaagaataatttgaactaaatatatgtaaactttagggcttatatggatgaaaccatttgaataaaagacttttcataatattaataaactcaaagggctaaattgaaaaaaaagatgaatctcttttcctttcaccacatcaggccatcaccccacgatggtatccacaatgggcatgcacggcaagatcaacgtcaacaatggcaaaggcatggaggaccaagaacttgtcctgtgtcgttgcagtgcatcacccacatatctgacattggatttctcacattctgatcttcatttttttatcagttttgatcgattgaagaatgaagaatacaacattcttttatcagttttgatcgattgaagaagacaaatggagacctcttctttcttactttgatgtctatttttatttcgatttgaagagattgcaagtgatagtttggaatactctagagtttagatgaatgttcgcgcgggagactgcacagggttctccaccttctctccatatggacacatggcagattttaggagaggttcaaatcgaaatattaggacgccatatggcccaatgagaggctagggattggaccttgaaatcggtattaaagattactgtacttccatcatacaacgcgggcatttcttttttttttcatatatatgggaatgcatcgatcattccatgcattagacttcagctccagtatgcagggattggtccgtaggtaattaggtttcgaacggtttcacacatacaagcgctagacagggattaatcagttttgaaaaaggaaaaaagattgatcagtatagaataagaaattagctagatttcggacggtttcatacatactcgcgtgatggacggctcagatgaacccaacggtcacatgcatcacttctcgctctcccagacagccgctgcgtccgctatgtaaagcctcctcctctcgctcgatcgacgcagcaacgccgccacgagacaaaaccctagatttctcctccatttcttctccttcagagctcgctcaaatctccatttcccccatggcttacaggtgcatcgcgcacaagagggccaggttgtccggcggatccgtcggctccagcgccggcggtggccgtggttacggtggtccggaccgtatcagccgcctccccgacgagctgctccaccatgtcctgagcttcgtgaccacgccggaggccgtccgcaccagcgcgctgtcccgccggtgggtcggcgtctggaagcgcgtcccgcggctgcaccttctggaggaggaggcgacgaaggccgagcacatcccggaccactatgacggcatcctccgccgctacgccgccgacgtggacatcgccgacctcgccatcacctaccactgggactggcccgaggtcgacggggaccgggcctccgcgtgggcgggcttcgccgcgcggcgcgtcaccggccgcttcgacctcgccgtgacgagccaggtgggccgcggcggcgacgacgacgagcgcgccgtcctcgacctcccgtgcttcgagcgggcgacggagatctccctctactcctccgggctggcggtccgtctcccggcggagctcgacgccgccggcgacggagacttcacccgcctgacgaagctgcagatgtccgagctccggttcagcgatgccggcgagggcatcagcggcgtcgtctcgcggcggtgcccgagcctggattgcctcgatcgagctcgagcacatcgccggcgtggaggcgctcaccctccgcaccgactcgctcctgagcctccgcctcgtctcggtctctcgtctccaacggctcgacgtggaggccggaaacctccgcaggatgcgggtggagtactgcttcgacgaaacgagatcgtgtcgtccttggaacggcggcggcgcggcggcggtgatgcggctctccgcgccggcgttggaggagctcggttgggaggacgcgtgccccgacgaggttgagcggattaggttaccgacgtgcctcagggagctcgtcgtcagcgagcttccttctcatattatccgcagcatggggcaatctgatttcaccaagatcttggagcttttctctggggctgatgttctaaagcttacttctcctatgactgctacactggtattatttattcattaatttacttatttatttttatttatttctcttattgacttttaattacgttctaaacttttttctaatttagctttttttaagaaaagcatagaatttagtttgtcaatatatatcacagctaatttggtttataactttcatgtaagtcacacttttaggtctatccactacaatattcggtagtggactttttcggttgtgtttattaattgttgaagagctactcctctcaggctacaataaatcaatatttcgtcaagtattgactatgtttaaattaaattacttgacgtagtatggttcaataaatagatcttcaaatcattttgtgtgactaagataggtcaaatagcaagctagtaaaatgtgagtaacacacaacttttcaaatgtatacaagtttaaaaaaaaaacaaattacagtaccctgctgtaaacatagtgttgtttttatgaagattaatttattacagttagttttaatcacatgaaagtgtataactcccttgtttaattattcaattggtgacgatgttaattttgtaggattcagaagagcaagagagccttatatacagtgtccaacttccttactattcaaagctagacctcggcgtgataacaaaagggcataagtcgtacggctcaagtgttgtacacttcctcaagagaaatagctccatcagaaacctaactcttacactacatccatatcatcctgaggtatgtttcttaatatctacgtttcatctctctttgcccaaaacatatctactttttttttggcaccgttagttatcgagatcatttactttctcagtcattttatatatatagttatatcactatatctctccttttgtgttttaggataaaagatgtgctccatgttgcatgtctaattgcaattgccacgaaccattaaaatggtgggatgaagatatctcgctagactcccttgaacaactatgtgtcaaacacatctggggtgaatgtgaagggaagaagctgatatactttattatgcggaattcaaaagtgcttaaaaagatcactgttgttttctcaagttggctttgttcatagagacgctttctacgcaatctccgcaaactatccacgtctggatgcatcatcgagttgaactttccgtgtagggagaattcctgctatagcggaatggaaacaattacagtgacaaagggttgaggggtaccggtatattaaactttttgagtatgtacctgtaccaaaatttggttgtggaaaactacaatccttgtgcactattctggtattactagcttatatatatatttgctggaataccttatatgtggattcattcctttggaatgtgctctcttaatattgtaatgaaagaaccctagctagttttttgtgctaactagctagttgggtggccattcatttgcaatctttttttttttatcaaacattcatttgcaatctttatgagacagctaactaaaggataaaagtgcatgccccctcattgttggttgcacttataatttgatggatgaacctattgcaaactatacgtgtgaaattaaagtcacttgtacagttgtatgtctttgggttgtatgaactctatgatatatatactataggggtttagtctgatttactatatattgcaaaagtttgatttaccatactaaatccaataccggatattttacacacttcaacttttcaaaacaaacaaatcaccatcccgcccttgtcaacgcagtttaaatccaaagtagttttagtcctgtgacatacatgagtccacctcaaatcctctgactttctatggcaaaatcacaagcgtgcggttccatctatcccaccatcgattctcatccaacgatgcacgctcattcccccaatatgtttcttcttcatctttctccctttgctcagcatcacggccaaccgccagctttgatatcctccttgagtacaaacgtgattacaccattggatgtttcaatggatggtccagatgaatctgatggccacattgggtttagctaccattacaccattcctcccactcagccactcgagaggacgcctgtgtgtaatataactagagaccgttagtagcagagtctggcccatttctctgaaccctagctagctgccaccacaattccccaactccacttgctctagtgtcgaggcagtagcgctcctgtcggtcagccgccacaaaccctagatccatctccccatgtcttccgacggcacagcagctcacctaccaagctggagtgcgagagagcttccgtctccggcggatccgactgcgacggtgacgccgcctacgagtgtcccgattgcatcagctcgctcgccgccgtgctactccaccacatcctcgtcttcctccccgtggtcgaggctatccgcaactgcgtgctctcccactgttgggtctgtgtctggaccggcatcccacagctgcagctcgacgatgatgcgtggagggtcgatctagttaattaggttgtgcattatatgatgttaaaaaattgattatgttcagtatgggagcattaatgtgttagattattatgacaattgtgcacaaataatgagtattataactaaacaagtacattgttactgtagcttaattatctaggctagaggagttaattctagaattctgtatttctgtatttctgtcacatgaaagtatcgaatgagaggtctaagtatattttcatgcctttatgtctctagcacaacctttacttgtccctacctaactaaatatgtgactaacacaatttattagttattatatttaaatatcctcacatggttatattacccaccataaatagatcgatagaccagtgttttggtagtacaacttgtgttatactctgattatttttatttggtgacacttcaccaggaatagtaagagcaaaataaatttctacacagtgtggatctaccatattgtttagagctagaactcattgtggaaaagaaacatcacacgctcgacccaaccattgtacaccttctcaagaaaagcaagtggaccaaaaggttttctctcaaaatatgtccaaaggtatgtctattattgtattattgaatgtatgtttctagcaattaaatcgatctatagcttgaatacattttatcgatttacttcgtatatcaaaattggcttttttttttgttatatcactttaattctttatgtatctcagaaaattcatattcatgcgagcccaactgcgattgtcgccaactgccaaactgtagggatcaagagatctcgttgggctcgcttgaagaactagctatcgatggctttgggggcacctatgatgagaagcggttgatatattttatcgtaataaactcaaaagtactgaggaatgtgtcattggttttctccgtcaatcttcactcatacaaatcatttttgcacaatcaacaccagctatgcacatcagagtgcaccatcgagttgaacaataataatttagtgtagacaaaaaggtacacataaatacatggtgccataatggatgtaatagattaccggaatagtgactctggtgaacactcgtgtgtgtactattttggtgttggttatgtctgaattagtcttatatattgccttgtggaacatactctagctatttaaaatgtaagatatgcgcaactttgggatattaaatgttgtgtggcttgattgtgtcttccacactattaatcttatgagcaaaacatgatgattggttgatctgtttggatggattccaacaatgctgaatgcatgtgtttgatcctgatccatttttttcattgttgagctcaaactttactaacattaattattctaataaaaaattgatggtagcaatcttagaaattaaattgaccaaatcttgtcaccgtaaagagcagaggggagtacgtagtacatattgtagctgatcaagagactatatatagatataataaatagagacaggttattagtatgtatctgagtactaaattgacttgttactgtgttttttttatatagttaggcttattttttggcaaggaaggtctggttaatttggttgcgattatatgatattaaaatattcatgtatgggaacattaatgtattacattactataaataccgtgcataaaaattgattattataactaaacaattagtgcattgttattatctgtagcttaattatctaagctagaggaatcaattctagatttccatatttctgtcacatgaaagtcccctagaagtatcggatgagaggtctaaatatatttttatacatgtatatatgtctgtagcacaactttactagtcttaaaatatgtgactaacacaatttagttagctattatatgtaaatatcctcacactgttaaattacccaccaaaaacatatcgataaaccggtgtattggtaggacaactatattaattatactctgattattcatttggtaacactttgccaggaatcgaaagaacagaaaaaatttatacacggtgtgaatctaccatgcatattttttagagctagacctcattgtggaaaacaatcaacacacggtcgccccaaccattgtacacattctcaagaaaagcaggtggatcaaaaggttttctctcaaaatgtgtccaaaggtatgtctattattgtattattgatcgatggctctatgtttctagcagtaaaatctataacttgaaccttttattgatttacttaatttcgtatatcgaaatcagcttatatttttttgttatatcacttcaaatctttttctatctcagaaaattcatattcaaggcgagccctcctacacttgttgccaaccgccaaactagaaggatcaagagatctcattgggcacgctcgaagaactagctatcgatggctttgggggcatctatgatgagaagcagttgatatattttattataaaaaactcaaaagtacttaggaaggtgtcattggttttctctgccgatctccactcatgcaaattgtttttgcacaatgtacagcagctatgcgcatcagattacaccatcgagttgaataataataattattattgtacattaatgcatggtgctataatggttgtaacaaattgactgtaatagcaatggtgaacactcgtatgtgtactattttggtgttggttatgtttgatttaatcttacattttaccttgtggaacatactctagctatttaaattgtaagattctttggatattaaaatgttgtgtgtcttgattgtgtcttccacactttaatcttctgagcaaaacatgatgagtggtcgatctgtttggatggattccaacaatgttgaatattgtgtggccctgaatagattaagttcgttatggaacctgctggatgccctccataagatcgcctgcgtcgacttcgcttcgacatatttgtcattgatcaaggaagccaatcatattatactaggatcttggagttattctcaagcacttgcactgatattctacggatcaaattttgtattaaaccggtacatatctagatctcatcttctaatatattattatgccttcatgattttacattgttagagccaatatatggacttaattatattatggatttacagtcataaatattcgatgtttgtagaacaggattttgtggtcaataaagcttataaaactccaaccattactagcatatatatttctcaaatgcttaacagtatactttttattgaaaagtattatcataatatcgtataaacttattagattttataaacatcctaatatagaattgattgtacgagacttaaaaaaatgataaaatcttgtcctaaccacaaagagcagagggtagtattgtagctgtcgagagagtatatatacataaaaataagtcagcttggctgcttatatatagagagacacgttaattagtatgtgtgtgagtactaaattgacttgttattgtgtttttttgtgtctagttaggtttagctttttgcaggagggtctaattaattaggttgcgtattatatgacattaaaaatgattatatatgtttagtatgtgagcattaatgtattacacattactataaagactgtgcatacaaattgattattataactaaacaagtacattgttattatatgtagcttaattatctagctagctaggctagaggagtcaattcaagattttcatatttctgtcacatgaaagtccatcccctagcagtattagatgggagatatattttcatgcctgtatgtccctagcacaactttacttgttttaaaatatgttactaacacaagttagttactattatatataaatataatcacactgttacattacccaccataaacagatcaatagaccagtgttttggtagtacaatttgtattaattatactctgattattcatttggtgacactttgtcaggaatcgaaagagcagaaaaaatttatacgcaatgtgaatttaccatatatttcagagctagggcatattgtagaaaagaatcagcgcatgcttgccctaatcattgtacaccttcacaagaaaagcaggtggatcaaaagttctctctcaaaatatgtccaaaagtatgtctattattgtattatagattgctgtgagtttctagcaataaaatctatagcttgagtatctttgatcgatttacttcgtatatcaaaatcagctcttttttatatcacttcaattctttttctatctcagaaattcatattcactgtgagcccaactacacttgtcgccaaccaccaaacttgagggatcaagagatctcattggaccgcttgaagaattagctatcaatagctttgggacatctatgatgagaagcagctgatatattttattataaagaactcaaaagttcttaggaagttgtcatttattttttcttccggtctccactcatgcaaaaaaaatttcaaaatctatgccagctacacattagattgcgacattgagtagaacaatattaatttagtgtagaggaaaatgtacacataaatacatggtggtgtagtagattgaacgaatagcaactttggtgaacactcctgtgtgtgcttttggtgttgcttatgtttgattgtccttaaaattgtaagattaattcgtgcaacttttggatgttaaaagttgtgtggcttgattgtgtcttccacacttttcttcttctgagcaaattaaacaatgataaattaatgcatgtgctttattttggtctattttttattgttgggctgaaactttgccgatattagttgttctataatgtcatacatctcacgacttagaattttgatccattcgttctagcatagattaaaacaaaagaagagtgtaatatgcctaaacgacaggcgccagtgtgctgagacgctcgctaacacgccgtacgtctaggtgcggagacatgcaaaaaggacaccggagtcaccatgaacttgttagtcttaacgctcacaggtaacttgtaaatgaactgtgtatgtgccgtcaagtttctcccatatataaaaaaacaaatcaacagaactgcttgttatgtgtggacacattttctgaactgctaaacggtgttttgggagacgaaggagaactatatttcaggggacgaagggagtaacgttgaagagaaccagaattggaaaaagttaacttgagtttcctcatcttatcgttgagtttcaaaaaaattcttaaaccaaaataccaggtatatataacgcatcatattcttacagaactaggtcacattgagttccaaggcatcattgctcccggttttggccgacgtggcagctaagttagcgtgggactcacatgggccccatatgtcagcaacctgttaggtttaattgggtaattgatccatttaaatcaattaaatcaaataaattccaaggctcattatgctaggaattcatgtgaattcattcttttatgggatatcaatgggatgaagagttttgagaattaatccatttgattaaggaattggtaacttatatcaattagtcctaattgatggatggttgatggttgtgtagtggaggatggttcatggctagttgatgagaattagttgctctattcctcttcctattccattggtaacttacatcaattactcttaattgattgttggttgatggttgtgtagtggaggatggttcatggctagttgatgacaattagttgctccattcctcttcctattccatgactcttactcttcatcttccattcctcttataaaatgggaatggatttgatctcccgcgagataaagaagacacactttcatccattttcaaaagctgttgctgctacggtaatcccatcccgacgagtgtgtgcacacgcgttgggagagtaggcctccgaaaccacgcgttgctgcgacgtttgcacagacgggcgggcgatcaggtttttggggagcgcaaggcgcgactactcactgttcgtcaacatctacttcatcttcaccaacatgtcgaacactggagacaaggagaaggagactcccgtcaacaccaacggaggcaatactgcctcaaactccagcggaggaccattcttggggtataaccttattacattatttcaattagaagttttactgttaatgttcatcgcaatgtcaacattgtgtcattatgtgattgttgatgcttattcaacgttaagcatgctcatgttgattacattcaccactatcactggatcaaatcctattgtaaatatcatgtttattatcttgttattttggattaaaatatgccgaattatgaccaaatttccaacaatccaaaaacctgataggtcattttcggtagttggctttgctgctgcactgaaaccacatgcttttgatggttcaaactataagagatggaaagcacgtgcactattgtggttgacagcgatgcagtgcttctatgtttcacggggcaaacgaagtgaaccacctctttctcctgaggaagaggctaagttcgaggcttcggattgcctgttccgtggagcattgatcagtgtactcgctgacaacatagtggacgtgtacatgcacatgccttctggaaaggacatgtgggatgcacttgaggccaagttcggagtttctgacgccggcagtgagctgtatgttatggagcagttctatgactacaagatggtcgatgaccgttctgtagttgaacaagctcatgagattcagatgttggcaaaggaacttgagaacaacaactgtgagttgcctgacaagtttgtggcaggtggcattattgccaaactaccaccttcttggtcggactttgccacttctctaaagcacaagagacaagagttcagtgttcctgatctcattggctctttgggtgttgaggagaaggcgagggcaaaggacgtccggggcaaaaaggttgagggaggttctagtgccaatatggtacagaagaagaaccctcatgcatcccacaacaacaagaaagtcaagcctgatgtcaaacccaaggctgcaaccaattttaagaagaaaagtaagggaaaggcaaagggagactgctttgtgtgtggcaagtctgggcattgggccaaggactgtcctgagcgcaaagacaggaagtctgccaacatgatcattagcgagggcggaggaacatcggggtacggtaaaatattacctacagttctctctgtttttcattcacctgattggtgggtggacactggtgctaatattcatgtatgtgctgacatttctctattttcttcttatcaggtcgggagaggttcctccttgttgatgggaaacgggtcgcttgcggctgttcatggtgttggtacggtcgatctgaagtttacttcgggaaagaccgtgcagctgaagaacgtgcagcatgtcccttcaataaagaagaatctagttagcggctctctattgtgtagagaaggttttagacttgtgtttgagtccaataaatgtgtcgtatctaaatatgggacttttgttggaaaaggttatgacagcggaggcttgttccgcttttctttgaatgacatgtgtaataatcataatgctgtgaaccatattagcgagaatgatgagtctaatgtgtggcattcgcgactctgtcatgtaaatttcggttgtatgacgcgcttagctaacatgagtttaattccaaaattcactttggtaaaaggttccaagtgccatacttgtgttcaatcgaaacaacctcgcaagcctcacaaggcatctgaggcgaggaatttggcacctctagaacttgttcattccgatttgtgcgaaatgaacggcgtgttgactaaaggggtaaagaaatatttcatgacactgatagatgattgcactagattttgctatgtgtatctattgaaaacaaaggatgaggcattgcattgctttaaaatctataaagctgaggtagaaaaccaacttgaaaggaaaatcaaacggttgaggtctgatagaggtggggagtatttttccaatgagtttgcatccttttgcgaagagtttggaattattcatgagatgacgcctccctattcaccccaatcaaatggggtggccgaaagaaagaaccgtactctaactgagatggtgaatgccatgttagacactgcggggctttccaaggaatggtggggtgaggcagttttgactgcgtgtcatgtcctgaataaaattccaatgaagcataaggaagtaacaccattcgaggaatgggaaaggaagaaattaaatctctcatacctacgaacatggggctgtttggccaaggtaaatgtacctatagccaaaaagcggaaacttggacaaaaactgttgattgtgtgtttcttggttatgctatccacagtgtgggttatagattcttaatagtaaactctggagtacccgacatacatgttggtacaattcttgagtccagagatgctacattctttgagaatgaatttcctatgaaatatacacctagcacttctagtaaagaaactgtcatgccccatgagcactttgcaccgatagaacacaatgatcaaacgcctgaggaaaatcctgaggaggacaacattgtagatactcgcaagagtaagagacaaagggttgaaaaatcctttggagatgactacattgtatacctcgtggatgacaccccaagaaccatagaagaggcatattcatctcctgacgctgactactggaaggaagcagtatgcagtgaaatggactcgattatgtctaatggtacttgggaagtcgttgagcgtccatatgggtgcaagcccgtaggatgcaaatgggttttcaagaaaaagcttaggcctgatagtacaatcgaaaagtacaaggcaaggcttgtggccaagggttatacccaaaaggaaggcgaggacttcttcgacacatactcaccagttgctcgcttgaccacgattcgagtactacttgctctggcagtctctcatggtcttctcgtccatcagatggacgttaagacagctttcctaaacggagagctggaggaggagatctatatggatcaaccagacgggtatgtactagaaggtcaggagggaatggtgtgtaaactattgaaatccttgtatggcctcaagcaagcacctaagcaatggcatgagaagtttgacaccacgcttacatctgcaggctttgttgtgaacgaagctgacaaatgtgtatactatcgctatggtgggggagaaggggtgatcttgtgcttatatgtcgatgacatactgatctttgggaccagccttaatgtgattgaggaggtcaaagactatctgtccaagaattttgaaatgaaggatttgggagaggctgatgttattcttaacatcaaactacaaagaggagatgagggtgggattacacttgtgcaatcccactatgtggacaaggttttgagtcgctttggatataatgactgcaagccagctcctactccttatgatcccagcgtgctattaaggaaaaaccgaagaatagtaagggatcagctgagatactctcaaatcattggttcattgatgtacttggctagcgcaacgaggcctgacatctcatttgctgtaagcaagctgagccggtttgtctcaaatccgggagatgatcattggcaggctctggaaagagtaatgcgctatctaaagggcactatgagctatggaattcactataccgggtatccaaaagtactagaagggtatagtgactcaaactggatatctgatgctgatgagataaaagccacaagtggatatgtgttcacacttggaggtggcgctgtttcctggaagtcttgcaagcagaccatcttaacgaggtcaacaatggaagcagaacttacagcactagatactgcgacagttgaggccgagtggcttcgtgaactcctgatggatttgccggtggttgaaaaaccagtgccagctatcctaatgaactgcgataatcaaacagtgattattaaagtgaacagttcaaaggacaacatgaagtcatctagacacatcaagagaagactgaaatctgtcagaaagcagaaaaactccggagtgatagcattggactatgtccaaacggctagaaatatggcagatcagtttaccaaggggctaccacgtaatgtgatagacagtgcatcgagggaaatgggcttgatacccacctaaggttgcataatagtggaaacctgtccattatgatcggagatcccgtgaatttggatggtgaaacaaactattgtgtgactgagagaagagacccttgaaaagggctcattttcatgatgtgcttctcttctttcctgcatggtaggatggcttatgtcttaatgtgatccgagtggcttttccaagcagagatgttgacctgcagaacatcttagaaggaacacacctatatgagttcgactgctagtcacagtctatgagatttgggtgatctctagatactcatgaaaggcctggagtatgacttataagctccaacccgagggaatactaatggttgcctagtatcagttatggaattgagtgaaacctaactgcacaagactgacaattcaaagcatagtccattgttcagttgtggtcaggtgtagctccttttctaggtgaaagttcaacttaacagtcttcaccgaaacactagtatataaaagctgctatggaatagagagcattctcatgagccttaaaatttggtggggattgttaggtttaattgggtaattgatccatttaaatcaattaaatcaaataaattccaaggctcattatgctaggaattcatgtgaattcattcttttatgggatatcaatgggatgaagagttttgagaattaatccatttgattaaggaattggtaacttatatcaattagtcctaattgatggatggttgatggttgtgtagtggaggatggttcatggctagttgatgacaattagttgctctattcctcttcctattccattggtaacttacatcaattactcttaattgattgttggttgatggttgtgtagtggaggatggttcatggctagttgatgacaattagttgctccattcctcttcctattccatgactcttactcttcatcttccattcctcttataaaatgggaatggatttgatctcccgcgagataaagaagacacactttcatccattttcaaaagctgttgctgctacggtaatcccatcccgacgagtgtgtgcacacgcgttgggagagtaggcctccgaaaccacgcgttgctgcgacgtttgcacagacgggcgggcgatcaggtttttggggagcgcaaggcgcgactactcactgttcgtcaacatctacttcatcttcaccaacatgtcgaacactggagacaaggagaaggagactcccgtcaacaccaacggaggcaatactgcctcaaactccagcggaggaccattcttggggtataaccttattacattatttcaattagaagttttactgttaatgttcatcgcaatgtcaacattgtgtcattatgtgattgttgatgcttattcaacgttaagcatgctcatgttgattacattcaccactatcactggatcaaatcctattgtaaatatcatgtttattatcttgttattttggattaaaatatgccgaattatgaccaaatttccaacacaaccaatcctttcccctctcttcccatctcaatccacctccagctcggccaccaacgagatttccgatacatagtggcgttgaggcaactgggactctgggagctgcctcaccgtcaccccctcgtcaacgccaccgagtccgacgagattaccgacaacatagcggtgcggcgtccgtcgtgcaagcgtgtctagcccttgtgcccattgccggctgagctgtaggtggattgagatgggaagagagaggacagaagattgggctactgatatatgggtcccacatcaactcagctgtcacgccagcaaaagccagtagcaatactgccttgggatctaatgtgatctgattttgtaagattagtgatgcgttatatcagctattccggtgcagtgacgattttaaaactcgacgacgagatgagagaccccaactgaacttttcccaccagaattacgggctcatttggtttgataccaatttactaccctaccaaaattttggcaacttcaatagtagcaagtgaatatttggtttgctaccaaatttaacccaccatagttcaaattgaatactactaaatttggtagtgcaaaaatttgccaatgttttgcagccccatcgtttggcctaaacagctaaagaataagtcaaaatttgaatttttgaacttgattttgaagttgattttgaaatgcttttaacgtaatttttgttaatgttggcttttaagtcgctacgaacaaatctacaaaagttttacttataaattaattttaattttctaataagccaaataagccattttaggcaaaatggcaaccgatgggagccttggtactaccaagttttggtaggacaaaaattggctctaaaccaaacaaggcctacatgtgaaactcaccaaggatcccggtccgggctagcccaaaacatgcggcccagtagctttagttacctggtgggctaaggcgacttcgcgaaaaaaaatactgggctttactcattagaggctcggcccatgcttagagtaaggcctactcccactggcccacgacaaacactcatctctcccctcgcgactcatcgcgttggcggccgccggacctagctcgccgccggccgatttcgcagcggccaccgtcgccgccgccgcccatttcctcctcctccttccttccgccctgtgtacggttcctctggtattagcgttgcgccgccgtcgccgcctcctgcaccgacaacaacgccaaaccctatgtccctatctcctccgtcagtcgtcgagcgcgcgtcctccgccgattgccctcctcgccgtgaacagacgccgagacctcctgtgtgactgtgccctcaaacctacggtttccccccacagtggccttcaccgatcaattgatccctctccctcccgcacggtcgcacggaggaggtaattttttttttcctttaataggagtatctcgtgagactaatctcttggtggaactattaaattaggttgttttaattggcaagtgagcgtccaattatttttttgtcagcataaattgggggactgctagttgttcatacttcataccaagcaaatcctagagattagaatgtagactcatgattaacaatgccattcatttagatttcattaactacaatcaaatataatggatcccaaagtggctaccattagtatgtaagtaagagtctagtttagaacagacattgagctcctcctgtttcaccctacatatttagctatcaagtttattttataagtgaggtatatgaaattttttgtctaagctcaattctgttgtttaattttatttggacttgaggtcactagaatattttacttgttcgtgtaccatttgatatgagtcacccttcttacgtccgaaaaaatgagacgcctttctctttttcaggtatgtcccagcaatcagacacaccttcatgttcagatgattctgaagataacatcatcgacccagccagcatatacactatagaagaattcatttctgagcaaagcatcatggacaatttgcttgaacggatcactgtgaaaattcagtccaagattgaagctcagaaggctggtacatctcaccatccaaggggtgaacggaaatctttaaacaggaatcatgaagggggccatcaacgacttgtgaaagattacttctctcaagatccaatctatagtgataaacagtttcgtgcaaggtaccggatgagaaaacccatttttctgcgtatcgtccatgccttaggtgaatggtctccctatttcaccaacaggagagatgcctccagtcgtcaaggactctcacctttgcaaaaatgcacagcagccattcgtatattagcatgtggttcccttggtgatgccaatgaaaaatacgtagaaattggtaagagcacagagctagagtgtttggagcggtttgtggaaggggtgatcgacaattttggtgaagaatatttgcgaagccccactagtgaggatatgcaacatatactacaagtgaatgaggcacgggggttccctggcatgttaggaagtactggttgtatgcgttgggagtggaaaaattgcccagttaaatggaaacgtcaccttactcataccgatcatggtgctgctacgatgattcttgaagcggttgcttcacatgaccactggatatggcatgctttctttgctgtcattgggtccaacaatgagatgaaaattatcagtcaacaacagttgtttaccgaggtgttgaaaggccaagttactcaggtgcaattctctgtcaatgggaagcaatacaatacgggttactatcttgctgatggaacatacccagaaggcaatgtcttcattaaaacagtatccctccctcagagcgaaaaggatcgaatatttgcacggcatcaagaaggagcaaggaaggacgtccaagaagcatttcgacttctacagtctcgttttgccattgtgcgtggtccaactcgtttctttcaacaagagattcttgcaaaaatcatgcaagcctgcattatacttcacaacatgacaattgaggatgagaaagatatggccagcgcttgttttgacccagatgaaatttcagggacattggctgttattttatcagacatcaacactgtgcctgctgattcttttactgaagtgctacatagaaatgcttctgtttgtgctccaccgaaacatacacgacttagaagggacttaatggagcatatttggcagcgatttggtccatttggcaaccagtaaaacaattaatcctagtgtggtaatattagacttataactttgtttaattttttgttataactttgtttaattttttgttataacttataatcctgcaatattagacttataactttgtttaattttttggtacatttggctttgtttctaattatctgtaataaatatttgagtattgccgtccagtgacatttaaattatactccattattaaatgtattatgaaatctttcgagattgttcatcctcaaccatggatgttcaggtttgattagtttgtttacacaaaatgtatttcaggtttggatttttttttttttttgaagaaaactaaaatgaattatttacctcatttatttctgtttacacaattttgacctagatgtaagccaaataattagagaaaaattccaggaaaagtcagtgaaggtcaaggctatctggctttaactaccaccaaacagctgtcagcataaattgctacattttcagaaagacattttaaagttgctcccaacaaatcctaggttttcaacagaaggtgagctaacactgtgcatagtatgctctactatttcatatgaagttatggtgttctgcggaagttgtagtttcttataagttctaacggctatttcttttgttgatttattcagtcctcaatctagactggaagttgctaatttgttaaagttagctcttcgatacagctccctgcagtgagttgatcatggtcatcttttttctgtaagtggaaaaaataacgacattacaatttcagcatttatgagtgttgagtttttctaaaggtcctcacatgttctttcagaatttcaacatttagacatatctcatagctagagcaattgaacaatctcatagtctgttatactgactactgaggttgtgttttattcattttcagatatattaccagggagtgcttaggcaggcttttcgtatgcaccttttgaagtactgtaggccaacaagttggaatttttcagcagaattttattgtgcataacagcaatctcaagcaggagttccattggattacctggggactggggtagtagatttccaacataataactagtgatgtgcttctactgtttcttttgtctaagataccaactatggatacgttggttattttgtaaaaatagcatttggacttcaggagcatattactcggtactatgaattatgatgacacttgcagagtttcagtccatatcgcgaccatgattgacgccttcaagggtgcgaaaccgtcctgttttgtgtgaacttctccaagtttaatatggctttgtgcccacatacctgatttgattggtcctaaaagaggatgctagatcagatttaacatttttaatcgcattcctatactcataattctgtagtctggaagcgggaggaccgcacatgccagcctcagagtctactaaatgaattgatcttttttttttcaatagcaatgtaaaccaactaagactatccatgggtctgccaagtcccatggttgaaactacggtatatctcgcgataaccgcacggttagcagtaaccgccaaaccgtcgggtggcggtaaccccagccccgccacctcaaacagtttggtaaaccctagccatggtaggggtaacttccagtatggtttgaggaaatttgtttgaattgaaatttataaaaaaataatgaaaaaattaaaacggggacactattttccctcatgggccggcggcctaggtcatactgggccgtctggattaatgggcccgagggtagtatgtttgcttgctcccccacccctcccatataaagcaagtagggttcccgtctcgctcgcctcctcgatcgtcttctccacctgcgccgccgcagcctcctcaactcaactctcttcggcagcgagcagcagcgccttccaccatggtgagttcttctcctctcctctcttccccgcggcgatggctacgcctgggctagcggcggatgcgcggtgcggtgcgattgaccccgttgttgttttggtttgtgttgttgctaccttggcaacgcagccgaagcagatccacgagatcaaggacttcctcctgacggcgaggaggaaggacgcgaggtcggtgcggatcaagaggaccaaggacgccgtcaagttcaaggtgcgctgctccaagtacctctacaccctctgcgtcttcgacgccgacaaggccaacaagctcaagcagtcgcttcccccgggtccgtattccgttatccactgcctgtgtattctcttcctttcatttttattgatgctgttcttaagtaaggaaacgtccgctgctgtgtgcgaaatcacgtgttttgttggaacgaatcgttaaatcctttcatgctttaggatttaaaaagaatgtggtatggaatggttatgcatgttctttgtgaatttagtttggtctagcatgctaatcaggtggagctgttgataaattggccttccatttagtctggaaattgcattgtgtgcaatgatacccaattagtgcctcccaagatagtcatggaaatcttactgtaggatatgtgcaagtctggaacttctcctgggatgagattgcgcagttgcaatcatcttcctctttgtatagcttttaattgtcatttccatgtattgatgtcagtataaatgtcaaggcgcataagtaacttgcctatctcagagccatagatatgacaattttttggcagagcagaaaatatcatttacctcgtctttggaaaaccagcaaaagtaattacagcactgggcatacctgttctatttcagatcaaatatgctacaaaacaacctactaatcaagtacatcatacttgtctatctggtccagcagacaaagccagcaccaactaaggttttgtatatttttcaaaaaaatgatgcagcctacaagaccagctaatttcatgccttccagatatccttggaccataagctgttcatccagaaattatacacgttttgcactatgtatctatgcattactgttctgctgttcattcagtacaaaatttctttttgttcaattgatcatcattgctaactcaatgattgtgaatttctttcttcaggtttgactgtccaggaggtttaagcatcaaagccagaccatgctgtttgtagcagcaggattgcttgctcccgttcgcattagtagctattagatgctgaaattttatctgtcttgagttttgaatgtaacacccaaagtttatgtgctgaaccttcttcgagtcagattgcgctgttactcctttctggagatagctaccagtcgtactgtccctaaacacactgaattttgctccatttctctctaattgctggagtgtttcatatttgttctggagtgtttcgtatttgttttgaaccctggattgttgcctctgagattgtgttgacacatccacacgtgagagcatgaacacagtgacacgtgagagaggaagaacgatttttgtggtattgctggaatcttttcggcttgcaggttcttaatatctcgattcttcagttggaatatctgctgcttggtaggtcagttacagaaatcgtggtgtgacgatgaggaaagccatctgtgggctatcctatgtgtgcagtacttaacaaccgtgcagaacttgcgttcagattgtatttgcggcaagattgtcacttcgacaaaattttgtagaaccaatttgtccttcagttttggttcatgtgctattcatttcaacttctatgaaatatgagcaaccaagaccttgaccagcatacccataattcatctatttcaaccattggttacattgctttataattttagtcggtagcgctttattgacgaagttgagtcttgaagaacctatcaaactaccaaactgagtttaaaatggtctttaagattaaaatttatcatggactgttgattttttaaaagtaaatttaaggttgtactgtccctaaatatttttctcttacattttttttggcaattatattgttattactgattaatctccaccgtccgatccttatcatccccttcccggctacctccatcatccccttcgccagtcgctcgcttctactcccgcctcgccttctctccgccccgctccgctcgccggcgagccgccgccgccgccccagccccacaccctcgtcggcgcgtcgcctaccggtggccatcttcgcccactcccgctccatgtcctgtagccgaagtgcggcaatgattgactgcccgcggctgctcctggcggccgcgcgcgcctctccgtaccccagctccgccgctcaccggagggtctgcaccgccggagtccctcccgtacccgtatattgccgtgtcagccaccgccgcaggtcctccgttcctggtgagcttcggttcttactttccttgtactcgtgcaagtattgcaggttttttttcctttttttttttttgcgattaaactactcgtaccatacttgatgttagctatggagtactatgcataatgcaagaatttcttgttttgcattgtgtgcgaactcgacaattggaagagatgctagcttgaatagggaaaaaatggtttcattttatgctttagttatcttatcctctggatgaaacattgacagacttgggtcaacacagtgcaatctgcatcctctgggtcaggaagccaatcaagcgttgcagaaagttcggaggctaccgaatgggccatgcagggtaaccaatttccccaccacattctcaaatcaggatagcagattgtgtttctttcagcccatgagaccatgaatgccagggttttgatccttatgcttagaagttggtgacagatttctacgctttgcggaaggatgtcgagctggctgtagcgcgcgtcagtgaagtcaggcagtctgctggtttggatcagcttgaggaggaaatcgcttcgctcgagaagaaatctgcagatagttccttgtgggatgatccttccaaggcacaggagatacttgttgctctgacagaggtcaaagacagagtcaagcttctcaacgatttgaagttgcaggtttaaccaacttgatattcttcttcatcccatactagagatgatacagaatgatgtagaattctaattgttattatactatagctatatatattgaaatgattgtttaacacctcctgtagtaaattagtaattctcattattataatgtggatttgccgcgttcataaatacaagtaatgataactaataaaaatatgtaccccctccgtcccaaaaagaaaccaatctaggtggggatttaataccactgtccatatttgttgtcctaggtggtgtgtaatcctcacctaggttttttttttttttttggggacggagggagtacagatttgctgcatatatccatactacagctgagaattgacagaggctatccattttggttgaagaacatgacttctggaattaattggttaccaacactagttcttaattgtgtcctttccattgttatttacaggttgaagaagctgagaccattgtaaagcttactgaggagttagattccatagatactggccttcttgaagaagcctcaaagatcataaaggcattaaacaaagcactagataactttgagatgacacagcttctttctggaccttatgacaaggaaggtgctgtgattaatattactgcaggtgctggtggcaccgatgcccaggtatgctttcactaattctcatgcttccttcttagctcacaatgtaggaaagatgatttttgtcttagttttctaggatcttatgacttgttcatttagtcttgttgtgcttgtagaaaatttagcttttattattgtcgatattatacttctagtaccaaatatgtaccactgtcataactttttcatacatgtcctatttctatctgttactgtaaaagacgacctaacatcagctagaaaactagtgcaaatgtgaatgtatgatatgataatgaccttcttgatgattattaatccatagtgtacataactggatttccaggtgtcaggatttaacgcaaactttatatatgtagtagtatatgtaattctaaagatgtgcagttcaacttacatgagtttatctcatataagaatggcgatagatgatgtttcgtgtttttctggagaaaaaacatattgtagaagagcaagttgtgattataatttttttaatggcttatatttgtaggattgggctgacatgttactgaggatgtatgttaggtggggagagaagcagcggtacaagacaagagtggttgagaaatcccctggtgaagaagctggaataaaatcagctaccattgaattagaaggaagatatgcctatgggtatctctctggggagaaagggacacacagaattgttcgtcagtccccattcaatgctaaagggcttaggcaggtatgtgtagtttttcagttcctcttttgcgattcatatacatattctcgcaactttgaaaggaaaagacatctactcatgctcagttttctgttcaatgtgctaatttctttagacaagctttgctggtgttgaagtaatgcctctactgccagaagagtccatggatgtagaaatacccgaagaggatctggagataagcttcactagagcaggcggcaaaggaggccagaatgtgaacaaggtggagacggctgttcgcatggtccatatacccacgggcatcgctgttcgttgcacaggtttgtactcaaagacagtcagtgcagcttgcatgatgtgtcatatcttcgttagggctgtggatctgaatatctgctaattcttggctctatgccttcacatatgttgcataaataggtagttttgtcatgtttgggtaagacccccaatcttagtttgatatgatgtggtcatcaaaagacccaaaaaagaaaaagtgaaattggtaatcgttgaagtaaagtaaagaactgagcaagacatcctccaaatgattgaagcctcataatccctcgttgtgaccatagttaaatgtgcagctaaattcagttttatcacataaacaccatgacttaactgtgtacctgagaatttgccattgaaatgtatttgcaattttgcatcaagaactgtagctacatgagtaattttccacatcttttccttgcgaaacctcgcagaggagaggagccagttggccaacaagataaaggccctgagccggctgaaggcgaagctgctggtgatcgccgaggagcagcgggcgtcggagatcaagcagatccgcggcgacgcggtgaaggcggagtgggggcagcagatccgcaactacgtcttccacccctacaagctcgtcaaggacgtccgcaccgcctgcgagacgtcggacatcaccggcgtcatggacggcgagctggacaccttcatcagagcctacctcaagtacaagctctctgccgctgctgaggagcaaagcgtcaagtgacagatttgcatccagtgtccgatgcaacaaccgtgcttgtgctataggcgcagaattttgatgcagagcaagaaccccatcacgtagtaagcttgtaagaatagcctgaaattaaccgtgcagaattcggtttgcttggctctactaagcacccaaattttattttggggcttcatgtattagtggatatattaatttcatttctacccaatatatataagcctctcacctgcctgacgctctcatgccatttctcattgcaaacctagagtcaggctagcggtccatgctcaaaaaggttactctacagattgaatgctttggaaccatttgaacttctctctctctctctctttctctctctctctctctctcatgcataaatctctctctctctctcttatgcataaaggccgagcttagttccaaactttttcttcaaacttctaacttttccatcacatcaaaacttttctacatacacaattacacaaacttccaacttttctatcacatcgtttcaatttcaaccaaacttctaattttggcgtgaactaaacacacccaagctacaatcagttcaatttgctcaaaacatgtgcgaacagatcatacgttgttcaaaaacgctctctcaattccctaagagcaagtttaatagcatagcctactacttgctccaattcatctatagccaattttatagccaattcatacaatagttgcttactatattattaatacatggtcccacttgtcatacacacattgcgtcttggagtccgtgctgtagctggctacatatttgtagcccactgctcttctctctcatcttttatctcattaaaatatgtttatagctggctaatagtctgctattgtacttgctctaacacgcatccaatccgcattcccaatccgtttggtggacggaggacggcggtggcggcctccgcagatgggactacctatacatttgtcaacaaattttttcccaaaaatttaacagatgtaattatagtacaatcatggtgtaattacactgtaacttatatgtaattacactgtaaattgcatgtaactacagtgtaacttatatgtaagtttcacataattttgaatcattagatctattacaagatttgttttggtgaggaagaaaacacatcatagcacacacatatgtgaaagaattttttcccacgacctccattttaccgaaataacatgttacggagagatttttgaaagttacatacaagttacactatagttacagtgtaattacactacgattgtagtgtaattacatctgtcaaatttctggggaaaaatttgtcgacaaatatatagcaaaatcgccgcagattaatgttaatgggccgggaccttttgggctcatcaggcttcattggacaaatctggcccatttaggtaatcgtgttatagcccacgttttcatgactgggctggaatctcgaggcatgggccacggcccgctttgttgaacagacaaattcaggacagggcttcgttttgacttttgagtgtgtgtaaaatagggatggaaatggtggaaagaaaattctcgactgatcgagtatcgatttttaaatacttttctctaaattatgtcaacatcatattagagtcgtcactaaatagttaaattcatagatatgaaaacttctcgaatcctgaccaaccaataaccgtttccgtaggaatatatcatttccactctttggaaaaattgtagacactagttgtttaagtgaaaaaaaaagatccttccgagataccgtacatcccaaggtgttttttcttccttttttaaaaaaaattcccaaggtgtattgttatagtagcagtgcatccagctaaagaaaaacaaaacattgaatcaaccttattatttacatagtgcatctctgattgtgcagtgaagattctgcagacatgctgcccatgtagcaagacaaacaggagtagtagtgtttttgcccataacgcacacagcaacggctggttaataattttaaaaaaaactgcgagattccattccaaaacctgaccagtttactcccctcttaaacaaatcatggtggtggtgcatgctttgagctgctgcaaccgtttgacttgatgagcagccaggacaagtgtggtgtttgctccagatcagacacatccatcagacagcaaggacagcaagtaccactattacttcttaactcgtctgctcctgcaagattagtactcctattagatctaaccctctggattagtttaggctttaacccgaccaatgtacttaactacacggtgcagccacactgtagcttagctaccatccagtgatggagagatcaggaatcccactgacagtccatgcctccccgagcacgaattccgaggcgtctctagacacggatgggccagcgtttacgtcacctgcaatttgtgagaatctcaaagccaccactactccttctgtggaccaatgcttcagcaattcagcactgtattggtttactgctactactacctgtctggtgtgtgtgcccatgcctattgccctcttgcctttctgctgctcctgcttcagaagagttcagaacccaaggcaagcaatgcaaggcaaaggtaccaatgttttgttactaattactgtagtattactccttgttattaaccagggtagctgcagtagttagttaattgtagttgatgacttcccaagcaatattggtctctctttgggtctctcaaaaacatgtagtaaaccctagctagcccctaggatgctctccttgactagtgtggatgcttcctataagcatggccttggtttaggagtagaacagcactactgtcagtggagtagtagtcacttgcaagttaggttatgtgaccaaaccgttgttttcttgctgtgttttccttgggagtaatgcagctgaaagcctgaaagcctgtgaaacctattggcatttcaaaatgggaaccttccatactctcacactggttctacttgtagcttagcactaatcaaatactgacatgatgcttaattatctagtgtgtaattgcctgttcaatatatatacacaagttggcacatcagaaaattcagaagttgcttcttcgcatgttgcctactgctaccagcagcagcaggcgtatgggttaactgtcaacatgatgcatgcatcttcaatagactattaatacttgagttgcctgaaaaaacagattagttaattaagtaacagcgatatacagcgagaacaatcagcaggcaccaacatctgaactctgaagaaattaattggagaacatgcttgtaaccaaaagaaaaaatacagcatgtagacatgtagtagtgacctcttcatcttgatctgtacagtactgacgacttctgattaacttaatcgaagaacccaatacgccactgaagtcgtgcaagctttagctttgggccgacttatgaaaaactaattaactaacaaacaagaaacctttgcgtggtgcttatccccacacatgacaaacatgagtgtgttcgaaggaatcataatcttaattgcatcactcgagctacttgcttaacatctctgatccttatctccatctggacaaatattaattatttccagctaattaattgatctgctattttttttctaattaagcacagagatgaagcctccacgatatctgcgttttgctcttggattttgcagcgtggttaagccgacgagaggagtacaatctaagcgattactccctccatcctataatataaaggattttgagtttttacttgtattgtttgaccattcgtcttattaaaaaaatttaaaaatattatttattttttttacttactttattatccaaaatactctaaatacaacttttcgttttttatatttgcacaaatcttttgaataaaacgagtagtcaaatagtgtaagaaaaaaactcaaaatcccttatattataagatggagggagtatttccttagaatcttagcctcctgcatgccttttgcacgtgcttccgtagtcccgtgtgcttgcattgccaaggcttaaactaatgcggtcaaagctcacaaatgactcaaccgagcttagtttgcttaggtgacaacacaacaaatgaacaaaatgtctttgaaacttaagtgcattgacttaaaaaaaaacacggtaattatgtccttgctccatggatttaaaaaaagaggaagagctgagaacgaacaaaactaaaggacatgttgctttgaactgcgtgctgatgaattagatttcaggcagggtacggtgcatggctagcaatatggaaatgatcatgagtgtgttttcttttttgcttagtaagatctggcccatgcaattaaaggaccattcacaaaccaaagatatataggtaggagtacatatagtagaatatatgggtccttagtggaaaaagcatgatgttgtcatcctcataatcccctttagcaatcatagagttttgatggtctcccatgtatggccagatggaagagaagctagctagctaaacctggtagccaaaggcaacatgcatttcgcccccaccaaaacgcaccttttattaaaaaaagggttttgatttggatgtgtgtatatgagtatatcatgttcctttttttttcccattgagctagctttatcctcctctgtaaagatccaaaatgagaaactaccgttaatatgttaccaaatgcaattgcatatatagttttggatgcgtctaccaatgcaatcacgtacaagagcaatgagcaataaagggcatcggcatcttttcaccatgatgctaattaatatgtgagaatttctacaaattacactatttagttgaatgcaccaactagttcatgtttaaaaaattaagctgatgaaaaaaaaaacaattgcattgacactacatcaggcctgtttagttcccaaacaaaaatttttcaccctgtcacatcgaatgtttggacacatgcataaagtattaaatatgaaaaaaaaaactaattacacagattgcgtataaattacgagacgaatcttttaagcctaattacaccatcatttgataatgttgtgctacagtaaacatttgctaatgacggattaattatgcttaataaattcgcagtttttaggtagaatctgtaatttgttttgttattaaacaacatttaatactttaaatgtgtgtccgtatatttaatgtggcaagttaaaaaatttcgttcacgaactaaaccgggcctaaatgtcaccttttttttttgtcgacgtcgcatgttgatttttgaagcatgggtgatcttgagatcagatattctgctcagtcgctccatcaatcaatctatcaatcaatgtaaaacactaaccatgaataggcataatcagtcttgcacccccccccccccccctattgtcgttgatatccttggctcagatagacttcatgatcagagcagctagctagtaagagcagctacgatagcaggctataagccagctataaatatattttaaagagataaaagaagagagaagagtagcgggttacagatctatagtcagctatagcaagggctccaagacataatatgtgtatgacaggtgggaccaggtattgatagtatagaaagtatctattgtatgaattagctattacattggctatagatgatttggagctagtagtggctatattattaaacttgctctaaaccaccgtatccttacttaatttaacactcgtagacctcccggttatattagcttcgttgtcactcacaacccccctatacctctacaactccgtatcatctatctgtctgattaatatgagcgcgctataattaaagctgtgtttaaatctaaagtttggattcaaacttcaattcttttccatcacatgaatatatcatacacacacaattttttagtcacatcatctctaattttaactaaaatttaaactttacgctgaactaaacacagccttgtactgtcaatcagcgtttgtcttcagcagatggacacttcttcagaatgcttgactcctctggcgccagccttgctcccgggtcacacgaatgcttgacattattggcgagaaaaaaagggaaaaaaaccggatgccgaccgctctacagagtattttaacagggcgtaggctgacatctcatctcatcgtaactgacgaggatcgtgagcatgaacaggtcgacacacagtacatccgtcggctgaagtacctgcatggcctttgccgtgcattaatggcagaaattctcatgcgtctgcaccgctacatgctgcacgtacatgcacggcaacttccttctgctgctgcggtgctgctaaacgatgcacgaacagtgccgcttagctaagctggattttcaaaatatattttagctctttttcaaaaacttattccatacataaatctttagaaaaacttatcgaaggaatccactctttttctcggtgccaaggttcaatatctcggtgccaatgacacggacaccaacaccctcgtatcccgtgatagttaagtcgctgacatcaagaaaatcggcgtaaaaaaactaaacgctaaagatttgtaaaatatcttttttagaaaaagaattaaaattataactattgtactttttttttcttataaatcggtgccatcctgatttgaaccactatgcgacgagaatgtgtggtggagttaatgcgcgcctcatcgtcatcgtccggcgcagcatccgctgggcgcccggcggccgccgacttcttgcattcagtcggtcaccggctgaggccacgcacgtcgcactactgtttccacgcctgcctgaatacctgatgatgatgcgcacgccgatggggaggcagaatcggaggagaagtacaaccagatcacctgggcatcgcggtaccgtacgtatatgtacgttccccggccaccggccagaacaccggcgactgcagggtgcactcatcagtcatcaaaaatcaaaatggatcgacgcaccaattaaacacgtaccgatcgagcagagatcccacatgaagttgtcctgtacgtataattgtgtctgtttatttactagtgtcgaaaaaatagagtcaatataaaaatagctgaaatttaaaattttaaaaaaaatattgaaagaagaggcaatagtccatataaaaatttagtaaaagttagaatatttttttaaaaaagctaaaagtagagcttagagtacaaatagaaatacaattaagaaagaactaaaatttaaaaaaaaagattgacacgagagtctagagtacctattggaatataatttagaaataattggaattcaaaattaaacgataagaaatattgaaagaagagggtagagttcatatagaaatacaatttgcaaataacagaaattcgaaattaaaaaacaaaaaatattagaagagtagtctagagtccgtacagatacgatttagaaataactaaaattcagagtttaaaaataaacaatattaaaataaaggtttagagtctatataggaataaaatctattatattattaaaagaatagaaaaaggagcctccacgttttcgctctcatggcctagaaattctcacattactcggagaaaaagaaaaagcagagtccatatagaaatacaatttagaaatagctgaaattcggaattaaaaaataaggaatattagaagaggagactagagtccatatagaaatacaattaggaaataactgaaattcggaattaaaaaataaggagtattagaagaggagactagagtccatatagaaatacaattaggaaataactgaaattcggaattaaaaataagaatattagaagtagagtatggagtccaggttagaaatacaattaggaagtaatagaaatttggaattaaaaataagtaatattagaagtagaatatagagtccatatagaaatacaattaagaaaaaaaattagaaattcagaattaaaaaacaaggaatattagaagtagagtataaagtccatataggaatttaaaactaattaaaatttggaataaacataataaaattaaaagtagagtttagagtccatataaaaatacaatttacaaataaataaaattcgaaattaagaaaaacatgggaggaagagtttaaagtcaatataggaatacaatttagaagtaactgaaattcgaaattaaaaattaaagaatattgaaagatgagtttagagtccacatagaaatacaattagaaataataaaaattcagaaataaaaataaataatattggaagaagagtatagagtctatatagaaatataatttacaaaaaaactcggaattaaaaaaaaagaaatattaaaagacgagtctagagtccatataggaatatttataatttacaaagaactaaaatttggtattaaaaataattaataactaacacgtatataaaatacaatatgaatattacacattagtagttttataaagttattgcaaaatttaaaattatgttgtcattttaatatatttgaataatataatgagaaaacaaatatgctattatatgagagaaaatataatgatgctagccgcacaatttgcgtgggacaccatgctagtttataaataaaggaactttgaaatttaaaaataaggaatattagagaactttaaaatttaaaaaaaatattggaagagaagtctagagtccatatagaaatacaatttagaaataactaaaattcagaattaaaaataattataaccatcacgtatatacaatacaatatgaatattacttattggttagtttggtcaagttcatgtagaatttaaattatgtttccattttaatatatttttataataaaatgtgaaaaatatatatgttattatataagaaaaaaagatactagccgcgtaatctacgccggccaccataaagttaaagtaatatatatggggctgaggggagggagaaatcttaaaaatcagtattaattccatactgtttcgttataaaaacggacgaatcatatatacatgtctagggtggatggagaggccgatagtcatttggttccactgaagaaaatgaagctattgtgttaggagcggattatacatcacgccttgattaagcatagtagtagtaataattaagtagcggcaagtacggccaactgctgtcggcgccggcgcgtgatgagggatcgatggatgacccgtccgtgtacaagccgttcgacgtacacatccggcgtaattaccttagctaaacatcttgaccaaccacgtaatcactagcttttccctaccacagaaaaaaaaactcataatcctgattgtacgatctaccgatttaattacatctgcaatcaaacagaacatggataaatgaccaaataatgagtacatttatatatgatctctattggtgttagtaggagtattttactactcgtattattatcaatcaaagatatctaggcggtttatttatgagttatattgatatgatccactagactagctagaaaagatgaacaatttgaatcgatttctactatccataaactccattgaatatctagaaaaataaatcatttggggagataaagattcgccatgtctgttgctgaagagcaagaaaaaggtccactcatgaacatgaagaaaccattggccgtagaccacaccgagctggccatggacccatggtggtaatgtgccggtgtacgtggccgtagtccacagtgaacttggtccatggcaccatgcagttttttttttttggcagggacggtgtgtgctgtaaagatcacccagccttttttgaccatttgagtatggtgatgacctgtgtaagatttgtatgggaaaaggtggtttgtcatggctaggtgatgagcatctttggcccctctcctctcctctgccaccctgccaaatcctactgcatctttgattcatccatctgtgactgtgtgtgactctctctctctctgtgtacagcaccaggagatgtttcttcttagataatgataaaaactggggacaatccactcataaattaaccaacagggacagtactgctatacagttcgggcaaggacatgctttgtgttttatttccatggaaggacacgtaaaaccatgtgcaattaactcgtgttaattactaacccatatgggttaaggacgcttctttggtgtgaagatcataaatggccaggtcatgtcatgtgccgttgtgtttcttttttttttttcagaagttggatttggattttaaacctgtggtgagcaaaaaggaaatggaaagtttttgtcaggcgcaccgaagcacaaaggttggcatagaatctctctgagctttggactggctatctctctggtgtagtaagatcaacagcatcatgtagtaattggaagcatggcacgatcaggacaagcatgtgggaggaagtaataaattactaatgctagtaatatattccctaatttatttggggttagacactgtatactcctcctttaacccttgttttattgtctcaaagagcatccaaaaagctcatcaagggggaaaaagttcctaagcctagaaagtgactcaaatgcccatgttcttttaccactaagctagtagccatatcagcgctgtcagagctgtccttgctttctaaacactgtaacagcatatttaccgagttgattaatctgcagattacaagtcaactgttcccctgaaccttggctgccatgatgtcattgtgcctttactgatcatgctttacactgcacgtctggtggctaaacaagcatcttaagcaaggacacaaacagaggactttgtttattgctatggcttaatctttctaggtcttgtgtgacctctgagaatctatcttgcacgataaggtcatagcataataataataattagtccaccataaacaattttaagcatctggaatagtacttgccaaattgtgttatgaagaagaagttgtggtattatagacttttagttaatctatattcacaatctatatgcattgccatgttcttcagagttcagacactcccaattttcacagctactagctcttctctccagtgaccaagaactgatgcatcatcataatacacatatggaaaaaaattgagaaaaaaaatgaagagaaaaaaaaggggcaagaatgcagggatgaaagaaccacatctctgcatttgctgctactcctatgtacaatcagtatgaaacgagcttcaagaacacatccggggaagtgatcttgaagcagcgcggcggccggcggcggcgccgccgccgcctccggtggctctcctcgccgccttcatcttgctcatctgcgtcttcatccggctgcacaccttctcgagctccatcacccgccagtgcatcccgtcgaggagcgacctgagattctggctctccagcgacaggtcgagcctcccggcgtacaggacgacctggccgccggcggcgacgaggtcgtcgtggtcctcgccgccggcgcggtgcttcgccgcggacaccggcctcaggtgttcgtccgggccgccgccgcggaggaggctcttgagcaccgtgtgctgcgacgccagcgcctgcaccgccgccctcgtcgggaatccggcgttccgggcgaggtgcttgcagcactccggcgagagcttctcgtagtttatccccttgcagatcctcatcttctcctcctccgtcagccgcgtgtgaacctgccatgatcgaccaaaacaaaacccattagctttcagctagtagagcaattaattaggaaaaaaactcaagctaatttagcatcttaatcagcaggattaacagcactgacagtgacaaaagtgccaaaatcttaagcgtccaggacaatgaccaactttttttttttcttgagacaactcgatcgtttcaggcttcagagaacattcagaagccgatgatgcataggattcagaggaggtaggagtagcaataaaacgcactagtagcaattaatgcgagggtgagtctgtgaaatgctgacaaaatcaagaacagtgctcgctgtcgaggctaggcggcaccaaagatctgagtaatttacctggaagtagacgtcgatggcgcggtaaagcgcgtcgtggcagtccctcgccgcggcgggcagcgccgtggcgagctcgacgaacatggccgggcgcagcgacgggtccggggcgacctcggcgaggtacaggtcgacgagcttgcccaccttcttcagcctcggcgtctcgccgcgcgcgccggtggcggcggcgtggtggaggaaggcgtccaggaagcggaggacgagggtgacgtcgtacaggctgctcgtcgtcccgggcggcgccgggacgagcaggttgtcgagcgtcgcgtggtcgagcttggcgccgatcatggcgacgaggctgtcgtggcaggaggtggggagcttgagcggtgaggagatgcggaggatgccgaagaggcccctgcaggagaccgagctccggtcgaggccggacatggcggcgatcgccgcctcgagcatcgccctcttgtcgtcggcggtggcggcgccggcgacgcggcacttgaggtagtagaagaggaaccgggagacgacgccgtggtcggtgcccctggcgaggagcgccccggggacgcgctccaccatgccggggccgaggacgacggcgaggtcctcgaaccaccaggtgcggctggtgcaccgcgcgctgaggcagctgctcttggtgtcgcacgagaaccggaacgccgagctctccggcgaggagctcgtcggggtggcgtccccgggggagacggccacgtgggacaccagcgcgccgacgacccggtcgaacacccccgtggcgtccgccgtcggcagcagccgctggcactgcctcacggcgtccaccacgctctgccacgaccactgcggcatctcgtcgagagccttctccgtcatcttcaccaggctcggcggtgtcgacacctccgccgccgccgccgccatgtccatgaactcagccgcgcaccgcagcgcgcacgcgttcgacgcggtcaccgcgacgccgccgccgccgccgccggtgtaacagaacctcgcgacgagctcgaatgcctcagcaccgccagggaacccacgcaacacgaccctcgccgccgccgcagctccgaccaccccctcgccgccggcgccgccgccacccaaattcttgatcctaccacagaacggtgcaagaacctcctgccaaaattcaccaaaaccacgaaaacaaaacacaattcaggacaaagaaaccaaacaatttactcgtacaagaatcaaagaacacaccagcctaatctaacccatccaattgactcccaaaatcaatgcgaaacgtcagaaggaacatgcggtttatgctcttaaatgaggaggtaagctggtggccattgccatgcagcccaccaaacgccattaaaggcctcgcactcactgacagaggcgaagcagatgagctgtagctattaggccattaactccggggaagaagaggaagaggaagaagaagaggaaattggaatggaacattattttactcgcctaattgctgcgagctctcgccattggaggaaggagatgaaccaaaacgaacaagaaaccgtagcagcagcagcagcaacactcacactagtactcctgcgccattaaggaggaagaagaagaagagatcaagaatggctaggcttggcgagctggctgctcattgatggcgatggcgaaatggaacccacaccgcacttaaatggaagatcgcgacgtcttcctcctcatctaatctctgaactcgcagtaaaaaatgtagaaaaaaaatattcagaagcagctgggggtattaacagcagaattacagggagaaattcagattaaccgatgcaattaaggcgatgatgatgaggattcaattccaacagcgtgtgtacaacctgacaggcttgcattcgcacgaacctgtcccactcccacaggagagacaggctacagctcaagaacaaaattacagcaagaacaagcgatgaggcgacagacaatgcgagcattttatagaccaagaagaagcaaatcgtaactacgaattcgaggttggtacatgaaacaagcaggatgtgacaagccgcacgaaatccaaaatccgacgactagggatcaaggagagaacagcacaaggggataaaagcaaagaatggaagagaccaaaattgggaaggagatcgcgaggtaatgccaaaaaaatttggggactacctgaaacagttttggacagaggaaacaacaaatgctaggaattgaaacaggctcaattccagcaggatgtgacacacttcctcactcatccccaagaacttggtggtgaaacactagagaccagaagctagagtacagaacaataatccccagacgacagaggcaagctgtcaacctaagaaaggaaaaaccaacaacaagaacatcaccatcgtcaccaattcatcatcttaggatgagaagcagcagaacagagcaagaaaagaagagaccttaggaagaactgcaagaagaagatttgttgctaccaagaaggaagaagaactgcaagaagggaaaggaaaggaggaagaaccttatcaacgaggaagacctcttcaccatccacatcaacctcaagaacacagcccatcgtcctctttttgttgccacacaccacagcagcacaccacaaaacaaccagctttaaagcaacatggcaaagaagaaggaaaaggctgcaatgatggggatggaagcagtaacacacacaaagggatagatggatggcaccacccccaaccccaaacctcctcactcacagagagaaaagcccaagcttccaaatggctaaatgctcaacaatggcagctgctctggctctgatgagtggtcaatggcttgcaatgtgagagagagagagatggaggagaggggccagccaaagaagttggtggatcctgagctctactgacagcctctgccaccctgcaagtggagagtttgcagggagagagctttggggaatatgtaaggctgggttcttgatttctccctgccctttacccaccttgcacattgcatatttgtgcaatgtgcctgggtactattcacagtcaagaaatgggcaacagaagaggggaattttcttttcttataggggaggtgtaggttttgtgtagagacagaaaaaaaaaatgcttcgcttgtgctgagcatctgagttggtcatttccatgtgacactcggatacctgattctctgatgtgagataatctttgcatcaactggggcaaatctatatgtttcgcgtgaagaaacagtgcactcattctgttgccctggatgaatttgcaccgagtattcataaaattattatttttagactggtcaccggaggagctttccaacctgaatttcggccctgtttagatccgccagttttgccattttgaagcactttttaccattttgaatctaaacactaataacaaaacttgacaatttgacatttgctagtccatagtggtaaattgtgccaaaaagtgctttgggaccactccctctctctttctctctctcactttagtgctagaatggcaaaagtttaggaaacatctaaacaccaactagtaattttgtaataccaaaacttttaccatttaccatttgtcattccaaatggatctaaataggcccttcattaaaaggagaaacagtacaatggtttagttcgttacattggaatgcaaaaggaggaaagaatttctttccaggattctactactatcatgatgtttttccagtatttataaaattataaacacaatatatggtctcctgatgttttttttagaaaaaaaaacacaaaaagactagatcaacatatcttaaaatttataaaatcatcacagatgtctcgttattgataagtatgatacgtaccaaaaaaaaaataattaatatcatcataagaatcctatatccgtttaaccgttaagttacgcttatttcacggtctcttgatgttttgacatttctttaggagcaaataattgtttacaaacggataataaatgtttgttttcagctttacaagactgacggaatgacacgccttaagacggcattttgatatgtaaatgaaaagaactactactccagtatcatatagtcggccggtttggtgtgcaaactactactactactcgtcaagatgccctttgtaggatcaaatcattatgtcatgtggttgttaagctaggcttcatgcaccgatttgcatgaatggataagagagatttttgttggatcaaatcctcgtataaattaagctagctttcttgccaagattcgcatgaaaggagcaggggagatcttttataggatcaaatcctcgtataaattaagcaaggtttcttgccaagattcgtaaagtatgaaatgaggaagaatggaactttatgcccggaattttgggaccatttatttagcgcttcatttgaatattcaattatttattagtcacttttttttaactcatccattcaccgcactttaatttcggtaggggggaacaaataatgttttaacttcgagtacacaatgtacactttgcttaatccgcaccacatggaatacaatttctaatttgggaaaacactacagtataatacaccattttttcaacaggatgtctataatatatattgcatacactttatcctcggttccaatttttctccactctctgactttccttgactctctgaggctactattcctcatgaaagatagtgcaatgttcaagtgcacacagagagcaaaaattagggcctgtttagttggcaaattttgccctggcatatcacatcgtatatacgggcacacatttgaaatattaaacgtagtctaataacaaaacaaattacagattttgtcagaaaattgcgagaagaatttattaagcctagttaatctatcattagcaaatatttactgtagcacaacattgtcaaatcatggcgcaattagacttaaaagattcatctcgcaatttcctggtgaactctgtaattgtttttttttctaaatttaatactccatgtatttatccaaacattcgatgtgacagtgtgaaaaattttgtttggaactaaacaagtcctaagtaagtacacaagatgatatgttgacgaaataactagtgcgtgaacgtttacgcgtctgggccgtgcgcgaatacccgtgtttttcttttttatcatccatgtgacttctttttttttttggaaattttaaaaatgatatgaactgtaaatttatttcatgtttatgttagagtaatttattagaaagaatgggttttgtttgcagtaagtaacaatgataatgacgagaaattgagaactattgaattgccatccaaggtacgaaaaaagtggctttttttttttgaaaatttcagccgcctttgatttctagacatcccaatttcttatcccagacacttaaaaatcgatacacgatgatcctgaaacgcctgtaaacactgacaaaagcccacgaaagcttcacaaaacaccgaggacacacacgtgctacattattaacaatttgaaacaacaaccgttattatccatggtgttagctccaaaaagatcattgaccataccctggcctcaacaaaggaagcccatactctgccttgaaatagtgtcgaggcagatggtctgccggtctgctctctctgctttacattttgacagcgtctcgtctacctccagaggatccgaacccccgaagaaaaaaaaaaggaaaaagaagagtatctagctactatttgccctgtcaaccatcctgccagatggccacagagaagaaaagaactggcgatccttgctggatcgctcctgccactgtaccacagtcggtaggaataagtttactttaggtccttcaatttgttctcgagtctaaaatttatcgtagaatcataatactgtacactctctccgtttcagattacaagatgttttgactttggtcaaagtcaatctgcttaaagtttgactaagtttatagacaaatatagtaatatttacattaccaaattagttttattaaattaataattaaatatatttttataataagtttatcttgggtaaaaaaatattattatttttttctataaacttggtcaaacattaaacagtttgactttgaccaaaatcaaaatatcttataacctgaaacggagggagtatgatgcattccttaactctcaaaaccaatgcaaataaagtcctaagacagtttggacagttggttcggcttacgtgatgcctacgtggcacttaagtcgaaaaaaccgtgagaccaacatatcaacagccaacccatcttcctcctcctctctctcctccctatctctctccaggccaggaacaggttgcgggcgacaagcgacggcggacggaaggcggacggtgggcaacaggaagaggtgtggtggctatggtgggttggaagggtcgtagccatcacagggttggaaattctggaacgaaatttcagaaatttcggaccacttcgatacgatattatttcagtcgaaattttttaattttttaattttccgtgtgttttggtaatatttgttcaaattcaactaaaatttgttcaaaatttcggaaatttcgttgaggtccgatcaaatcggctaaacggaaatgtttaaccctgggccatcatcctctttccttctcttgttcatctctttataggccgggaggcgcgtggcagaggcttggagagagatagggaagatagaagagagaggggggagagagagagagaggaggaagatgtgttgactgctgacatatgggtcccatggttttttttttgtgacttaggttccacatcaacgttacataggcgccatgtcagtcaaaactgatgtctaaatcaccttaggaccttatttgcactgatttggaaagttgatggatgcatcatatatggtattgcggttcaccaatgaatttcaggctcagtgagggacctaaagtgaacttattcccgaccaggccatagcaatgcggcgtgaccgacgcagttctattactactactcgttgtcacctcccctcccctcttctcgcaccatggcggtggtcgaggaggccactggtgacgagctccatgaccgatgaatgaatcctggtggtgtagccgacgagcttctggtagacttgtagctggtggagtctctcctcgcggctcgctcgactggtgggggtggcggcaagtagaaggggttggtgggggcaatgacgagggaatagcagccctcttcctcctcggtctttgttgttgcttccgaagctcatcgaacaatgccattgcctccctttctccagcctccgtgtgccgcttccgtccatcttacttgataccgttgagtccagcaccatcgtcattgaggtgaatggctacgggggaagatagaagagagaagagggggaggggggagtcaccaacatgtgagccccacatgttgactcaatcaattgaactaagtcaacgagtcacatcagcgaaaacatactcagaacctgagtaagtcatttcgcaccggtttctactgctgatggttcaggatatatgttattgcggttgagcgatatgtataagattggacttatattagagggagccaaagtgaacttgttccaaaaaagggcccatgaacaatattggcctctcctagtgacaggccacaggcgagtcgctcgctgcgtgggccgccggtgaaatccacccgcaatccggtcgcctccgatgggccggactacgcccgcgtgctttcacctcacgccggaagttttgtcccgtgcgatttcgattgccgctacacgatcgctagtacgctcccataccatccaccatagccaaaagagtacgagttcttcagagaagataaccactttttctcatcaaccccaagctaggtcgctctcgctcgatcaacgtcctccgaattcgcgtatcatcccgtgctcaattcggccgcaaaaccgtatcgatcacggctggtgcatccatccatccgcccaattaatcactcacgcacgaatatcagcatatatatgccaccaatggccgggccggccacggctcgaaggagctaggccgttagcacggtccatagctacgattcttcatacataatcctctcttcttcatcgtcttcttcttgcagttgcagcatgtccggttcatcctgttgctctcgtgtgtgcgccaggggcgtgctatccatggcaacagagatgagagatcgatctcgctcagtgctatatactagaacctacagccacctatcgctgtagcacaacatccaaaatttagaaatttcccgtatactccctccgtcccaaaaagaccaagatgtgacacattttgtttatattccttgtatgaatgtgtcatattttctattagattggtttttttttgacaaaagaagtaggcagcactgagacctcattctttttaattaagacagttttttttcttgattttcgttagtatgtttttcatattgctaaatggtgcgttttgtgtgaaaactttatatatgaaaattgttttaaattatcagataaattcatttttcaagttcataataattataggaacaattaatcatgtgctaatggctttattgttttgcatactccaagttcatcttcatctttgttagaaaagaatcaccacctgaatgtctgaatccccaagacactgacatgttccaatgactctagggcctagactgtcactatgtagggatgcacaagccgagtagagtagccttgagcagagctactatacaaagacgacaacatcgcgatcctcttctactgtgcatatatcgtcttctttggagaggagaaacgatttttttttcttatctgaaaagggtgcttgacaaggattgggccgcggaaagagggcgcattgcatatacctgcatcgcgtgccttcactttcacatggattttcgtttcttgaatctgctgtggagtgcctggcactgcagctggatcagtcaaccaaccaaaatgggattagtttgaacctgaatctgaactagtggttatactctagctaatcacctgttcatgagtcagggcatgatgattgatgaggcagaataagaaaaaggaggaccttgatagagttggaaggcacttgctcattttctgtccttagcttcttcagtttctctttcagaaaaagaaaaggagggcttctttgttcagtcccttagctttggaaaattaggcgcacttgggcaaatttcagtggtgttctgttctcatcttgtttgcgcgttggatggctatggattggaacgtgtttttatttattttgcttttctattgtgtccttgagaaaaaaaaagctgagatattggtcgcctgaaagagatttatctgttttttagcacagccctgccttttctaggagcctctttttatggttagtgtaatggagcatgaaataggccacaagaaatggctgttctgtggctcagcttacacagtgatccagctaatcaacttactcctgcaattatgtgcatgatggtaagctaaaatcgcaagaacagtaaattggctgaaaaatgagaagtacatatatatatatgagaatttgaactctagaaaataaaacacaagtgttcatttggtgcggccaccaagatcaaacaagcaaacaactaggtcaaaatgataacatcgagtcatcatggcaaattttcttccaatgggtggttttgcttaatcttccttgtctacacatgggaacaatccggagatggatccaatgtatattgctgtcttttcatcctcgacttgggttgattgaattccatttgtccactggacaactaaagcactctttattcctgatgaaacaagaatttctccatcattctagtcatatgacggcccaaaaggtcctttaatctcaccaattcagatatagccacatggaatggttttagagttgtactgcaaggatgaaaagggttctcatcactttcacgattacaattgatgcatgccaagacaaccttgaggtctattttcttgttgatatcctctagctgcctctaaaatttagttagtgcacaaacaatttaagagctctacatcttgagtgattttccgcttcttcagacgctgcaattttgaaactacttccgtcccataatataagcatctttagagtttgacacggatattaagaaaatatgtataaattaaataggggaaggttgtgattggttggaaatagaatgttggagaaaaagttattatattttagaacaaatcttaaatgctggaaattgttatattttggaatggagagagtagtttatactagacggtataatttatactgccagtataaattaatgatttaagggtttagattaaattatccttcccacttaaatagattggagtatagaatcaaatgggcgtaaaatcatctttctatacttagttcatggaggcaattatgaaaaattgcattgtatatatagtgaaacaatgctgggcatttcccctgctcgttctcattccctattatccaccgtcctcattactatggtgaggtgccaccagccacatccagtccacatgcgtcgtccgtcagctaacataggatggcgatgagatgactgatgggatgttagggactaaaacatgaaattactggaatgctcttttcaaattttgccgtaaatttctaaagtgtccttgtatgacaatatatactactcccttcgttctattttaagtgagtcataagtttccgtatacaacatttgaccattcgtcttatttgaaaaatttatgaacaaattttaaaaattaagccacacataaagtaatatttatattttatcatctaataacaataaaaatagtaatcataagaaaatttcaaataagacgggcagtcaaacattagcactgaaactcataactgcgcttattatggaacagagggagtaacaaaaaattgtaccgtaaaagttctttaatttttacagttaatttgtggtgcctcctaacatgtaaatactatgtaaacattagggatgtactaaaagtttacgctaataagaaatatagtacctgtttttcctcaaagatacatctttacttcacgtacattatctttttctgtagctggtggaatctggtttcataccttgcaacattttattacctatgcatctttagttggaacttttctgcacattactatacacatctagcagtcccttggagattaatcatataatattgtgtccttcccaattatgttaacaatcatttgtctctttttgttctcttttgttgctttgtaagccttgactacttctctttagcctctttttctccttctgtttggtgctgtcggctagctaacatacacatcaacgctttgcagtgtagcagccctagctaagatgcaatggttcgttattaattaagtagtgatgcagacccaaaaaggtgtatatatatgttattactaatatagatctcactcaggttacccaagaaaccaagagatatgtcttgtttaattgaataatagaaaatctgaatcgcgtgtcaatttagttacaggggaaagtcttgcttctcttcaagttgacatgacaacacaccaaagaaatctacacagttttgtttacctaaataaagaggttttggccaaaagagtaaacaaaacaagtataactttacaagcattatttgccaacttgaagtccaaaaatactatattataattccattccagtgccactctgtccttaagtattaattcgtcgcaaagaaataaaatagatctttgagacaaagcaatggacagtggacacttcctatagtcttgtcttgtatgcatacggtttccaaattatagtccaaaagataaaggcaggggagatatccttgactattttatggcctatcccagatttactgattttatagtccaaaagtagtatttaactattaaggttgagtgctatgtcactttatatatccttcatttttagatcaagttaaagctagctaaccagcactgactctggtcttccattgtttaactagatcgtatcctgcctgaaggttactctgtgacccaaaagagacaaataatacgataaataatcatttactccctccatttttaaatatcaatttaaaatatatgatgttgttggcttggatataatgtttaatcattcatcttatcttttaaataaaaaattatatcaatattatttattttattgtgacttgtttttcattaaaggcagtatggcttatattttgatgtttgcactattttttttcaataggatcgaccaatgattcaatgtcatgtttaggtatgacgtatagtctcttgttctccaccccttctcctttgtgcacccattctcccattctcctattgtcggctcacatcctttccccgccatgtttgtaacgattttctagcaaatatatataggcacatttctttgagtctaccgtgcccatattgcaccatgccttgaaagcttcaagcacatataagaatctctcttgtggtattggtatcctatatatttaaatgaaaaatattataaaattaaacatagccaagagcactccgacccattgtttttcgtcccaacaaaccggcaacaggccataaaagtcattagcagagcacgaaacagctcaacttagatgataattaagaaatatcccggaaaaaacctctcgcgtcatcctcccctggggcggcacgggaggcggtgaccctgccgcccctctcctccccccctctgcctcgccgccgcctgagcggccgtcggcaaagccggccggccgcaaggacggcggcggtggggcctctcgccgaccatgcttcgggcgggcaggggagtcgtcctcgaccggcgacggtggccgccagatccgggccgctccggccggatttggcggggtggcgactggcggcgggaagggcgacgacgaaggaaggggcgcacggtgttgggcggcggtggtggaaggcggcagggatggcgtttgctgagggtgcgaaggcggcggcggcggcttgtgtgcggcgacggcgcggtgctaggcggcgacggcggcggtgtcccccagatccgcgcctctcggccggatttggcggggtggcgactggcggcggggagggcgacgacgaaggaaggggcgcacggtgttggccggcggtggtggaaggcggcagggatggcgtttgctgagggtgcgaaggcggcggcggcggcttgtgtgcggcgacggcgcg

SEQ ID NO: 29253 - DNA, 11261 bp, Oryza sativa
gggcgttcagcaatagtggttcggtgccagtgactgcggtcaccgaaggcatgccggacttggacagcttgccgagggtgtggcagacggctgcatctggccagcgcggcatcgtttggtggaggggtcggagtccggcttggcgcagagaggcgcagccgatggagggaggccggctcggcgcgagaggcacaggcggcgaagatggaggccggattggcgcgagaggcgcatccggtggaggaggctggcttggcacgagaggcgcggctagcggtggagggggcgacctaggtgtgaggaggagctgtcggtgggtgtggcgtggtcttcggcgctcgaaggctagccaacgggggatgccggtgcaggggtcctacatgtcggcagagcttgtatggtggtggagcttcggtgcgttagccgtggattcgcaggtggtgagcggtaggtgaaaacccagtctggcctctgccggaccgacaacgatggttcattccccctcctgagggcgttgttgtgttgtctcacccctcaaagggtggttgccgggtgaaagcctagtcttggctcctttgagtcccgacggacggcggcggcggtttctccgtcgcttctcttcttgaagacgtcgttttggcatcccttggggggcgatcccgtctgtgtccccttgttggtctaatgacggtcagtcacgcttagcggtggccggtccggtactagtcttctcctgggctggtgtgttggcgatgtcggtgtgtgggtggtggtccttttttcctggttacgaccctccagggttgtagtcttgtaatgtttttcctgctctatcaatagaacttcgcaccgtttcgtgcgagtcgttcaaaaaaaataattaagaaataagaaatgcagtgtattgtttgatgatggcacacacacgtacaacatcacacaaacaggagaaggaaaacacaatttgtatcaatttcactcctattagtggcactcatcaccaacatatgctagcttgatagctaataagttgaggaaactattagtaccactgtatatcatcagcatttgcatataactggatagtgttgtctgacgaagagtcagtgcaggctgtcaagccaatgagaaatcggctaaacactctctgaaatgacctgacaaatcggtcaaaaaagtacggccccgatacttccaatgtacaaatagaacatgtcacattttttttccactagcaatagatatgatactgtatgttcgatcaaaagaagaggcagtagaccagtagttgccacaattttatctgataagatctgaccggatattctgaatgtgaccctgctacacggtacatattgatatgctgcgcaagtgaaagccagtcactcaatcatatactcctctaagatgtaatccaagaaataccattaacaactatctaaatccaaaagaaaatgacatcgacaaatattagttccaagaaatgccatcatacaaacgattttgtcccaaaaataccatccgccattaggattccacccattccgcattgttaagtgctataggatgaacaatatatttaacgcttgtcaatggcattacttggattatctcataatttaattgattacatttcttagataatggtatagtgtttatgttttgtagataatgatataaagagattacatgagagaaagctatagacacatataacgcctttaatttacacccccacgcttttgttgcttcagatcgttgaaatgaatagtcaactaaaaaatactcctcgtttttttaaatatacggtgtcgttaacttttcaaagtatgttttatgtttaaccatttatattattttaataaatatatgattaattttattttgttatattttatcactaaaatattttaagtatgacttatatttttacatatttgctcaaaagattttaatgatacaaatggtaaaaatatgcttaaaggtaaatagggtcataaaataaaaactgagggtgtatagttttataaacttggaaagtataaaacttctcgtttctacaccaaataagaacgcatacacgactatatttgttgatactagaattcgaactaactggagcaaagtgaaacttttaatgagaaaatatcatgtgaaaacaagttaaatgttaaaaactcatgaaaattatatctaaaagttttataaattcataaaacaattactagagaaaggtatagatgtgaaatacattctcaccaaatctcaagtccaaactcaactttatttgagagaaataaaaatgacaaatttcaggtgaatagtagcatattactattcacccaaaatttgtcttatttgttacccaaaataaagttgagtttaaacttgatatttggcaataatgtatttcataaccacacctatctttaatgtttttttcataaatttataaaaacttttaagtataattttcatgagttctcgttttcactgaatatgccctcatttttaatttgttcaaaagcaaatgcacactatgtaaaagcaccatagtcatttctctcaaaaatttcctgtgtacctctcttgacattctatccacgaataagagcaggggcgacgctacagcctaccatcggggtcagtagaccccgacgatttcatgcatacatctagtacccctcgcttttttaccagctagaccccagtcaagcaaactactagaccccggtgacaccgtttcgttaaagcccaatagcaattaggaacgagactagtaagtagaaaatagaaaattaatcagctcttaaacgcctgagacttgagcccacatggccggcagcccagaaagtccattcccctgttgcatcatattcttctggtagtttgaccgagcacttcgcattgcatcgccgcacatctcgatttctcgactttccgtgtcttctcgtcctcgagtagtacacgcgtgcatcgccggcttggcgtcacaaggacgagaagaatggcaagggtgaagggttatggttgagcgctcgagcgctcgagctgttgagggcggtaacctactaacattatcacaatttcttgattattaccatcacaatttagccctagggtggtttctcaagtccgaaagtttattaggaagttagggttctataattcagaagttctgaaatatgaacatttgatttgtctttgttttcaaacttcagttatatgatcatgagtaaggaggaggattaatgtataattttgttccatcttacgcatagttttagtcacactacaaaaaaatggtttttttttctgacagccacccctttcattttttgcaaatggctagcttaaacttaaaggctatatctgtgaagattcatttcaccatgtgattatcgtagcaccggtcacaagcgaaaagatctttagtcataagcgacacgattggccacctgtaaaaatgtgttttggccatttacgataaacctgttcatagtagtgcaagttcattagttagtagtgaccccggcgatgatttattctggcttcgcccctgaataagaggacaattacaacataaacagttctctttcttaaaaaaacactaaacatgatatagtcaatgtctagtgtggatataataaaaaaaaatcgtgcagcataagaattggagctacccttagccgcccatgttgtgatagttcaatatttttaacatattatccattatacatctcaatcgtactacgtacgcacacttaatatgtccttcatcacaaaatataaaaatatttagaaagtgctaagtcaaacatttttaattttgattattaataacgaaaaaaatagaataactcgtttatcattagaaaaactatcataatttataacttttttaatttcaaataacttattgttataaatattattggttgaaataacatctcgaacacctctctagagttaaaaaatacttatattttggaactgatgagggagtaatacatagacagtaaataaaaccaaagaaaaattaaattgcctactcaagtcaagatgtggtgacatgcagggtgtgacctccacgccataatccacacaagctggactaatcgaagactagcataataaaactactagtacgtaatagatatcgctgagctagcacatctcgaaccacttgccccattaacttgcattagcaaaacctgtcataaattaatcaaatctgcagataggacgatgatatatttgatactatatccttgggtgtactggagaaatggtctacggattttcggctgtcggatcgagatctaacggtcacacactgatcaaaagtcaagaggcagggtggcatggtggttagtgtctcgccatccagtgatcagccatgttacctggaaactttttaaaattttaattttaagtaagacttggcaaaaaacagagggcacccattggatctaattagggctcatttggattgagggaatttcaaaggaaacttattggattttaatccttggaatttatttcctatgaggttctttaaaacaaaggaacggagtttgcatgcaaattatatgaattgtttcctatgccttcattccataagaaactaaacgtgtgctcatgttttcatttcctttgaaaagtccaatgctcttattctatttctatctctacactcatttcgattcctccaaaattccttgtcatatttcctgtaaactatctaaaagcattgcttctaatgttcttatgttctgaaatactgtaggaggttctattgtgtatgccattttattcatatatgatttccgtgttgctatatttatagaatcctagttccagaatccagaggatattacttaaatagtttgatcctcttgtctatttcttgcgttttgtgcaaatcaccagcagattatatgaacgtaatatcatgagaggcggagatagagtacggcagctagggttgcaaccctactccttagcctaaatatacattgaaattacactttaaaattttaaaaattagaagataaaggtaaaattatgtaaagtatactatttgagccctatgcttagaaagattctggttccgccacccattatccatgctaattaatttgcatttagagatcatgcactttatagacaagcatgcatggaaccatcaccatatccttagcgagattggagaaacgtgtaatattgtagataaaggcggagaagattgaggctagagatgtaatgcatcttccattatctttataaaaatccagatgagattattttatttactcttttcagaaataaaaagaaggccaatgttttaggtagataagctctctctttaaactctttttacgtggattcatgccacagctcacaaacaacgtacgtatagcccaattgtccaaaacaatgcaatttgcagtgactgcatgcgtgttccacaccaaaactaataaactctacttactaatttgtgaaaagaaaatcccaattttacccatgcaacgattaattaatcaccaaatactaatgtcaactctgcaaggacaaaaggggcagtttagtcatttgggtcgcggccacagcaagtggccgcctagtacaaacagcgggcgcgatataatacgcatcacccgtggccatttgatgcggatttgctagggctttgaattttttttttccgctcgatcgagttcgcttcgaattcgtataattaagctaatataagctaattaagctcggggatgaagctgttcgccttcgtgaggcgctgccggcggctgtcgtcggcgccggtggatcaggcggcggaggaggagccggcggcggtggcgccgcccgcggagaagcggcggaggaggccgtcggggccggcgtggaagccgacgctcggggcgatctccgaggacgccgcggtggcgtcgtccgccgccgcgaaggcgaagccggcggcgaggacgaaggcgaaggcgaaggggaaggcggcggcgccgccgccgccgcggcgcgtggtccggtcggagtacgacgacttccggtgagttttttttttctctttctccccgcgcgcgcgaacgttagcttgggcagttttttttggccgttggatttcggtggttcgagggatcgggacggataggatctcgacacgtgtccttcggcgcgcttctcccgcgtcgccggacgccgtggcgcgtacgtgtcgcttccaggtgggccacgggtgacgtggctccgagtcaaggtcgtccgtgcgtgcatatgctacgcagttttgacttttttgacatttttacctcatcaacttaatcctctcctgcagcttctttcttttggatttttttcctttttttgggggtaatactccgtagatgatactacgtataaagacaaaattgctgaaacttggttggtttgatcaacttgcgagttgcgttgagtacctaattagcaattggatctcgcagagagtttgactccagataagagtgagtagaaaatttaaagaatcctaaattaaatgggttcacagggatcaagcttgccaggtcaatgcactttttttttttggcaactagcagcttatacagttgaactgttcatcgcagctcatgattatccgtataacctagccatgttgcaaagcgtaacgctccatcatactttgacgacgtctagggttagttgaaaccgtacatattattccaaagacacataagcaatacctattgtggaaaaaaaaataagtgagtgaaaattcataagtcttgttttgtatgcatgaattttaagatgctcatgtcacgtcgagatactgcagaaaaaagactgcagactcatccggtttttcaatttccattatcacaacaaaagaaaattgacatactcatacggcttaaattaaggaattcatctctatagttgaatatcttagcactttcaatttgtgtacagatgttaatgatgttacagattcttagcattattaggtgatgtctaatcgagtactaatttattatatgttatgtaagatggaaggagtagatggacacttcgaaactcatcgcggttgccccttttttttctaataagttattttggcttattagaaaataaaaactaatttatagataaaacttttatatatatttctaacgatttaaaagtcgatgttgaaaaataaactacgttaaaaatatcttaaattaactttaaaattaagtttaaaaatttaaattttagcttttgtttgatttattagggcaactctctttaattccctgcaactagttggaccaccgtgtcctaacaatggaatctactatgtatatagacaatctcaattctcaccgtccttgtcagaatcaagaacgagggggtcctccacacgtactaatttcctcccttttatcgctagtgcatgttagtcaaactcaagctatagtacactggcccagatgacaagtgaaggccgtgaaactcttcccctgatcacttcgtgcctgctaccgctactacttcttgtccctcacatgccattatggcaaaaatttcaacagacacccatatgttcaaagttcaaacatagctgaaacttgcgaaatatatccagattcatatgcatttcgtcccaaaatacataaactttaaaagttacgaatctggatatgcatttatccatatttatagctaaaggttgttatattctgagattgatggtagttacttttgtggcctagttatttttagcttgttcactaaattattgctgcagattatttgctttgcgtttctttttctattttattgttcaccgttatttgcttcacatggacaaaataatccgcggcaataatgccttagtcactctctctttttttttttccttagggggagggggtttggggtttctattaactggtactccctccgtttcacaaggtaagtcattctaacatttttcatattcatattaatgttatgaatgaatctagatatatctatctatctatctagattcattaactttaatatgaatttaagaaatgctagaatgacttacatatgaaacggaggaagtaactcacaatttagccttcattactggtaccgtggtactaaccaaggtgcatctctgtgtctctacctgcaggcactacggggcacccacggtgttgccggcgttcgcgccgacggcgttcttgttctgagctcaactccggtggacacaagtcctgtagctgatggggcgctgtgtgctcgtagtgtgtgtgtgtgtggtttcactggcttgaccatgacgcctctctagtgtgtgtggtgctcgctggcttgaccatgacggctcagcttttgtgcgcaaagatctgaacgaactcgcaaagctgattctgtaaattttccggatgcttctgatgatgtgcatataaatctgctgctgctgctgctgctgctgcccgatcccccccactcgcgtttgtggctttcggtttccatcgcctttttacgattcctgatgttctcctgcatgatgcgtggatatgtgatggaacgagcagcaaattcctcttggttcaacgatgccgagacaagttcatctttttgatagttcgattgctacaacgacaaataatcaaccagaaatctcgacggttttatgcattacagtgatctcgatggaccaacagatacgacaagcaagcaagcaagaatgaacaactattatgtcctttactatagtgaaaagaagaaagtataacgtgctaatgaagtaccgggaaaccaatatgctgcatacataggcatagcactgatctggcaacatcttaaaacaagcacaccagaaacatatgtggcacatccaagtagcagcacagaggttgcaaattattccccagcttaaatcacgggtagcaggctgaagaatagaagcacaaatagttcataaattctcatctctttgttatcaagagtggaaatgagccaccagttacgagatcagcacccctcgtgtgtcgccatccagagagcaacaattgatttttttttcccatgatggaagaatcaaacatgaagataaaaccagtgcgcttcggcgaggccatggtatttgagtcgtgccatcatgggagcacagcgtgcatgtgcaatgaggttagtaaccgttaatctttcgctgcgaggggctagagtgtaatgcccggttgtcagtgagccttgagaagccaacctgatccctggtccctggactctggggcactttagggctaggaacacttgtcaagcgactctgaggcacagtatcagacatggacttcgagaaggcttgtgcaagctccaatgcagatgctcctttcccaaaacgaggtgcaacaacctcaggctttggtggctcaactggcttacgccaggtttcaggctctggacgctgttgctcgggcttctccacatctctagcaactctcctgttgtcctcccgtcgtgtaggcctatacacatcactccggtctgtatcccgcctgtagtctttcttatcagcattccttgggcctctagaaccagctggaaaactctcagccttttcacctgaagggttaatggacatagcttcgaccttctgctcaccctttgcaaattcacttttagacctggaagatgccacaaaggttattagcgaatgcggtacacatccaacgtatgcatgctatagtaatatctgcagaaaaggaacaaagcttcaagaaaatgaatctcgtaaaataaggtaaaaactacatgttttctgtcaccatcctttcttggcactccaaaagccaacttcgaactttcaaacatcagaattagataaaaaaaactctatgcaaaggaaaataatacacattcagcttaggaatgttgcacaaacaagcatgttgtttcacaccatcatgttagttgctttccgaaaacacaacagtgcaacttttactatcttaagaacgaaagcccaactggaagaccaatcactggtcctgcaattgtaggtggccagtaaaatcatgtcacaatgaatggaacattaactatggtccagacctggagataccaggatttcaatattaataacaagcatgaatcaggaagcattagatataaaaatgtaattcaagccaagtaaaacgttgattttatctgaagggctgtatgctaactacctgccaactggagatgtcttatcaaggtcacttgctaaagcatctattccacgctctctgagaacctgagtttatgaacaacattaagtttttggtaaagctaggaaaaaaaaaagaaaattacatatatgcaagtgcaacatgaggagagagagagagagagagagagagagagagagagagaggatcgcatacttgttccctgggccgagctccaccaaagagggattgcctaccacaatatttacaaaaaatgagagagaagatattgagaattactacaggaatgaaatagagaccagaaggacaattcttactgaacagattgaatgcaagattgatagctattaacttgtgaacaaatttagcaacggtataaatcttgaaaacaaaaaatccaagattcagagattgggaaaaaaagaatggggattcaggagccaaattaatgacagtagaatctagacgcccttgtacattttcactcactcattattcacatggatttaaaacatttttcacatccactattcgtgcagacaaaaagaagcacagtttatttctattggagcaactaaatgtctataaacatgttacataattcgttccacatgtagtgtgcactatggaactaaagggaagtggtttgccacaagtaaataataaatcaaacctaaagggatccctattgatataaactcaccatgataggttaaacatgtgttatgcccttttgttaaatatgagctgcatgcaattgtcaacaaagaaaaaagaaagatgacctccaataatacaatactgcaaattgctttagtcctccaacaaggtagaatccaaaacaaaataacaagccattcttaatagcgcacagcacaaacatgcatgtggaaatgtacatactgaatgcaaacaacgaagattaatattccaatctaaatgcacctatttcatattaacaaagatcaatcaaccagatggatacttgtaacctcaacatttaacaaaacataaaaaggtgcttgaacaggccaagtg

SEQ ID NO: 29254 - DNA, 8022 bp, Oryza sativa
cctatttcatattaacaaagatcaatcaaccagatggatacttgtaacctcaacatttaacaaaacataaaaaggtgcttgaacaggccaagtgtaccacacatatggcaagcaaccaacagcataatccaaatgataaaaatagacgtaacattcaagaattagttgaaaagaagggaggcgagggtggaggagggggctaaacaccacctacctttcctttggagcactttcatcagactgtcctactgcattggagcggggtttcagattcaatcgtggtcgctccactgcccggccctcagcatctgcccctgctactcctgctttaggtgctacaacattctggtgcacatcatgaataacgtcaacctgcacagtattcgcgaccactggaacctgatgcacctatacaatagttgtccaaaagggagaagattaaggtttcaccatgccattgcatacataccatatatcaaatcaagcaaactaagagcaacttaataagcacaaagcaacacaacacaatcatgtatcactttgcatggagatttgcaaacatcatttgatgttaccgctggaaaacaagacaattcaattttcaatccgatcaacacacatgggagcaagagtaataacctgcttctcttcaacatagacaggagatggttctgaagcctcgattggcttggagcgaggaagcagcttcaacttaggtctctctggcagcacatcaccaaccctaggtctctctggcacatcacccaccctaggtctctcttgcacctccaagcctctagcctccccaaccctgccttcatgcgacgcaggcctcactggcgccacgctcctctctatgccaccatccagctctctcaccccgactgactttggcctctccatctccggcggtgcaacatgagtctccaccaccactgggaccgacacaggcgccgccggtggagaggagggtttcgacgagttccacctcccggagatcaccttctccacggcgctcgcctgcgcaatgcgcgtcgccgaccagatctgaccaccgccgccgccgctggcggcaggactcaccggcgccgcggtcggagccgcctccctcctcggcccccaggcgttcccgggcccggatctggtgggccccgcagccggggatggggcgaacgacgggggcgacggggccgggcggcgcggcgtggaggcggcctctaagggcgtgcgctcgtcctcgtcgaagtggcggccgatgcgggaagggttggtgaggaacgacgggaccgcggccgccgccgccgcggcagcggcggcggaggtcgccggggcgcgggggcgagcggacgccgcgggagcggccgcctgggaggccacggggcggtccgccgggcgcgcggagctgcgacaaacgagagttaacatcactccatcacctacacgggtacaccgaacgacgaatcgcgagatggggctagggtttgggggtggaaacttacacgccgggggcggaggggagggggagctcggaggggatggagccgccgtggaagtccttgagcgtcatcgtcgtcaccgccttcttcttcgacatggcggcggtggccggcgcgttcgccgtcgttgcccgaggaggacctcgtcggcgtcggcggcccgccgatgcttcgcccctctcgacgacgcgacgcacggggttaggttaggccgcgccgcttgatcgggggggttccaggtgtctcgtccgcgcggcgctctctgctctctcgccttcgcaaatcgcaagggggagggggaagaggagggggaggagggtttgtgccgcgttggatggggaggaattttttacgagttagcccctgtggaattttgtggcgttgcacacgaggcggcggtttagattcggcgagagtttagggggatttttcgctaatccagtttctttagttgggctgggccgagtttgggtgtgttgggctgttgcctgttggaaatggaacgaggtagtgataatttataatattaattattattattattattacaaaataaagtgcttgatacaaaattattttataaagctgcaatcatgcggtatgccttgtctaatagacggaggaataatgttaggttaaaggttgccgagaaaaataagtgataaattctggtgaaatctgtcaaaaagaaacggcaaatcaagatggttgatttgagtatctcctgagatccatcttgggtagatgttactcttactcttatcttcttatgtaccagatttctatatttggtttcggtatggggaaaacttggtaaataagtaaatcaatcaaagcttacgagggaatggcatcatcatcatcatatatgtagcaaataaacatggaacatgctattgttctttattcagacaccgaacaattaactaatcatgtataatatagaagtttgctaaattaacatagacactctataagggaatctctcagtcagcagagcccaacacttccaagctccaaacccagaaacatacaaaagcttcttctgacttctgcaacttccctggtaagagtaatatgcagcagcacaagaacagagtcttcaggatcattctttccagccacaacatcgcagtccttacttcagcttgtggatggtctccatgtccacggcctcgttgagggtgcctttctcgacgtgatcccaccagcccatgaggaagttgtcaacaaccagccggaaccagggagacagcttcaggccttcctctccggcgtccgctttgcggatgagctccttcagctgctcacggctcacgtatttcacatcggccacttcgtccgggttcgggactaccttcacgtcgcggacgatgaacagcaggtagtcaactgcagatgagaggtaagaaacaggtttcagtgcagggcggcataatgttcgttcttacacttctggtgaagtatcccgaacagtcgtatctatttgtgtaataatcgtaatgatcatataattggcttatagaaatgagaataacactaaaggttgagcttcaatgaataaaaataagtgtgcaggtaattaagtaaggtattaaaactaaaacttacgctcgtgttcaccccattttccatcagatggggccttgtaaagcatccgaccaagaggggtgaattggtcaactggcacatcttcagctgggatgcccagctcatccaagagcttcctctgagcagcatttctaacacctggagaatgataatatgttactaacatcattgaaacagagcagaaacggaagaatagttggcctcaactagccttttttttggcacataccaaggtagttttcctgtataagctcagactcacggtacagaggatggctgcagcaagtgttggtccaaactagaggaaatgtaacctttgttgcagatcgttgctggaaaagtagaacagataatcagcagatgttttgaagaataagatggcagtgctagaaatgagatatgaaaaataacttccagttgagcatttgaagaatatgaatatgcgggtaatttgtaaacagaagacattttgaaaactagttacgcaaagagctatgtcgtaaatgtcatcacagacacaacatctacaagtctcagaaaattgcgcgcgtctgaatcatgagcgcaaaacctaaataccatttgtttttctcaagagtgatttaaggcacaaacctaacttccaactggagatcctgtgttactaactgctatggtaacttgacatgggagcacagtgaatagttgtatagaatatgtgccaggtgcaatgtaatacaagattaaaaaaaatggaagtgcagaattagtaaattctccaaacctggagtaggagttcatattttgagttgaacaggaatacactgaaagccctatgaagtagattttcagattcgattttttccatcagatggcctgtgtcaaatgaatcaagtcaagtatcgttccaataactaattcaaaagaatgttgggcacaggatttgaatagagatgcagataacaacacttacagttatattttgattcatggccaacaacattgtcttgttcatccaccaaaatgcatctgtgaaataacaagaatgttacttacttgaatatcttgaaactaatacttataaaaaaaacatagtcgtatttactgaattctaaatcattaaaaatgtttacatggtttacaaaaaaaaaatagaccaattaagcaactagacatatatcgtacatcgcttatggaacttgcattatacggccatcacactcaagctaacattggcaaagacaggatagcaaacctgaaattatttgttgacataatttgggaaaagaatattgaatagaactaaagcaaaaggtgccatcagagattattgaatacagtaggtacatgtgtttaccataatatttacatataaaagggcattcttttgaaccacaggaggaatctcttttcaaataaatctttcattataagaaagggaaaagaaaagcatcgcattcgctccttccatatgatctttaatagctgttgctaagtcaaattaaaagcgatagggaacatcatgcatagtcattcaaacagtacttttgctgatccagtacacctttcgctgatccagtacaccgtaaattgaatgaggcggctaaaccattagcttttcctacaaccatctgaagctctgaactcatagaacaataattgcacaagtgacaaacaaagccaagagagaccgttgagttgaacacatcaaaccaaaccaagtcatgactaggttgccatataatgagaaattacaaatccacacacaagcaaagccttatctttgacctgcagtatccagtcacatcttgcacagtattttttttaacaaaaagagtatttagcgcgtatagcatttgctaaaacaacaaaaggaacagtgttctagccaaacattgcccacaagtgccctcccatcccatggccaacccagaaactcccacggcataggccccgagatctaataacactgcgaacaagtgagactaagcaagtgaagttcaaacccaaccaaaaatataacccgcaagtgaattttggccaccgtgaattttggcgttcgtttatgcgaaacaactaaatttcaaatcccaaatcccccccccccccaatcaccacgagatccgatggggggtggggggcgcaccgaccaccagaaacccagactcgcgcatctcatcaatcaaaatttctaaagccaataacggcgcaggagggaggggggaggggggggggttcggggcgcgcttactcgtcgtcgaacatgagccgcttctggacctcgtccatcccggcgtcctccacggcggcggcggcgccggccatgcctcgcggcggagaaggcgcggccgcctctgcgcgaggcaaagggagagtgtgtgcgcgacgcgaactgcgaagaagtgtctctgcagccagcggcggaggcggaggcggggtgataaataacgggtgggccggccgggccgggcctcgcggacggcgtggtggtggtgggcccacctgtcagcgagcattgtacatttgtacaagtagatctctgtccgggtcagccacgtgcgtgccactaccatacgtggtgtttttttttttttggctcgcctcctctcacggtcgctgaaaggtggggccaggagtgtgatctgggccatctggctgagctcgtattcctcgcgcctcttatattattttcgggaataataactttttttaaataaaatgtgttctcttgtctctttatgtcagaagaatcacatggttacgatgactcgtgttggatccgatctgtgaaaaaaaaaatccaaaaaacaataactactagcgtggagcttaaaacattgccaatttttgtatttccgggcaaacaatttgccataattttgataacagaccacataatcgcaaaaccggcaggcgctgccaattatttcgcgtcgggccacagattagtaaggagtaaaggaccacaaaaatgcttactgaaattgtcacaacagactaaacggctgcaagaactggctagcgctgctaattttggtgtaggataagcccatctaattaacagctaccaaaagttccctcgttaaaaagcatacataatcgaagatgcttctagagttgagtatttttcttcctcatttatgtcgggaacgttaatttgtggtgctagttttttctctcttttttttttcatataattgtggtgctgatcctgatggaacacgagaggctgcgaggagactagaagcagctgggctagcaaccggggtgcattagcaaaccatcgccgccatgaaattggtgagtatattatctaaaaataaaatattgaaattggtgagtgactggagcttcagctaggaaatcttcagaattttcatttttgtcgtgtccgtcgcgtcgtcgctttctcccaagtttatggatggcattctacactggactactgagtactccacagatgcagctactcgacccttgcggtaaaagattgacgctacttgacgctgtgcccgaataactaaaaaaactttattagaaaaaagagaaagaaaaaccaactgtcaggttgtagatttgcacacttctcaacagaattgaggaacacaacacagaaacaaggggaaatggtcattacactggtgttccaaatacccattggagaatcacatcttacttgtttggagcatcacaatgctttccattaactaaaccagtatctagttagtaactgtattgagtccactgttcatttgcctacaaagcagtacaatctaaccatgctttcacataagaggaacgacagaaatctttgtacagcctcaggaaagacagtaatcacaaaggaccagggtcagtaactgctaaatacattgaaggtgtgtccttctaggtcgtctcatcattacatggttcaaggcttcaagcgttgacattgggagaatgcttactatgtcaaaggtcctccccttcgcacccgaacgcgctcaccattgaaatgcatgtacttgtacttcttcaagtatttctcgaggacaatcttttctttatcttcctggcctaaagtcacaaatgctcttccgatccttcttgttgtatcctcgtctggatgcacccctagctcctccatgtcagcatatatctaaaattggaagtagttattagggaaaacaacccccaagcaaccctttagggaaaaaagaagaacctacatttcagcactaaagcatagattgactcacaatgatatgatcctttaaaaaatgtacatatgcaaatgaatataacaaactcaattagtagaaatgaaaacacaaattaaaacatcaagaaaaggttaaaaaggtaaatgtcacctaaatctacaggaaaaatataaaaaagtcagataccacctccaaaaccttgtctggacaatggcgggtgtcatatatcaggatcatccgggaaaacaacctcttgggtactgaacgtgtatgagtttgtatgatattattccaaatcgactcagcctcatctatccttccatccataaaaagagccaacagtagtgtatcatacgttgtccatgtcagcacctggcctttgctcatcaaccacttggctacctgataacagcaacaaaattgaaaggtaagtgagaaaatgagcttgacatcaaaagctgcgattactgtactctcaacagactaacaaggagatataatctataataaccttacctggatgattctcagccattgtctccgccttttcaacatttccaaagcttttgctgctgcaatagtagggaattcgggctcaaaggcagtccacttatccaatgcaccataaccagcttctttctcatttggtaactttgaaacctaacagatagtattccagactgatttgagacaatttcagtttcttaagcttgagtattctatagtgtcac

SEQ ID NO: 29255 - DNA, 1068 bp, Oryza sativa
  unsure (1)..(1068): unsure at all n locations
ccgcgccatggatcgcctaatcgattgtacagagttcatcaggatctgtgtatgaaggagctacaaagtatcagccagcctctccctccttctgggttcccgatctgggaaggtccagtcccaacccaagcctgctctccctatgggcaaggtcctccttttatatttcaaggggataccacatgcacccctctctctttttgtgtggggacttatcctatcttttcataaatggacggagatttgtatggttgccgtctgaatgaccttctgatgggacagcccacacctacctccactttcgccggaagcaagcgcgacgtgggaacatggctgtctgctgacgatatgaccagtgtcagaccggtcacaaatcggtcattcttgtccaccacgcgtcagtttatcaatctgatgttcgcccttcttcatacaatatcttgcctgtaatggttaggatgaagcctggcatatatctgaccggaaccaacgtgccatctccaggaggtaacacgccggctccggctagggacgagtgcttggaggctctcgtcctgacgggatggggcgaggcgtgcgtcagaccgcctgtcgccacctaacccacgatctgaccggtttgtgactgatcacagaccggatgaacgagcgcgctgtactgcattacgtgtggcgtgacgtgctcacccaaaccgcaataaatgcggttaggtgagccccgctgcgctcacctaacccatacacgcggcgcaaaacccacaaggggtcggggcgcctcggccctcggggccgaggcgggagcggtccgaccccctcggggagacaaagaggagggcgaacacatcaccctcgggcccgacgccccccgagggtgccaggccacgtgggcgattgtgtctgcctcaagcctctagtcatgatactcccggtcccatgtcaccgacaaaccgggactaaagatcatctttagtcccggttcgaatgctgtcaggacctgtcangccccccccggaatcttgtccccgttggtcccaaccggccttaaaaaacttactttttttccggggg

SEQ ID NO: 29256 - DNA, 2816 bp, Oryza sativa
gagagaatcgctaacagatgcgacattagttcatcaaaatactatatataaaaatatttaaattcaaatttgaatcggatatataaacttttacttaaaaactttgggtctataaactttaggtgtgtaaactttagatatatagaaataatatatatataaaatatttaaatttaaattcaaatttgaatcgggcattttgacttataaactttgggtctctaaactttaggtgtataaactttagatgtgtaaacttgaggtgtataaactttagatgcataaatttactaaaatagaaaagtaatgcggtgccaaaaaaggaaatcacgtgaggaggggtgatcacgcggggcgatcaatcgcccattagaaatttcgcaaaccacacgcattgctattgcaagtctcatatttatataaggacaaaattctctatgttaaatggcagaaatttatgacccctccaatttatgacacaaatttaacatacactatacactggtggagaaaccctttgtagtcccggttcgtaaccccctttagtcccggtttccaaaccgggagtaccaatccgggactaaagatcgctatctttagtcccgggtgaaataaccgggagtaaagatcgatctttagtcccggttggtaacaccaactgtttaagatcttcgaccagtggtcttaggtacacgtcgatgtcgttaccaggttgcttggggccttgaataataatcggcatcattatgtacttcctcttcatgcatagccaggggggaggttgtagatacacatcgtaacgggccaagtgctatggccgctgctcatctctccaaaaggattcatgccatccgtactcaaaccaaaccgtatgtttcgtgcgttctttccaaattctttaaattttctgtcgatgtttcgccactgcgaaccatcggcggggtgtctcagcatcccgtcctgttgacgctcttcagcgtgccatcgcaacattctagcattccccttgttcctgaacaaacgacttagccgtggtattataggaaaataccacatcaccttagcaggaattctcttctttgttagctgcccgtcaacttctcctggatcgtcccgtctaatcttgtatcgtagtgctttgcaaacagggcatgcttctaggttctcatactcctcaccgcgatataggatacaatcgttcggacatgcgtgaatcttatgaacttccagtcctaacgggcagactatcttcttagcctcgtacgttgtctcgggcaatttgtttccccccggaagaatgttcttgacgagtttcaataaatcgccaaatgccttgtcactaaccccattttttgccttccattgcaacaactccagagtggtatccaactttttgtgcccctgctcgcaacctgggtacaacgaagttctgtggtcctccaacatcttgtccaatttatgggcctccttttcactttcgcagtcttccctggcgtcctgcaacatctgaccaagatcatccgcaacgtcgttaccatcagcagctatttcctcctcgcccgtttgatttccttcaaatccaacatactgagcaaagtccggaatattgtcgtcttccacttcatcttcttccatttcaacaccttgctctccgtgggatgtccaacaattatagcttggcatgaaccccgactcaaacaagtggaaatgaatagtcctggatgcagaatactccttctgattcttacacttattgcatggacaacaaataaaacccctttgcctgttagcttcggccactctcaaaaaatagtgcacgccgtcaataaactctttggaccgccggtcagcgtacatccattgccgatccatctacatgagtcaaaaaaaccgcacacaaataattattcttacaataatgacagtcatacaataattataagatatctttattcatacaaaaatcataaaatattacaccaaataattcttaaaaactatttgtaaagttttaaactaattttaatgtgttttacttcttttaatttttattttagtttgttttctattatttaatattaactttcactagagttttccttctcaactattttataaaaccttgtttagcaaatgaactaaatttctatatattctttcttccccacacacattttctctctcatcaacttacaactaaattttggagacaaaaaaagtgtgcaaaacataggtgcaaatgtagtatgacaaaaaaaacattggaggatgaagttgcaaaccttttaggcacctcgatttgtatgtaatcaccaaaataaattcaatagaaattttggcatgacctcacctcttttttgaagaaattttgaagcttgctcgggcagctggaggaggaagaagacatatatataggggtgggactttagtcccggttggtagcaccaaccggggctaaagatcaccgggatcattagtcccggttggtattaccaaccgggactaaagttaagatctttagtctcggttggtagcaccaaccggggctaaagatcaccgggatctttagccccggttggtgctccaaccgagactatagatctaatctctagtcccggtcggtaataccaaccgggacgaatgatcccggtgatctttagccccggttggtgctaccaaccgggactaaagtcccccccctatatatatgtcctcttcctcctccagcatgccgagcaagcttaaaaatttcttcaaaaaggaggtgaaggggcctctcctccccaacaaagaggtttttttttctttttttcttt

SEQ ID NO: 29257 - DNA, 20743 bp, Oryza sativa
  unsure (1)..(20743): unsure at all n locations
cgcgcgacctgatntttgcacgtgcgcaagtagcncatcattattgcggtttgggtgagcacgtcacgccacacgtaatgcagtacagcgcgctcgttcatccggtctgtgatcagtcacaaaccggtcagatcgtgggttaggtggcgacaggcggtctgacgcacgcctcgccccatcccgtcaggacgagagcctccaagcactcgtccctagccggagccggcgtgttacctcctggagatggcacgttggttccggtcagatatatgccaggcttcatcctaaccattacaggcaagatattgtatgaagaagggcgaacatgcagattgataaactgacgcgtggtggacaagaatgaccgatttgtgaccggtctgacactggtcatatcgtcagcagacagccatgttcccacgtcgcgcctgcttccggcggaagtggaggtaggtgtgggctgtcccataaaaggtcattcagacggcaaccatacaaatctccgtccatttatgaaaagagagagaggggtgcatgtggtatccccttgaaatataaaaggaggaccttgcccatagggagagcaggcttgggctgggactggacctttccagatcgggaacccagaaggagggagaggctggctgatactttgtagctccttcatacacagatccaccaaaacacatgagtagggtattacgcttctcagcggcccgaacctgtatacatcgctggtgtttcatgctctttcgagaggtcgcgatctttccacatatagacagagcttgggatttcaccctgagcccccggccgaaccggcataggggggcctgtgcggtctcccggtgaggagcccccacactccgtcatctggcgcgccaggtagggggctcagcgtgtgttttctgagctctcgcacttttctgtgtgcgccaagtttttcttgttcagcctaatggccgggcaagcaaaggcgcacgacctctctccgagtgtgagcggcgacgacggggagccaaacccacgccgtcgagctcgtactccaccgcctcctccacaccaaagtcctaagcagggggaggcgctcgagagggtcgatagatccgcggcttcaccgatcgcgggcgatggaggagaacggcgagatggggagcgttgcctcctcgtctatggcgacggcagcacgccccagggcgcgcttcaggctgctggcgcgctcctacgtcactcgcccgtcgtccctgacccggagtctccagcccagcgatggctggacgacgtggccaacttggtcatgacggcacagcagcgcctgggtgctggtggacggtcctccaccaccaggacctccggcgccgctaccactggctccgtgtcgtcaaggcggagggcgcggcgagcggcggctgttgcacgccattcggctgctactccctcgtcggcgccttcgactcgggacgatcagcgtggagagccggatgcccgcctcgacatcgagcgccggcgtaatgaccggcgtgctccccacgcgacggagggcgcctcttcgtccagagtgtcgcctcgacatggacacgaggaccagccctccgtgcccccggctggtggtgtcggctgtagagcctttgtggcgagtcttcggaatgtccgttggcccccaaggttccgacccaccatcgctgagaagtatgacgggagcgtcaaccccaccgagtttctccaggtctatacgactgggattgaggccactgggggtgatgacagggtcatggcgaatttctttcccatggccctgaagggataggcgcggggttggctaatgaacttgccacccgcgtcggtccactcctgggaggatttgtgccaacagttcaccatgaactttcaaggcacatatccgcgcccaggcgaagaagcggacttgcacgcagtacagcgaggggatgatgaatcacttcgctcgtacattcagcggttttgccaagtccgcaacaccataccatgcatccctgcacacgcggtaatctacgcgttcagggggggcgtgcggcacaaccgcatgctcgaaaagatcgcctccaaagagccccagactaccgcagagctttttcagctcgcggaccgagtggctcgcaaggaggaggcctggacctggaacccctccggttccggagtggcagcttctgccgcccccggatccgccgctcagacagggcagcgtgacaggaggaagaagaagaggtcggtccattccggcgacgagggtcatgtcctcgccgtcgagggcgctccgcgggccacccgaaaggggaggcctgcgagcgacaaaaagaaggaagccgacgctccctgacctcggctacttggaagagcgaaggtggcgcgcggcccttcgagccgcgcgctaccagcagagcctgcggcgctaccatcagctccacgtccgggtccgatcactctgcgtcgacgacctcgtcctacgccgcgtccaaacgcgtgctggactgagcaaactctcaccaatgtgggagggtccgtatcgagtgatcggcgtcccccggccgggctccgttcggctggccacgggcgacggcacagagctgcctaacccgtggaacatcgaacaccttcgtcgcttctacccctagtgggggtcgggtatcaggtcttgggctcgggccaaccccacaccccccgggcgtgcagggttggccgggggcttatcttttttctcttccgtatttcaataaaagcattttcgatttcttaaaggctgtatctgtgctgttatttccttttgaagaatcttggcttgaaataggtcactcgtgctcaatcctaccctcgggggctcgggtcggctaaaatcgccaaacggggcccagaaccgagctgtgccccggggcgtggtgaactccggggggaatcggcaaaaacccacaatcgggtcacccataaccctcggtcaccacgctcccggcctggccagtctcgacatgtggatctccccaggcactagccttgacccgcgccgtttgaggctgggacctgggcacgagcccttgttcaagccaagacacagaaggactatggcacagaccatcctcgtctcatacacagaacaaatgaaattgacacaaaaatttcctctttatttgattgcagattaaatcagcctataacaagaagggggcccgaaggcctcggaagaagaatgaaaagctattaagattggcggaggcctgggggctcactccgacgcgcctgggtagccggcctcgccgtcgctgtcgtccgcaccgtcgtcaccgcactcctcgttggagttgaaggcaaacgcgagccgaggggccgctccttattgtcggtcggttttcccttgctgatgcgcgcgatttgcgaccgccgggattctgcccgaagagagagagagagcagggaggagaggcccccgagccgaacggcggcccaaggcccccgacggccggagctggccctccgcctgcttgtccgacggtgccaggcgcccccgacccccaggatggccccgaggccactgcgggaaggccgcgcctgtcgccctctgaccccgaggtcgtcggcacagaagccgagtgcgccccgcgtggcctctcggatggagagcgccctggaaatgtggcccctgacgaagaagatcggccccgccgaaaggtgcagcggcccgtctacttcgttagcgaggccctccgggacgctgagacccgataccttcaggcccagaagatgctttacgctatcctgataacttcgaggaagttgcgccattatttccaggcgcatcgggtcacggtggttacgtcttatcccctcggccaaatcttgtataaccgagagggtactggacgggtggtgaaatgggcaatcgaactctctgaattcgatttgcgctttgaaccaagccacgcgatcaagagccaggccctcgccgactttgtggtggagtggaccccagctcccgagcttgtctccgcccccgaggccagctcgagcccatcgcagctgcctcacaccgccctttgggtgatgtagttcgacggcacctgtaggaaccggccccacctgtcaccaggccttagaagtggcgtcacgcccgaccgcttccctcggggagggcgatcgccctggcataacgccgggggctactgtcggtgacatgggaccgggagtatcatgactagaggcttgaggcagacacaatcgcccacgtggcctggcaccctcggggggcgtcgggcccgagggtgatgtgttcgccctcctctttgtctccccgagggggtcggaccgctcccgcctcggccccgagggccgaggcgccccgaccccttgtgggttttgcgccgcgtgtatgggttaggtgagcgcagcggggctcacctaaccgcatttattgcggtttgggtgagcacgtcacgccacacgtaatgcagtacagcgcgctcgttcatccggtctgtgatcagtcacagaccggtcagatcgtgggttaggtggcgacaggcggtctgacgcacgcctcgccccatcccgtcaggacgagagcctccaagcactcgtccctagccggagccggcgtgttacctcctggagatggcacgttggttccggtcagatatatgccaggcttcatcctaaccattacaggcaagatattgtatgaagaagggcgaacatgcagattgataaactgacgcgtggtggacaagaatgaccgatttgtgaccggtctgacactggtcatatcgtcagcagacagccatgttcccacgtcgcgcctgcttccggcggaagtggaggtaggtgtgggctgtcccatcagaaggtcattcagacggcaaccatacaaatctccgtccatttatgaaaagataggataagtccccacacaaaagagagagaggggtgcatgtggtatccccttgaaatataaaaggaggaccttgcccatagggagagcaggcttgggttgggactggaccttcccagatcgggaacccagaaggagggagaggctggctgatactttgtagctccttcatacacagatccaccaaaacacaggagtagggtattacgcttctcagcggcccgaacctgtatacatcgctggtgtttcatgctctttcgagaggtcgcgatctttccacatatagacagagcttgggatttcaccctgagcccccggccgaaccggcataggggggcctgtgcggtctcccggtgaggagcccccacactccgtcacggttggtaacacaaaccgggactaaagatcaaatatgcccgttacccttttgaaccgggactaaagatcatctttagccctggtttttattgcatccgggactattgtggaaatcggccgaccgacgaaagatggtttctccaccagtgatacatgccgatgtactagcaacgatataaatttaacatacactataaattgttgcattgcgtttgtatatcataaccagacaacacagagaggcagggggacgtagttttttgtatggctgcgaatcagttttgatatatattactatctcatataattatttgatggttggaacaatataaatggcttatgtttatatatagacaagattatcttacgattcgcacagttttttatagggagtaattttcacgcctcgtgtttttatatatggataaaaaaatactatatgaattggaaagggcatatttacggtgactctaatttacaggttaagtcatagacttatgagcattcgtatttacggctatttatccttttagtagtaagacggcgtatttgtcaacaacgagatgtccatataacttcgtcaactagtctagtttttttaatatgcttataaagatatggtgtgtgtatatgttcatatcggtaagtgtttgcgttgtactgtgtaattctaaaaaaaagtgagctaggtagcgttacgagtatattgttgggaaaattgatctctcggtttgaaagatcacgctagaccgttttccacccgttgtctacgcaaaatcagagcgatccaatctgttaattcccgattaactatgcgccgtgatcggtggcacccaatttatttcctattgagtcgcccccgattccccacagtgctaaatataaaaggggaggccggcccaacagtagatgacaatctctctcggtctcaatctaaacccaatcaacattggcgctggaggggaaacgtgtggcggttctaggatagtgtaggtggcaaccggaaggctgccgctaccccgcaaccggcgttctcactgctacgactacttcccttacgccgacgatcacggagcagttcgagggacttcatcctctacttccactccggttgatggtattggagagggaacaacaagaatcgcaacggtggtttcaaataacggtcagtaatcgtaaaattccgtattagggtgatcatgtttagactaagcactcatgttaatagatcagtagaatctacatatatgtgttcgtatcgggtttctagaaaattttacaacgaatagggtaatactccctccgtttctaaatatttgacgctgttgacttttttaaatatgtttaaccgttcgtcttatttaaaaaatttaagtaattattttttttcctatcatttgattaattgttaaatatacttatatgtatatatatagttttacatatttcacaaaagtttttgaataagacgaacggtcaaatatgtgataaaaagttaatggtgttaaatatttagaaatagagggagaggaagtactgatatacggagtaatcagcaaaaagatggaccatagccgtcgtgttggactcctccatgtaagacgacccggaacagcgaaaagaagaagcgcacgtaagaatcggcagggtcaaagctagtttctcaaaaaaaaaaagataataagaataatataataagaaaataaaaagaaaaaaaatccccatggagacgaaacgtggacaaaaatcgcagccgtcacgtccatctccgcaagaccgcggcgccaaacgggtcaaccacccacctctcttctcctcatccccatcccattcccatttctctcgcgcgcacggcgccgcgcgcgacgcgagacgcgacgcaagccatcaccaacacaaaaacatggcgtccaccacctcctcgcccacgcgcgcaccctcctcctacccgtaaacgacacccacaccgacccgcctccgcctgcgcggcgagaaaacccaagaaccccccacgtaggcaagacgaggagaaagaggattgcaagacgctgtccatcgaagcatgccatccatggcgcctcctcggctataaccaggcgagagagagagagacgagacgagacagccaagaacacgcgcgtgcgcgcgtgcgtgattcttagtttagcgccttcccccccgcggccgataataacacggtggtgggggaggtgttcgtccgtggcgcgttcttttgtcccaggcgtgcatggccgagacgccatgacgacgacgacggcgacgaacacggcgacgaacacggcggcagccatggaggtgaccaaggcggtcacgcagctctgcgcgcagggtgggggcggcggcgggagaagaagggggaggggcaggccggccgtgctgcggctcgacctccgctggggccgcctgctccgcctcgccgtcatcagcagggtcgtccgcctcgtctgggaccagctcctcgcctgctcctcctgcgccggcggcggcggcggccgctaccgcaggctcggcccgccgccgcagggcgtcgccgccggtgccgtcctctccccgctccccagggacgccgacgacgacgctgccgccgccgaccgcgacgcggccgatgtcgaggacgtcgtcagcctcaaggtcagcctgctcggcgattgccagatcggcaagaccagcttcatggtaacttctcccatctcctcctcctctttcaaccaagaagcaatcaaattctgaaactcgagtcagcaatcgaacacaagaatcatttcttcttgaattcagaatagtcaatccagatagtaaaaagtaaattaatctattgggtaattgattctgcaggttaagtatgttggggacgacgaggagcagaacggcttgcagatgacgggcctgaatctgatggacaagaccttggcagttcggggagctcgaattgccttcagcatttgggatgtggcaggtaatttgcacaagcatatgaactacaaatgcaggatttgtttccccctttatacttgcattggttgaagaatcagattttttttttggtgtgcctaaacttgctttgtttgatgagtttttgttgtgtgatggaatgcaggagacagccagttcctcgaccacgtcccgatcgcgtgtaaggacgccgtggcgatcttgtacatgttcgatctcacgagccggtgcacgcttactaagttagtgttcctatcagtctcacagcatcataatcttggatcagattttgagtaattagaactttcaatatctgtagtacttattgttgattatattatcttttgcttgatgcagtgttatagattggtatgagagggcaaggaaatggaataaggttggtacattgttcttctataatcgtgtggttttcattttttctggatgtgttctttaggattatagctgaaccataggtagactgtgcactgaaaaattgttacagtattacaagttgctgctaaaacagtaactagcagatgggttcccacaatccaacatatgtcagagcatgcctgcagatcactgtttctgaacaatttagtaatgctgatacttgttcatatgtttttatcggtgctctagctgaacagtgaaatggtgtccttggttcttggtattgtagctgaacagtttttatctctcttttgttttctgacagacggctattccaatcctaattgggacgaagtttgatgacttcgctcagcttcctcttgagatgcaatggaccatcgttaacgaggtacgtttattaatagtttcttgcaatcaaaatattgttcccccttgcctttctttggttcttggatatgcagccttcagcatctccaatgtttgttagcatagaaagatgagaccttttcttggttctgacgatatgggtttgggctacacatgtttcttttatctcaaacgctgcaaattaaccagataggtcagaactttaatcttgaattagccttttcatggctaccaagtgctaatagcaaatcagaaatattcgaaagccaaccatcccctgaaaactcccattttgaggttcagatttctgaaaactgctactgaatcaaaattttctcatcaaagatttgagcttctttctgtaggccatgaacacgaaatttttttagcttgatcgcatctgcaattaattaagaatacctatgtgaaaacgacaagagagcccaaatcaaacctgaatcgagtacagcatgctaccaattatgtttgtgcagaccgtgctgacctgatagcaccatatatgaatgcctattactattgcaacattgaatacagtggaccttggttgatcagggggagcattcgttaagtaggcccaaacacgtcttgtcttcgtcttcgtctccggggaaggaggctcgccagtcaccactaacaacagccgggatgatcgagtcaaacgatagaaaatttattaggcaatggatataatttctgttttgtttgtgcccatttgtttgcatcttgtccaaaccatacgacgatcatcgatccctgtgggccttacaacatacagaatgtagatcgatggtcactaatcactcgacatgctaaaagcaaggaaaagctacatcacaactaaccgaaaataactcctcgtgctactgggagccctcatgcttgaaaatgtagttgcgtttcttttcagccacagtgaatatcagttcactgaaaagtttttgtaactaatcctagaaactactgtttgaccaggtttaattctgacaaagaattcgagaacacaaaaccatatgcttcgcatttggtttactgttgttaaaaaaacatgttgtattcgaaagaaactcctctgatgtaatgccctctgacatgtgggtccacgagttatgggctccatatgtcagtcccttaaagtcggaggacagtaagttagaaggtttttttccgttgtattcttgtttctgatggaggattttttttttctgaaatttcaggccagggcatacgcgagagcgatgaaggcgaccctcttcttctccagctcgacgcacaacatcaacgtgaacaagtttttaaagttcattacggccaagcttttcaacttgcggtggcgggtggagcgcaacctcaccgtcggcgagcccatcatagacttctgaagactctacacccttacactgacaaaatgctaggcaaaaaaacgtacacgagcccttccttccctccccttcgtcgtcttcctcctgacctttctctcccggtaatggaggccggccatggccatggctgagcagaactgagctcttgcatgtacatataggtgaaagaaaaaagaaaaaaaaaagaaagaaaaaggatcaagttgagttcgtcgttgtcgaggtgttatcccttcccttgtgcagtgcaggcaagggcagaagaggaaaccgtgagatgttgtctgtaaccctcgtcacagtgtatagtagagtaggagtttaaccgatccatgtaatataatcctcaccgtttttttaacaccagttttagatatgggtactcatcgaaccattcgatcagtttaattttttttttttgcggggaaaccattaattcgatcagttcatctaaagtctaaatgaactaaaatctacatagtccctcgtttcaaactaagtatatgtccaggcctccagggatacttgtactacttctatcctaatataagagcatttttagacgtgagagaaaaataagaagagaaaattacctaaatgttctatattaaacgagagatgatggaaagtgcgagggtaattgaggataagatttttttttgactaattcaccaggagggagagattccccacctgaatatattgcgtcaaacgaaattacacagggcaggcttcacctacgcaagtgcaggaaccctggaggataatagcaaaaaatacacggggagtcctgagaagagaatacaaaagagaggccaccttcccaaaataacagcaattgaagtttgcacttgcaagaaacccaaccgaaaaccagagcaacctaaagctaacaccctagctcatcaacaaccatatcgttatgcaaacttggaaacgccagagtccacgccggagggcctttttgccacaagcatgtcagctatggattaacggcaaccaaaagactgaggaagtcataaaccacccgcattaagccgtcaaaatccaacttaatcttgttgctgcttggatcagtgcccgccgacaccatttgggggaaggaagcctcagagaagggagggccactaaaggttgcggccatagagaccgcccgcatcgagtcttcttcaatccgactataacaaattgctagctagttccacgccctccaacgcccttttagggaaggaagcctcaaaggagggagggccgccgaacaatgtggttgaggacaatccaaggaaaagggtggagacgaagagggagctggacaaaagataagtggtagaggggggaatcctacagctgaaagaacgtcaaccgcgtcaacagggaaggctgcaagaatagtagccattcaagccaaagaaaaccgtaggcactaacataaaagacctgacctaatccatcaatcaaggagcatgccaaaaggagatctagagagagggagaggcactagcgaatcctaattgacggatcagagccaagcatgttatggcaaggagctcgttggctagctcaagggcgcctcaaagaggagggaggaggagggatggggatggaagaaggtgttgggcaaggtcaccggtcccgcggggagaggggggtccgaggccagagcctgccaccggtgccacggattcgaccagatccggccgctaggagcgcggatctgcacgccaccagtcgggggcgccgggcctagccttcatcgctggccgaggggggggctacaaggagccaagccgaggccagacaccgcccccacggacaacacgtcgccagacagcaccgctggcgactgccctccgcggccaaggagcacgaccgctccttcgccaggaacagcacaccgtcgccgggacacacgccgccgcaccgcctccaccacgccccatcgtgccaccgcgcacggcattgtcgctctcctccggccaggtccagaagcagggtgccggatccagccacgggggcgccagatcagaagcttcgcgccgcgccgatgtcagcccccacccatcacgcgccacgtcatcatcctcgcgctgagccgtcgtgttgccgaggaatggcctcgccgccgccctcacagctggcagcgcggaactccggtggtgcgctccggcggcggcgaggggagaagaggaagggagggggcggcgggggctagggttcaccccctgtgccgctcgcgcgagagggcgacgcggggttgtgccggcttcgtactcttccaattgaggataagatgaactgatgtgataagtagtatgagattgtacttattttaaaacaaaatttgaatataaaatcatacttattttaggaggatgtagtatttgggacttggcagtaattttactgttcttggtattagaaggtaccatttattttatataaaacttggtatttctcgaggtataaaaaacatacggttaggaccgtaacgaactgtgttagctgtaggtttgcatctgttcccaaggtgatttaatttgagcaattgcaaatagctttttcttctttcactcggcagctgaatcttgcttggtggagtactcgggccgtgcacgttcatccacgggtttgatttgacattggtcatgagcgcgttttagtggacaaagtggtggttagcatagtgaaattgtcaacgcgagaagcagaaaccaattgctgttgctgtcgccggtaccaatactgtatggtgttcctgttccatcagaattcagtcgagtgcatggcagctcattcttgtggcccatcacacaattaatctccgacgatgtactgtacgtagtggagcatttagattagtaattctcgaatacattttcgtaagggttaagtgggcatatgtaacgtgttcactccttgttactatctctgttttcagatgagtgacatcatcagcatagtccgcaatacacattttatcatcataacaattttacactataaaaaacgatttttcatgatgttaccctataatttacgctggcggccatatgcaaaaaccgtcaacaaaaacataacaataggtggggggctacggaccaccagcaaaaaccaatttttgctggtaaccacgctaagagaaacgcctaaaaaactactctatttttcgaggcgggcctcttaagtgtccgccagtttttctaggcggacctcttaggcgtccgccagcgaaaaatctcattttcactggcagtaggtaaggaggaccgctgcaaaaaaagttttgggcgaatatataaatctaccgtcccccacccccaccgctcccttctcccttcccccaccgcgtggcccctccgccgcctctcttccttctctctcggtttcaccttcttcctcccttctccaccgccgtcggctgccgtcgcctctaccgcctctccgcggcggtggggcgtggcctcctcctctccgccgctagccgccatgagctcgggccggattcggccgctgcgacgacggcggaggccggatctgccgccgcaacgacgggggagaccagatccgtcgccgcgatcgccgcagggccactagtctctaaagtctaaattatatatttaaaaaacattacgaatataactttatgaaagagagtttctcataaaaatataccaatataacttttcatattttaaatatttttacgtctattaaatttttaaggtttcaagatttgactgcacttataggagatactactatacaagaatcaacgagaagcgaatttttaagttgcgataaactggtagtagtaagattttgtgaacaaggataatgcatatctgtgtaaaaaaaatatatagtgcaaatcacatatacattgaaaatctagaaactattgtcacgagtaaaatttttaccaaccaaacggccacaatgtcgcgcagggcttatccggggcactactgcccatgggctgaaagtgcggccacaagcccacaatatcttgcggggcttagccggggcaccacggcccatgggctctatctccctcaccagtaaagccctagcctccaagaccgcacccgtataaagctgcagacctctctctccttctcctcccccgccaccgccgctcgcctccgaaaccctagccgccccctccccgcggccgcgaaaatggtacgcttctccctcctcctcctcctnctnctcctccccttcgccgcacgacgggaagatcgcacgcgtgcttgtcctcgtgccagtccacggctccgcgcgccgtctttctcatggtgtttcacaatttgtaggatgcgttctttattcatgttgatctgccgtagatggggggatcttgagccggaggagaggagtagctagtttctttgattatgcgttttggggtctagcggattttaacatgagatggtttctctttagcgacattttttttgttcatgttgatgtccacggggattgttctagttatgtcatttttatcttcaagacttaaatgctttgaatcgcgggtatagaccagattattgtcgtgaagatcgacgtattttccgagctgaccctctgcatgctgaaaattttgtagtgggttatatctagattatatgtgtattgttgtcattcaattagcacttaaacttctgtagcataaacattttcatcatcttcctgtgaggacatcggatgagttcctttttttttctcttcttgttctaaaattgttcggtaatcttgtctggctttgactgatgggctccaatgatggcatgaaatctttgagacctgacattcttgtgatgacaaacataagcatatttcctgaggacccaattgaggttttaaccattggtttgctgaatgtgtcttcagtgttgaaaaatttggacacatttgcttcaaattatgcacattcgactgttgtttataggcctgcgatgtccattccacattcagtatttgttaagctgactgcttttgtttcaaatttgttttgtataggtgaacgttcccaagaccaagaagacctactgcaagaacaaggagtgcaggaagcacacccttcacaaggtcactcagtacaagaagggtaaggacagcctgtctgcccagggaaagcgccgttatgaccgtaagcagtcaggatatggtggtcagaccaagcctgttttccacaagaaggtactgtgacagtttatatatgattatgcagtgttgtgtgtgactctctgttcattagaaacatatggtgtcatgattgatgtatcagtgctatgtgtctgtacaatgcatgtggcaataaccatcacgtagttttaattgcatgtggctttcagctgtgcatttttcttgttatgatacatggttcctgttttcaggcaaaaaccaccaagaagatcgtgctgaagctgcaatgccaaagctgcaagcattactcccagcaccccatcaaggtattatttcattgtcaagactccagagctgaaaatgaatcattattttgctggatgtgttggatgctcacttgcataattgttctctgcagaggtgcaagcatttcgagattggtggagacaagaagggcaagggaacatctcttttctaaattgcttgctacctactggatactaaagttgttggtctactgtgcttcaatatttcaatgttattaggagcttatttaagcataccatatcaatgtattcaagtatcatcgtctgacatttactctagcaaggattggctttctgctgaatcaagttttgttgcttaatgctcattgaatccaatgtgatgcatgtgtttatattttgcagcaattttatcttacgacagttctatttcccttagtcctcagtatccctttttttttgttatcttaccagctgtctgttgattagtagttagcaaacatagagcgacccactttaatgacttcccgtgacatgaatatgacctcgagagattagtctagtgaacttattcagactgaatgttgtattgttaactgtactggcgtttggtcagtatctttcgaaagagattgaatgtagggacgtaattttattgcaagataattcatttgttcttgtggttcagtatcttggaaggtcttgtgatgttagtgaattcttttcgtagcattgcagtacttgctccgtccttaatgcatgattcaataggctacgcaatctcgtttgtagcaatgaattttaaaaatttggaatcgctaactatcgtttgacagatttatgagccttccatcattcgtttttttaagctgtcagatggttaaaaattataatttattatgaaccgaataaatagcttcgaacaagctaagctatgctgatgtagaaaaaaaatagttcgagaaccgtggtatatccccccccccaaaacctccccaacccacccataaaaaaccggatggcagcaatcacaacttagcattgcttctcatagcaatgttcgtatactataagtgcaggttagttcagacttcagacacctatggtaattgttttttattttgttcgttaggtggtgtttgggtccatggattaaactttagcctttatgtttagacactaatttagactaaatatagattacttacaaaaataattaaataaatgagagctaattcgcgagacaaattttttaagcctaattaattcataattagagaatgtttactgtagcatcacataggctaatcatggattaattaggcttaatagattcgtctcgcgaattagtccaagattatggatatgttttgttaatagtctatatttaatacttctaattagtgtacaaacatccaatttggaaagtgctaaaaaattttagtcccttccaaacacccccttattatttttatcaaatagccacgtaagcgtcatctcaatagcacgtgggacaaagacccctagtcaaaggcgtcatgtcagccaaaaccagagacattgctaccgagggagctcgtttgcatagttgaagaaggcgccatgtcagccaaaaccggagacatttttatcgagggacctcgtttgcatagttgggttgtactccctccatattttaatgtatgacgccgttgactttttaatcaacgcttgaccattcgtcttattcaaaaaattatgtaattatcatttattttattatggcttgatttatcatcaaatattctttaagtatgacataaatatttttatatttgcacaaaaaatttgaataagacgaatagtcaaacattattcgaaaagtcaacggtgtcatacattaaaatacggagcgagtatatggttttcggataaggatgaaaaacagacttagcgactataagggaataagttaactaatcataaaccgtgcgaaaaagatccaaaaacatacggagcgacaaagtaagggacctattgtgaacttatttgagggataaagtcacttccttaactacaagggaataagttcacctgacgtccctcaactttatgttgagtttgtctgcggtccccaatccgcgatagcaaaaatctctacccctcaactatcacaaaccgtgcaaaaaagatcccaagacaatattgatccattttccccggttttgctgatgtggcatacggtgggacccacatgtcagcgtcctgtcttctcctcttttcttttttctttttttttcttcttctctcttctcctcttcccttcttcccctagcctgagaggccagcgggtgggcgagcaggcgacggtaggaggcagcagcggtgtgcggagcaggcaaggggtagcaggcgacgggcgagcgacgacgcctcagagagggtgtggtgtgggcgtcgctgtgctgtgtcgggcagagcgaggtggcgtcggtggggtgtagaggacgacggcagatggaaccgacggcggatgctgtaggggacgatgacgcggaggacggagtaggccgggagaggatgacgctgatgcgcttggggtttcaccgggagaccccgccttcaccgtcttcgtgccctcaccggagtcgttccacaacgtcctcgggctgcggcatcccaacgacagcgttgccgatgggtgggtctcacattttctttctatttcacttacatgtgagactcacgtattattttatttctattttgttgactaagatgtcacgccagcgaaaccaagacatctatactgccatgggatataaattgaacggttttgtatatttaggggtgaagatttgtggtattgaggataagggatgacaaacaaactcggtgtaaagttgagggacatcaggtgaacttattccaactataaggcaacgcatcacggcccatggcccatgggatgcgcattctggcccacaaagcagcacacgctctctcccccaccagtaagccctagcctccaggagctcagccgtataaagccgcagaccttctccttcccctccccgccgccactcgccgcagcgtctcgaccagacaagggagcgcctccgaaaccctagctccccctttcccctccgcggccaccaaaatggtacgcttctccctcctccccgtccgcctctttccgtcgcacgacggcaagatcatgcgcgtgtgtgtcctcgtgccagtccacggcaccctgctctggtcgatttgtagggggattgcattctttattcatgttgatctgctgtagatgggggcgatcttgagccggaggagtagctagcttcttgttgatgcggtttcgggatttagagatttaacacggagattgatagtttctctttagcgatttctttttttcttgttgatataatgatatccacggtgattgtactagttatggtttttttatcttcaatgctttgtattattgtttttgatttgtgggtagagaccagattattgttgttaagatggacggattctctgagctggtcctttgcatgctctgaagcgcagaaaatttgtgtaatgggttatatctggattatgtgtagctattaacttctgtagtaaacattttcatcttcctttgaggacatgggatgaattcctttttttcttctcttgttgtgctaaaattgttcggtaatcttgtctgtggctttgactgatgggctccgatgatggcatgaaatctttgagacctgacattcttgtgatgacaaacataagcatatttcctgaggacccaattgagtttttaaccattggtctgctgaatgtgtctttgctgttgaaaaatatgtatacacatttgcttctgattatgcgcatttgattgtgttgtttataggcctgctatgtgctttccaacaaccagtatttgttaaatttgtttcatatttgttatgtatataggtgaacgttcccaagaccaagaagacctactgcaagaacaaggagtgcaggaagcacacccttcacaaggtcactcagtacaagaagggtaaggacagcctgtctgcccagggaaagcgccgttatgaccgtaagcagtcaggatatggtggtcagaccaagcctgttttccacaagaaggtactgtgacagtttatatgtgattgcgcagtgttgtgtcttactgtctctcttcattagaaacatatggtgtcatgattgatgtgtctgttcaatgcaaacatgtggtaataaccatcacgtagttttaaagtatatgactttcagctgtgcatttttcatgttatgatacatggttcctgttttcaggcaaaaaccaccaagaagattgtgctgaagctgcaatgccaaagctgcaagcattactcccagcaccccatcaaggtatttttgcaatgtgaagattcaagctgaaaattctcatgaatcagtatctttttagatgtgttggatgctcacttacataattattctgtgcagaggtgcaagcattttgaaattggtggagacaagaagggcaagggaacgtctcttttctaaactacctactggatactgaagttgtgggtctactgtgcttcatacttcaatgttattaggagcttaatttaagcagaccatatcatgtattcaagtactctagcaaggattggctttctgctgaatcaagttttgttgcttaatgctcattgaatccaatgtgatgcatgtgtttatgttgcactgcaattttgtcttatggcagttttatctccctaaggactcggcgtctgctgttcgttatcttacctatttttgaatcctagagcgacccacttaaacat

SEQ ID NO: 29258 - DNA, 18602 bp, Oryza sativa
  unsure (1)..(18602): unsure at all n locations
aggcgcgttgggtgggtaaaattttacttggtgccaatagtttctagatttccaaggaatatgtgattggcacaatatattttttttacacagatatgcataatcctggttcacaaaatcttactactacaagttaatcgcaacttaaaaattcgtttctcgttgattcttgtatagtagtatctcctgtaagtgcagtcaaatcttgaacccttaaaaatttaatagacgtaaaaatatttaaaatatgaaaagttatattggtatatttttttttatgagaaactctctttcataaagttatattggtaatgtttttttaaatatatagtttagtctttagagactagtggccctgcggcggtcgcggcgacggatctagcctcccccgtcgtcgcggcggcagatccggcctccaccatcgtcgcagcggccgaatccggccccgagcttatggcggctagcggtggagaggaggaggccacgccccaccaccgcggagaggcggtagaggcgacggcagccggcggcggtggagaagggaggaagaaggtgaaaccgagagagaaggaagagaggcggcggaggggccgcgcagtgggggaagggagaagggagcggtgggggtgggggacagtagatttatatattcgcccaaaacatttttcgcagtggtcctccttacctactgccggtgaaaatgagatttttcgctggcggacacttaagaggtccgcctcgaaaaactggcagacacttaagaggttcgtctcgaaaaatagagtagtttttttaggcatttctcttagcgtggttatcagcaaaaattggtttctgctggtggtccgtagccccccacctattgttatgtttttttggcggtttttgcatatggacgccagcgtaaaatatagggtaacatcacgaaaaatcgttttttatagtgtaaaattgttatgatgataaaatgtgtattgcggactatgctgatgatgtcactcatctgaaaacagagatagtaacaaggagtgaacacgttacatatgcccacttaacccttacgaaaatgtattcgagaattactaatctaaatgctccactacgtacagtacatcgtcggagattaattgtgtgatgggccacaagaatgagctgccatgcactcgactgaattctgatggaacaggaacaccatacagtattggtaccggcgacagcaacagcaattggtttctgcttctcgcgttgacaatttcactatgctaaccaccactttgtccactaaaacgcgctcatgaccaatgtcaaatcaaacccgtggatgaacgtgcacggcccgagtactccaccaagcaagattcagctgccgagtgaaagaagaaaaagctatttgcaattgctcaaattaaatcaccttgggaacagatgcaaacctacagctaacacagttcgttacggtcctaaccgtatgttttttatacctcgagaaataccaagttttatataaaagaaatggtaccttctaataccaagaacagtaaaattactcccaagtccaaatactacaatccttctaaaataagtatgattttatattcaaattttgttttaaaataagtacaatcccgtactacttatcacatcagttcatcttatcctcaattggaagagtacgaagccggcacgacccccgcgtcgccctctcacgcgagcggcacagggggtgaaccctagcccccgccgccccctcccttcctctcccccctcgccgccgccggagcgcgccaccggagttccgcgcggccaactgtgagggcggcggcgaggccattcctcggcgacgcgacggctcagcgtgaggatgatgacgcggcgcgtgataggtgggggctgacatcagcgcggcgcgaagcttcggatctggcgcccccgtggctggatctggcaccctgcttttggacctggccggaggagagcaacaatgccgtgcgcggtggcgcgatggggcgtggtggaggcggtgcggcggcgtgtgtcccggcgacggtgtgctgttcccggcgaaggagcggtcgtgctccttggccgcggagggcagtcgctagcggtgctgtctggcgacgtgtcgtccgtgagggcggtgacgggcctcggcttggctccttgtagtccccccctcagcattttcagtacaggaaaattacaatacattagatttagggtgcaatcttttcagcttatgaacttcgggatatgcataccactgttctcaaactagaaattttctacatcagcattgcctggctcgttctaagctatttattcggtttataataactagcatggtggcctgcgcatattgcgcggctagcatcattatattttctctcatataatagcatatatgttttctcattatattattataatatattacaatgacaacataattttaaattttgcaataacttttcaaaactactaatgtgtaataactactctagtctcctcttctaatatttcttattttttaattctgaatttcagctatttctaaattgtatttctatatggactctgttttttctttttctctgattaatgtgagaatttctatgccatgagagcgaacctgaaagctcctttttattccgaattttagttggttttaaattccaatatgaactctatattctacttctaatattccttattttttaattccaaatttctattttttttcttaattgtatttctataaggactctatactctacttctaatatttcttatttttaattccgaatttcggttatttcctaattgtatttctatatgtactctatactctacttctaatattccttatttttaatttcgaatttcagttatttcctaattgtatttctatatggactctagtctccacttctaatattccttattttttaattccgaatttcaactatttctaaattgtatttctatatggactctagtctcctcttttaatatttcttttttttaattccgaatttcagctatttctaaattgtatttctatatagattctgctttttctttttctccgattaatgtgagaatttctagatcatgagagcgaacgtgaaggctcctttttttttccgaattttagttagtttgaaattcctatatggactctatactctacttctaatatttcttatttttaattccaaatttctattttttttcttaattgtatttctatatggactctatgctctacttctaatattccttatttttaattccgaatttcagttatttcctaattgtatttctatatggactctatactctacttctaatattccttatttttaattccgaatttcaattatttcctaattgtatttctatatggactctatactctacttctaatattccttatttttaattccgaatttcaactatttcctaattgtatttctatatggactctatactcctattctaatatttctttttttaattccgaatttcagctatttctaaagtgtatttctatatggactctagtctcctcttctaatattccttatttttaattctgaatttcagctatttctaaattgtatttctatatgaactctgtttttttctttttcttcgattaatgtgagaatttctaggccatgggagcgaacgtagaggctccttttttttttccgaattttagttagttttaaattcctatatggactctatactctacttctaatatttcttattttttaattctgaatttctattttttcttaattgtatttctatatggactttatactctacttctaatattccttatttttaattcagaatttctattatttcctaattgtatttctatatggactctatactctacttctaatattctttatttttaattccgaatttctattatttcctaattgtatttctatatggactctatactcctcttctaatattccttattttttaattccaaatttcaactatttctaaagtgtatttctatatgaactctagtcttctcttctaatattccttattttttaattccgaatttcagctatttctaaattgtatttctatatggactctgtttttttttctccgattaatgtgagaatttctaagccatgagagtaaacgtggaggctcctttttctattcctttaattatataatagatttaggagtgtaatatttaattcattactataaacaattgtcaataacctatccaaatcatgcatgaagaatggaacaagtactacaatgctacgaaaacagttcactaacatcacaagaccaaacattgctacgaaaacagtttcactaacgccacaagaccaaacattagtatcgaccttctaagataacaatcacaagaccaaggcctatcttacaattcacctccatccatggtattccataccttctatctcatgacgaagatattgaacaaaacatagtatagttaaccatatacgaaattcagtctgaaaaatggaagttcatcagactaacctctcagggattcatgtcacaggaattcgtttaagtgggtcgctctaggattgcaaacataggtaagataacgaaaaacagacaccgagtacttagggagataaaactgccataagacaaaattgcagtgcaacataaacacatgcatcacattggattcaatgagcattaagcaacaaaacttgattcagcagaaagccaatccttgctagagtacttgaatacatgatatggtctgcttaaattaagctcctaataacattgaagtatgaagcacagtagacccacaacttcagtatccagtaggtagtttagaaaagagacgttcccttgcccttcttgtctccaccaattttaaaatgcttgcacctctgcacagaataattatgtaagtgagcatccaacacatctaaaaagatactgattcatgagaattttcagcttgaatcttcacattgcaaaaataccttgatggggtgctgggagtaatgcttgcagctttggcattgcagcttcagcacaatcttcttggtggtttttgcctgaaaacaggaaccatgtatcataacatgaaaaatgcaccctgcttttggacctggccggaggagagcaacaatgccgtgcgcggtggcgcgatggggcgtggtggaggcggtgcggcggcgtgtgtcccggcgacggtgtgctgttcccggcgaaggagcggtcgtgctccttggccgcggagggcagtcgccagcggtgctgtctggcgacgtgtcgtccgtgagggcggtgatgggcctcggcttggctccttatagtcccccccccctcagccggcgatgaaggctaggcccggcgcccccgactggtggcgtgcagatctgcgctcctagcgtctggatctggtcgaatccgtggcaccggtggcaggctctggcctcggaccccccctcccccgcgggactggtgaccttgcccaacaccttcttccatccccatccctcctcctccctcctctttgaggcgcccttgagctagccaacgagctccttgccataacatgcttggctctgatccatcaattaggatttgccagtgcctctccctctctctagatctccttttagcatgctccttgattgatggattaggtcaggtcttttatgttagtgcctacggttttctttggcttgaatggctactattcttgcagccttccctgttgacgcggttgatgttcttctagctgtaggattcccccctctaccacttatcttttgtccagctccctcttcgtctccacccttttccttggattgtcctcaaccacattgttcggcggccctctctcctttgaggcttccttccctaaaagggcgttggagggcgtggaactagctagcaatttgttatagtcggattgaagaagactcgatgcgagcagtctctatggccgcaacccatcgccgccatagacgtacggacggccggctacaacacaacacagtaactgtaactgaagaagccggcgccaccattcccgccgccaatatgctcgccgccgccgcctccgtcaagctctccacggccgggaccgccacggcgcccaagatggcattattcaagcccctccacctccctcccctcttcgccgccgccgccgccgccgccgggccacgtcccctctccctctcggcgcgccccctgtaccggcagcaggacccgttattcctggcgtcgcgcgtcgcgtcaccggcgccgccgccgccgtccgccaccgccgacggcgcccggccggtggaggctgcaccggcgggcgcggcgccggaggaggcggcgaggcgggccaagatcggggtctacttcgcgacgtggtgggcgctgaacgtgatcttcaacatctacaacaagaaggtgctcaacgcgttcccttacccgtggctcacgtccacgctctccctcgccgccggctccgccatcatgctcgcctcctgggccaccaggatcgccgaggcgcccgccaccgacctcgatttctggaaggccctgtcaccggtgagatcgcattgaccatggacaccatcgtctcctccttcttgattctgttctattctgaatctctgacgcgttcgttggatttggggattcgtttttgctcgttgtgggacgagcaggtggcgatcgcgcacaccatcgggcacgtggcggcgacggtgagcatggcgaaggtggcggtgtcgttcacccacatcatcaagagcggcgagccggcgttcagcgtgctcgtctccaggttcttcctcggcgagcacttcccggcgccggtctacttctccctcctcccaatcatcggcggatgcgccctcgccgccatcaccgagctcaatttcaacatgattggtgagtgagcaaacactctgcatctctctgtctctccacctgaaatcctggagatacttgcagcagatacaccagaaatatcctcactttttgattaaaaaaatagatattatctccaagaattcttcagaacaagaactgtccattaaccaaagatatgttttcttatgtcagataaagaaatatacaccagccacgaaaaagtgcacaatttgttcataaacctgacacatcacatcaatctgttcatcgtgtattgctgaaaattcgatgcaggattcatgggggcgatgatctcgaacctggcattcgtgttccggaacatattctccaagaaggggatgaagggcaagtcggtgagcgggatgaactactacgcctgcctctccatgctctcgctggtcatcctcctccctttcgccttcgccatggaggggcccaaggtgtgggctgccggctggcaaaaagccgtcgccgagatcggtccaaacttcgtctggtgagcctcacatgcttttctttgtaccacttctcaccgtttcactgtcacaaccatcacgtcagttgagatttttgggtatcaattgggcaaaaaatttctagtgataagtgcttgacctaagctttcaaacagtttcagcatgcaacactttgtactttcagtaacatcactcaagtattctatacaaaaagaaccattatcaattaatatagatataggatcgtcctatcactatcatttcctcctaagcggcaatatcttcttcagttcattctgaaagagaaataagaagtatcaaaagatttgatgatatttttgtgtgataatccagctgattcatgtggccatggatttctctgtggttttgtaggtgggtggcggcgcagagtgtgttctaccacttgtacaaccaagtgtcctacatgtcattggacgagatctcaccactgacattcagcatcggcaacaccatgaagcggatctccgtcattgtcgcctccatcatcatcttccacacgccggtccagcccatcaacgccctcggagccgccattgcgattctcggaactttcatctactctcaggtagattttccgcacatgttttaccaaatcacatttttcacaaaagagccaattcatgaacataagtctgaatctctaaccaaaaaaaaaacatctcattttttcaggcgaagcagtaatggcataagcatggaaatggcacccgttttcgccacaagtcgcgactcggtgctcgggatgtaacaatgctatgagcatatatccaaggatcccttgtaatatattagatcttcttttcttttcatttttctttctctaggtgtagctgccaatgtttcttctgaattcgtcgagttcttgtactatgactatgatgatgtagagaggtggatctgcctaaataaagctgttagattttttgcttgaccctttgctgctgctgctgctgcttctgaattttgtgatgtggtccaaaacacaaggtgtggttcagaatgagttgggggctaccggttagatcggagagcagaagcagtgcatgcttgacacactacggtccggcttgttttgttgctgggtgatggatgatgggtacagggcatggccctgaaaatccttgaatagtcccaactggcgctgtgcaatttgctcactgagatctctgggatggattcagcgttggacacttgcgattttccttacatgaaatgagaattttaggattctggaggaggcatataccccaaaaatgacgatctgttctggaatcaagaacagcttttctgggctccaaaaggccaaagccttttagcttcaaatgctagtagagtaaattgccagatggatgcactttactacacgaacttgtaaaagacttgtttcggtacatgaatttgttcgatgcatgtgaaacaaggtcaaaatgacacatcataatcaattttactaagttatacactgattaggacgagatgtgcatatggaggtggacatgagacatgcatttgtgctttattattctttgttctaccccttgcactatttctcagtatttttgtgtctttctccatacaatctttaggccttattaacccctttttattgaacaaatgtatatgtacttagcatttttctcacacatgtgtttatgtagtatcctaattaacactaaaataagattagctttgttttttcttttggccttgattcacatgcacctaacaagttcgtgtatcaaaatgagcgttttataagtttatgtactagattgcttccacctagcaagttcgtgtaccgccaatgcaatttactcatgctagtatttggagaaagcatataaccaaatgacggtttgtgcttgaatcaaggatagcttttctgggctcaaaaggccagagctgcttaggttccaatgaagatgtttctttcgtgctttttgggaggatcactgcgatggcactcctccgatgttgctacttgcatatccttctatactttatttaacttggctacaacttgaaaatgaacgcaaccaatcaccacggctgtccgatccaacagcattttcagtacaggaaaactacaatacattagatttagggtgcaatcttttcagcttatgaacttcgggatatgcataccacggttctcaaactagaaattttctacatcagcattgcctggctcgctttaagctatttattcggtttataataatttaggagtgtaatatttaattcattactataaacaattgtcaataacctatccaaatcatgcatgaagaatggaacaagtaatacaatgctacgaaaacagttcaataacatcacaagaccaaacattgctacgaaaacagtttcactaacgccacaagaccaaacattagtatcgaccttctaagataacaatcacaagaccaaggcctatctttcaattcacctccatccatagtattccataccttccatctcgttacgaagatattgaacaaaacatagtatagttaaccatatacgaaattcgatctgaaaaacggaagttcatcagactagcctctcagggattcatgtcacaggaattcgtttacgtgggtcgctctaggattgcaaactcgggtaagataacgaaaaacagacactgaggacttagggagataaaactgccataagacaaaagtcacaattgcagtgccatctaaagacatgcatcacattggattcgacgagcattaagcaagaaaacttgattcagcagaaagccaatccttgctagagtaaatgtcagacgatgatacttgaatacatgatatggtctgcttaaattaagttcctaataacattgaagtatgaagcacaatagacccacaacttcagtatccagtaggtagtttagaaaagagatgttcccttgcccttcttgtctccaccaatctcgaaatgcttgcacctctgtaaagaataataatgtaagatagcacccaacacatctaaaaagatactgattgattcatgacaattttcagcttgagtcttgacaatgaaataataccttgatggggtgctgggagtaatgcttgcagctttggcattgcagcttcagcacaatcttcttggtggtttttgcctgaaaacaggaaccatgtatcataacatgaaaaatgcacagctgaaagtcagatacattaaaactacatgatggttattgccacatgtttgcattgaacagacacaaatcatgacaccatatgtttctaatgaagagagacaatcacacacagcactgcgtaatcacatataaactgtcacaataccttcttgtggaaaacaggcttggtctgaccaccatatcctgactgcttacggtcataacggcgctttccctgggcagacaggctgtccttacccttcttgtactgagtgaccttgtgaagggtgtgcttcctgcactccttgttcttgcagtaggtcttcttggtcttgggaacgttcacctatacataagaaatatgaaacaaatttaacaaatactggttattggaaagcacatagcaggcctataaacaacacaatcaaatgtgcataatcagaagcacatgtgaatcgatatttttcgacagcaaagacaaattcagcagaccaatggttaaaacctcaattgggtcctcaggaaatatgcttatgtttgtcatcacaagaatgtcaggtctcaaagatttcatgccatcatcggagcccatcagtcaaaaccagacatgattaccaaacaattttcgcacaagataaaaaaaagaattcatcccacgtcctcaaggaagatgatgaaaaatgtttactccagaagttaattgctactccctccattccttaatacaaggcataacttgtttggactcggagaacaagaaaacctataactacccatcgtaccgatttattccagcgcgttccaatgcgtgacgctttgatcagttcatcgcatctagtgccaaagcagcatgcacccgtgtcctgcagtttttgcgcgtgcatgcaagcatccgagtggtggatcctttgcctttaaactaatgaaccgaatatcatgagctcatgcaaccatccattcaatgcttgcatgcaccaagtacggagttgagcagttgccgccttgtatactggtacttgaagaaaagacggttgcgccttgtattaagaaaagactattgaatgacagcaatacacataatctagatataacccattacaaaaaaattccgcgtttcagagcatgcatcttaacgacaataatctggtctctacccacaattgaaaaacaatcacacaaagcactcaagataaaaatgacataactagaacaaccaccgtggatatcattatatcaacatgaaaaaagaaatcgctaaagagaaaccgcgaaaccgtgttaaatctctaaaaaccccgaaaccgcatcaataagaaactagctactcctccggctcaagatcgcccccatctacagcagatcaacatgaataaagaacgcaatccccctacaaatcgaccagagcagggtgccgtggactggcacgaggacacacgagcgcatgatcttgccgtcgtgcggcggagagaggcggacggggaggaggaagaagcgtaccattttggcggccgcggaggggaaggcggggagctagggtttcggaggcgctgccttgtctggtcgacacgctgcggcgagtggcggcggggaggggaaggagaaggtctgcgactttatacgggtgagctcctggaggctagggtttactggtgcgtgtgctgctttgtgggccagaatgcgcagcccatgggccatgcaccgtgatgcgttgccttatagttggaataagttcatctgatgtccctcaactttacaccgagtttgtttgccatcccttatcctcaataccagaaatcttcaccccaaatatacaaaaccgttcaatttatgtcctatggcagtatagatgtcttggtttcactaacgtggcatcctagttagcaaaataggaataaaataatatgtgagtcccacatgtaagtgaaatagaaggaaaatgtgagacccacccatcggcaacgttgttattgggacgccgcagcctgaggacgcggtggaacgactctggtgagggcacgaagacggtgaaggcgaggtctcctggtgaaaccccaagcgcgtcggagtcatcctctcccggcctacttcgtcctcctcgccatcgtcccctacagcgtccgccatcacttccatatgtcgtcgtcctctgcaccccaccgccgccaccccgctccgcccgccacagcacagcgacgcccacaccacaccctctctgaggcgccgtcgctcgcccgccacccgttaccccttgcctgctccgcacaccgccgccaccgcctgccgtcgcctgctcgcccgcccgccggcctctcaggctaggagaagaagggaagaggagaagagagaagaaagaaaagacaagaagaaaaaaaagaaaaaagaaaagaggagaagacaggacgctgacatgtgggtcccaccgtatgccacgtcagcaaaaccggagaaaatggatcaatattgtcttgggatcttttttgcacggtttatgatagttgaggggtagagatttttgctatcgcggattagggacctcagacaaactcaacataaagttgagggccgtcaggtgaacttatattcccttatagttatgaagtgactttatccctcaaaatgagttcactttaggtcccttacttcatcgctccgtctgttttgtgatctttttcgcacggtttatgattagttgagaggtagagattttattgtggattaggaacctcagacgaactcgacttaaagttaagggacgtcaggtgaacttattcccttatagttaaggaagtccaagtggactttatccctcaaataagttcactttaggtctcttactttgtcgcttagtctgtttttcatccttatccgaaaaccatatacaatccatccttcaaagtgtgcaaacgaggtccctcggtaataatatttctggttttggctgacatgacgccttcttcaaactgtgcaaacgagctctctcggtagcaatgtctccggttttagctgacatgacgcctttgactaggggtcttcgtcccacgtgctattgacatgacgcttacgtggctatttgataaaaataataaggaggtgtttggaatggactaaaattttttagtcccttccaaattggatgtttggacactaattagaagtattaaatatagactattaacaaaacctatccataatcttggacttattcgcgagacgaatctattgagcctaataaatccatgattagcctatgtgatgatacaataaacattctataattatgaattaattaggcttaaaaaattgggttaattggatacatgccattgtaaattcttcagttttgaaatataccattactactcaactatttggaggtatgccattataatttttcaggtattggaaatataccattacataccccttggatatgtctaacaaaaattttggaccaaattgcccccgtcttcttcctttgcctcccccatctctcctgttctgttgttcatcttcttcctcccgtttcttgctgctgtgagattaggagtacacagtaatagtcactttgtcaggatcatgcacaagcagggccggccctagggggggtcagcccgtgcgcacgcccgagtcccccaaaatttagggggccccatggcggatgggccatggcccacgacgcccccagggtcagcatcgctctcagtcctgaatcatgtatggtatcgaagacagaagacgaagaggagcgaaggaaaagtgaagcgatctgactccgttcccgtcgcctcgatcacgcctcgcgtcgcgttgcaaacggtaaacggcggcaaaccgcaacgcaaacacggcaatcggcagcaaatcgcagcggctctgcatgactggctgactacgtcgattggaggccaaccgcccggcggcgcgccctcatcggccgatcggctgctcgcgcctcgcagtcgtcgtctaaggtaattttctctatctttctttttcctctttatagatcaaaaattattagcttgtactacttaataattaatgattattttttagcacaacattaatcatattgtcaagaaaatatgtatccggtagcgaaaaaagaaaacggaaaaaatgttcggatgatttcattgaaattttagaagaaacttttgaaagtgccaagtaagtgtttatgattatattatttctctttgaaagttttaaaatattatatatagataattttatcatatcaaatattaaatattacatgtttataagactataaatatatatattagtttatgtatatatataggggcctccacgtaagtttttgtcctagagcttgaaaactcaggaccggccctgtgcacaaggcgcgctcgtcgacgagcacgtaatcggtggacgtggaccacgccatggtgaagccgctgtaggcgaatgactccagctgcaccgacaggggcacgtccttgggcgtccgggtgctggacattcaagaacgacatgctccgcgtcttggttgttgcagtagacctcggggaggctggaaactgagaaggtggtgatgcggccagcgaagggaagaagggaaactagatggtgcagcacaacaccgccgttgctggccgagaaaggagatgtggaggaagaatactaagataccagatccaaaagggaaagaaatggaagaaagaagatgaacaggagagggtggagacaaaggagaagacgagagcgatttggtctaaaatttttgttaaacacatccaaaggttgtacagtgacatatttccaatacctgaaaaagttgtaatggcatgtttctaaatagtttaatagtaacggtatatttcaaaactaaagattttataatggcatctatccaattaaccctaaaaaatttgtctcacgaattagctctcatttatgtaattagttttgtaagtagtcaatatttaatactctaaattagtatctaaaacaaagactaaagtttaatccctggatccaaacaccacctaacaaacaaaataaaaaactaaaaaaaaacaattaccacacgtgtctgtagtctgaactaacccgcactcatagtatatgaacattgccatgagcagcaatgctaagttgtgattgctgccatccggtttttttgggtgggttggggggcagcttatgacagttacaaactttggaatataccacggttctcaaactaatttttttctacatcagcattgcttagcttgttcgaagctatttattcggttcataataatatataatttttaattcattactacaaacgggattgcgtagcctatcgaatcatgcattaaggacagagcaagtactgcaatgctacgaaaagaattcactaatatcacaagaccttccaagatactgaaccacaagaacaaatgaattatcttgcaataaaattacgtccctacattccatctctttcgaaagatactgaccaaacgccagtacagttaacaatacaacattcagtctgaaaaaggaagttcactagactaatctctcgaggtcatattcatgtcacgggaagtaattaaagtgggtcgctctatgtttgctaactactaatcaaaagacagcaggtaagataacaaaaaaagaaaagggatactgaggactaaggtaaatagaactgtcgtaagataaaattgcagcaaaatataaacacatgcatcacattggattcaacgagcattaagcaacaaaacttgattcagcagaaagccaatccttgctagagtaaatgtcagacgatgatacttgaatacattgatatggtctgcttaaataagctcctaataacattgaaatattgaagcacagtagaccaacaactatagtatccagtaggtagcaagcaatttagaaaagagatgttcccttgcccttcttgtctccaccaatctcgaaatgcttgcacctctgcagagaacaattatgcaagtgagcatccaacacatccagcaaaataatgattcatgataattttcagctctggagtcttgacaatgaaataataccttgatggggtgctgggagtaatgcttgcagctttggcattgcagcttcagcacgatcttcttggtggtttttgcctgaaaacaggaaccatgtatcataacatgaaaaatgcacagctgaaagccacatgcaattaaaactacgtgatggttattgccacatgcattgtacagacacatatcactgctacatcaatcatgacaccgtacgtttctaatgaacagagagtcacacacaacactgcataatcatatataaactgtcacagtaccttcttgtggaaaacaggcttggtctgaccaccatatcctgactgctttcggtcataacggcgctttccctgggcagacaggctgtccttacccttcttgtactgagtgaccttgtgaagggtgtgcttcctgcactccttgttcttgcagtaggtcttcttggtcttgggaacgttcacctatacaaaacaaatttgaaacaaaagcactcagcttaacaaatactgaatgtggaatggacatcgcaggcctataaacaataatcaaatgtgcataatttgaagcaaatgtgtgtacaaatttttcaacagtgaagacacattcagcaaaccaatggttaaaacctcaattgggtctcaggaaatatgcttatgtttgtcatcacaagaatgtcaggtctcaaagatttcatgccatcatcggagcccatcagtcaaagccagacaagattaccgaacaattttagaacaagagaaaaaaaaaggaactcatcccatgtcctcacaggaaaatgatgaaaatgttcatactacagaagtttaagtgctaattaaatgacaacaatacacatataatctagatataacccactacaaaattttcagcatgcagagggtcagctcggaaaatacgtcgatcttcacgacaataatctggtctatacccacgattcaaagcattgaagtcttgaagataaaaatgacataactagaacaatcaccgtggacatcaacatgaacaaaaaaaatgtcgctaaagagaaaccatctcatgttaaaatccgctagaccccaaaacgcataatcaaagaaactagctactcctctcctccggctcaagatccccccatctacggcagatcaacatgaataaagaacgcatcctacaaattgtgaaacaccatgagaaagacggcgcgcggagccgtggactggcacgaggacaagcacgcgtgcgatcttcccgtcgtgcggcggaggggaggaggaggaggaggaggagggagaagcgtaccattttcgcggccgcggggagggggcggctagggtttcggaggcgagcggcggtggcgggggaggagaaggagagagaggtctgcagctttatacgggtgcggtcttggaggctagggctttactggtgagggagatagagcccatgggccgtggtgccccggctaagccccgcaagatattgtgggcttgtggccgcactttcagcccatgggcagtagtgccccggataagccctgcgcgacattgtggccgtttggttggtaaaaattttactcgtgacaatagtttctagattttcaatgtatatgtgatttgcactatatattttttttacacagatatgcattatccttgttcacaaaatcttactactaccagtttatcgcaacttaaaaattcgtttctcggtgattcttgtatagtaggatcttctgtaagtgcagtcaaatctttgaaccttaaaaattttatagacgtaaaaatatttaaaatatgaaaagttatattggtatatttttttttatgagaaactttcttttataaaagtatattggtaatgttntttttaatatatagtttaatctttagagacttgtggncctttcngcggtcgcggcgaccgatctagact

SEQ ID NO: 29259 - DNA, 2486 bp, Oryza sativa
  unsure (1)..(2486): unsure at all n locations
gctgcttctgaagaataatcttgttgttcaaatgttcttcccaagctcgaccttcttaaccagccgcaaggtgttgtggaagatggaatccagtattccagcaacctagaattcgcatgtcatttcattagccatgtacacttgatggattcagagaaaaggaaaagataaaaaaagggtgtgtgctctcaccgtgaaaactcctccaatgatagcacaaacatttgtgatgaaatgggagaaggattttggaagttcagttaccaagaccttggaagtgatgataaaataagaattagtttttctttcagttatgaaccaaacgaagaaaaggtgagatgccaacctgcatgggagaaggttcaaaatggaatttcacaacaggaacatagaagctgtgcaccaagctgctgtgcgctgtgtattcatactcctcaaccagtttcaattcctttgatgatctcagtgtaacaagctcagttttcacaatttgcaggtaatgctcaatctaagaatgacaaaaaacaaaaactatgttactccataagaaaccagaaaatttagtgctggaaggcatgcctgctgtaatcatcttgataacaaaaacaaagcaaaatttagggacttacagtaacgttggcattgacatcaccatgcttaacaatgtaggattgaccagctaatctatcatggtggccaccaacatagggagttagtcttttcagttcattaaacatctttgccgatagccttttgccaaaagagaactgtgttacatagtgggaaacatttatctgggatggatcaaaggagtgggaaccagatcgagctgagattacaacactcccagggacctgataaagaggaaccagaaatcaaataccacagatagagatcatcatcaacactacaactattacacctcagaagttcatttaccttttttacccgcacaaaaccttctattctgcatccactggtcaatggagcagggcgttttgcaggatcaacagtcttattggatttgtcctccaaagctagaacatgggcatcttttgggatgtttgcaacataagtttccattgcctgaggcccaaaaaaatgtcaggaattttatccacaatttgacaagaccatgaacaaagtcagtgatttacaagcaaaggatagttagccttttgttctccctaggaaaatggggacaataccttttacaggtaagctaaagcttagggtgaagaatatatcatgcagtacatcaagaaaaataagtgggtaacagaatatacataccgctactaaactctcagtatcacgatcgccgtagtatgattcatgatcatggtgaccctggttttccctgcacaaatgtcaatttgtttgtttctggaacatgagcaaaaaaataataataatacaagtcttgcgccacaggttaactctcagtagagtatccggaagactgtaagatttacttgaacttacttaagatcactccctttacggaaaatgcgaatggatggataaccttgtatatggtgcctgcatttaataaattaaaacaatgaactgtagtccttaatttaatgacgaacaagcataacaagagcacatataattaggtaaaactagtgggagaacaatttaaggcttctattgaggagttgtggttcacatccaatgcgcatagcttgaaatgttactatgtgcatcaatggcaatggcactattacacagaaaccagtgtcatcagaagcagaatggctcattttcttataaaaacatggtcagtaacaattagggttgtgatctatggaataaaggcttttgaatcattccaaatgcaaacaagtccagaaggcataagcatccactgaaccaggataagaggacacaaacacgaatagctcatgaaagatgtggcataataatgacactttgttggggatattaaaaactagagtaaagtccatcaccgcnnncttgacatgtgtttnaaaggcaatgcggtccctagacgttcttgtatagcgagataatacattagcttgtgcgactgagtatcccggaaggattagcgatatgagcgcattcttattggagcaaatcagttcatgcttttgacttaatgcattatacgataagctacacaatctccgttgtagttatgaatttaaaattatatattattatgaaccgaataaatagttttccatgaagactcgcaatgctgatggggacaaaatataattttagaaccttaggatattccaaagtttggaacttgcataagctgnccccaacccacccaatataccggatggaacaattacaacttagcattgttgctcatgacagtgctcatatactatgagtgcgggttagttcaaactacagacacgtgcggtaattgaatttttttacttttttatattgttcgctaagtggtgtttggatcccagggataaactttacgtgttaatttg

SEQ ID NO: 29260 - DNA, 22687 bp, Oryza sativa
  unsure (1)..(22687): unsure at all n locations
cgtgcgattcgtttgcatgcgctnnnnnnnnnnnnnnnnnnnnnnnncatctgggtcaaataggacggtctaaagactttatatttaaaaataattcataactttttcatgtgaactctaatgaaaacaaactttatatcaaacttgtagccctcgacgcgatctacaactttgtagttgataattcctttattttaagtcattttttgacccaaaatgtaattttaaaattaaaattacaaaatctataaacatgcaacaatattttgggaccctaaacagttttaattcaaaaaattttcaactacaaagttgtaggtcgcgtcgagggctacaattttgatataaagtttgtctttattagagttcacatgaaaaagttatgaattattttttggtataaagtttttagaccgtcctgtttagggaccggggtgacacaactgaacaagttggaggacctaaacgagtgatctgcaagtttagggaccgggatgatacagtcgaacaagtttaaggacctgaatgatcgatttgcgagtttagggaccgggatgacacagcggtacaagtttagggaccggtgatggactttactctaaaaactaattaactaaatttctcttggtacatggatcaaaaagggatttgtaaagttcatgttgcagcctaaatatgctttgtccttgttttggatatgaataataattaagtacagacgaacctcctacacaagtcaatttcttcagtgcagtcaaccttggcaagaatgattctgccatccatttcaggatcatatctgcagaaaaaaaaaacaacatggtatagattaaacagcacattaaaaccacaaaacacaaacaaagagaaacagtatgtacctctccctcattatttttgcagtcttctcccacgaaggtttctggaggaagatcaagtaattagaaatgtctccatttgttagttcaataagccgtgccatacttacattactttaccagcaataatttactaatcatttccttacagatagagtagcatatactagaaaatcactaaatgcaaaggaacaagatgaattctaaccaatcgattgctccagtaacaccagggggcataaaaattaacaaccaaaacaggatacctgaaaaggaagtgcatgataataatcagtggaaacaatatttgggctccgaaacaatacaagagggattaactagatataccgaacggcacttcaaggaaaaatacttgaggcaggtaaaagtgaagattatcaccaatttgccatagacaatctggttgaagtgattggagctatgaatataaagtacatttctccatgaatgtgaaggagaaagaagacagcatacatgaataataggttgaccgttgatatggtattgaaacgcacaattgctaaaatgctatatgttatgtgttacggataggtggatattgaaatacatatttgaatacttactggtgtgaatagctatcaaaattgcgagaggacaagggaactgaaccatcatcatggttttcttcaacatcatctccatgtttgctgaccgtaggaataggtcctgggtggaactcggatccagtaggcactaaattccgatcaattgaatatttgcgaacagttttcggtatgttcaatctgttctgcatgtgttttgaacagaaactttaaggttaaaccagcatggagaaaaactcgagctacaaaaggcaagatatgatcaagaaatgcttatagatagaaagttagttaggaatttaggataggtttcattcttttgacatgcacagaactttacaaaaactgataaattgtcatatttcgtatttttaacattggtgtaaaatatacatgtagagcttacttcctccgtttcacaatgtaagtcattctagcattttccacattcatattgttgttaatgaatctagatagatatatatgtctagattcattaacatcaatatgaatatgggaaatgatagaatgacttacattgtgaaacggagggagtacttttaaaagctagtggaaagttatttgtaatggcaagttaacaagaaaataaagtcaacaatagtttttatggaacgcgcaagatgagcttcatgtccttcaatgatatcctcattctagacggcagatgaacaaaaacagagtacatgaggtcaagttagaatcttactgttcccagaacatcactgacatcaactgatgcaaattcgcatgaaagtgcaggaaagctgtaaatcacagaaccagatcgtgagcatctactggaaaaacaaggaaaagttgagtccagctttgctgatgtcattccatagaaaacaatgggcaaccagctagactaatgtagataccctcctatgcattatcacatacaaataaatgagcagtgcctgactagtccttgtttgctggaaagcatcaatttcaagtataaacaatggctctcaggttcatatagaccaagggttgaaagtgttgagtaaaagaacaacatcagaattattctacaaacatattactacaaatggttggatctggtaattaggtgacctttgaagataaatgaattaactgagaatcatatgtttttttccacaatgcaccaaatgagtacaaatacattgaaaagaatgtactgagtgcctgacattaattaacgctgtgctttgctgttgcatatatagtattccattaaaattaatcacaatagggataaaattactatcagcagattagagaattaggaagacattagttctatgaaccataatgatagcagtattatctatgtgatcatgaaggttctcattttgtattctaaccttattacttgttgagatgtgcagcatgtgccatagaatttaccttaagttaaaatctatccgtaagaactccccatctgaactcctatcaacaatcacagatgtgctagtattgactgctaagtaattactcagttcctgcaataacaattgaacagatttagcttttcagttgaaatgaacctttaaactagtctaaagcttgattaaggaatcagctcagcatagtgaaaagtatagcacattgcaagccttaacaagcaacagccaaaattatgcatatgttccggagtaattacaatatacttgggcatatacattacttaactgccactttcaaggttggatggaccaattgataattcggtcaaaaatattcaaccaaaataggttcagttaagaatctagcctatcatgaagctctaatagtcaattgaaacagatatcaggaaaaacgagctattctcaatcatcaaatgaaacaagcaaatcgagactctacattgatccggcgatagcgattagctacactacagcagttggaatggtagaagacaactaatctgcatataaataaataaatgctctatcattttagtatggctctgtaccaaatttcagtctacaatcaccaaatggaacagaagaacagtccaaccattttttgtttgtttccctaaagactggaaccagagtgaaaaaatgaaatctaaaaataacagtgcaatcgctaatccaacgaaaactgaccattccaaacaaaaacaccatagctagtgctgctacaatggacaatccagccccagatagtgatgcctcggtcaaatccctaggaattttcctgcaagcacgaaaagaaaaagcgcatcaaccaaattacccatctcagtagaaaatacaccagacattacactactcgcaacgaccgcacgaatggtcaataccaccacatacgcccacgcaaccccgattttctcggtgcatcaacgaaccatcacaaaccatctactgcaatcgccagaacagccaggcaagagaattcacccaatccgaacccggaccagcacccccagccgaggaccgcgtcgaaatcccccccgcgcgcgcgcgcacagggagtaccatagcaagcaatggagggagagagagagagagatcgggagtggaggggacctgtagaagtcgacggacttgagcttactgaaggagatcatggctgccggcggccgggccctcctccccgccggtgacgaggtgggggtggggggaagagatcgggccgccggttgaaaagatttgaaagaaagaaaaggaaaaggaagaagaaaaaagccaaattttttgtgggggttgaaaaggaagaagaaaaaaaagcttgtccccttggggtcaacgttgttacgttcaaggttcgcaaaaaatttgcggttggaactggaaactccatttcttgcccgcgtcggtgttctttggttttcttttctttttttttctttttttttgattggaatagggccgtatacaaacgggtccatccgcgaaactagttgataacctatgaattcccttgccgctttccacgccttaaaaatgtaagtggatcaatccataaatctatttatagcttgaattagtagataagtcatgagtcaatccacggtttaacaaactaattttgcctacaaatagattcatgggttgatccgttagaatccttatgaccgattttaggataggtaaattggagtattttggataaggccataggataagagtaatctaattgatttagagtgatgtggtgacaaaataagtaaatgatgatgattttgcagcggcatcttttttaaaaaattatttttctgtagcattgaaattgatgatattttggtcctacatgccaattggatatgtaacaactcattaaattagaaaacatatgacttgtatgattttttttattcaattacacattagacacacacccacacacactattaaacatgtaacaccatactcacacacgctcacgcattatgtgagcgcctgagtttgtacttctaaaaaaagagacaaaaatcaatggcacatcactcatctcactaaaattttgttgaaagttcacctatatgtgtaggcaaaatataatattcgtggtatcaagattttgaaccctggtgaatggtggagtcatacgcctacgactctatcaccatataactagtgttttccctgcatgacactttttaatctcaagtgcaggataatattcactaaataagtttcactttggaccaccttttattacgattgtttcactttacattactctttaactaatgttttcactttaaaccgggtaatcttactttgtgtcactttggatcaccatcaactcttttatccatctacattaaatttgtcatttgtcaaataaattgtctatataaagcggtgggagttcactgacgaatcagagttggcgtactcaaaatcattcgtatgcttgaaagagagtaagggcaatccaaaatgcagcaaaagtaatattactcgatccaaagtgaaaacattggttaaatagtgatccaaagagaaataccggtaataaaaggtgacccaaagtgaaattttactaaacttttaaactatcaatttatgctaaattaagtttacaaaaccaatattaagttcacaacaatatgttactttcaaggcaacgcaaatttacgcgtatataccacctttacttttaaactaaaaaatgatattctattgatggccctttaaagaaaatttgcaactgtatatggcacctgaatggttatgtatcaatcatgagaggaatccaatggttattacttttctagatgtcatggttcaatgtacattaaattttataacaattaactatatttagtggattgtaaatgcatatggcatatggatggttgagatgaaagcatgagatggatcaaaaagctactattttctagatgtagggatgcaagtgggtagtcccgctacccgcataaaaacccgcttgctagtgtattttttacatcatagtacaaaatttagaagaaaaatgaactagaagtgggataagcgggaaaaaaaaacccgcttgcccgccccgcttgcatccctatctagatgacatggctcaatgcatgtcaagtttatggttccaactatagtaggatatatagatatagatatctaaataatctatatttgttctatagtagttgatgtgaaaatacaatactccatccatccttaattataagggattttagttggatgtggtgtattctagtactacgaatctggatatactctatgtccagattcgtagtattaggatgcgtcacatccaaccaaaatcccttatatttagggacgggggaatactacataacacttaaggcctgtttgggggagcttctatctgctgcagcttctcccagaatcataagctcccccaaacagtacagcttttggtccagattctaagaagctgtagttgtagaatccagaagatgaactataagtcagaagctgggaaacccagcttttccagattctcagaagctggctaccaaccagttgcttctcagaatcttaagctcccccaaatatgcccttagattttttatgtatcaaacatgagagggatccaatgactatgtgttatagttcaatgcacattaagctttatagcaataactattcttagtggattgtaaatgcatatgacaaatggatggttgagatcaaagcatgagaggtatttttttatggaagaaatatcaaaacaagttcaaacaccaccaaccatttattaatggtgattttgccatccaaataccagcatgtccttttgacttttatggtttaaaatgctaactagatgatttaagtatgtttaaaacaaattttcggtgcggcaacaatatatgctacaacatgaagactgatgaggacatcctccactattacccgctggcaaagacgccaaagtcgggcggcgaccgtgtgagcctttgaataatcccaccttgcttagcttgggaggaagaagccaccttaaaagggagagccacccttcccttattggactagtcttttagagagattaggcctttccccgagtgggtgtgcctaagaactgttggggtccgggcaaccttaagttattaggccttggccgaccccacctgagctggattgttatcatttgatacggcaaccttaagttattaggcctcggccgaccccacctgggccggattgttatcatttggtatcagagctgggcccttgttaagagggtgggaatgatgaggacatcctccactattacccgctggcaaagacgccaaagtcgggtggcaaccgtgtgagcctttgaataaacccaccttgcttagctcgggcggcgaccgtgtgagcccaccttgcttagctcgggcagcgaccatgtgagcctttgaataatcccaccttgcttagtttgggaggaagaagccaccttaaaaggagagccaacattcccctattggactagtcttttagggaaattgggttccccgagtgggtgtgcctaagaactgttggggtccgggtaaccttaagttattgggtctcggccgaccccacctgggccggattgttatcaaagactaaattaaatagctcttaagaaagtattataattggttttaaaagtcgatggatataaggaaaatcccgacctagaaactatatggtacttatcatactcgccatatcatatatcatataggtactacgtataaaaattgtatgcccaaaatggtttcttcaaaataaattcttatctaatctcatctcccttgctccttgtgttaattcttgtttcttgcatagagctggtttctttatcttttgccgttattcttattaactctcttgccaccttagtttttcttcttatgtcacacgatatttaatgctatgtaagctagctgaaatagagggttggaactaccctaacatatccggttctataagtgatatatttctaggtttacaggttgtgtgctttacttataaaaaaatatggcatacacggtttcttccatatgcaagccccatcgaataaggtcaaaaatcagttgttgctcgacaaaaatcaaagtaggcgatagaaatgcttggttgggtccagctagcataaaagcaaatttttttggaagaattgaatattgatagtactatatctctagctctaacacagttgtacctacatatatggaacatattcctttaatcatacatcaatttctagtagtacgttacttagcaccggtacttgtatttattactaattattttctttaattatagatgatgtacctatcaacgacgagatacttataatgactttaaatatgtcagatcagaccttgaaaggtgttcatatggatagagcgtgtttgtttatagagtgagtatttgcgcctaaatgtaatgtgtgtcaagaaaagaaatcccaattccgacatcgttttttaaaagaaaactgcaacctgagcaaagacaaggacagtaaaaaaacaaacttaatctaggatttcaatgacgtctactgatcttagggcctattcattttggaggaatttaaacatataggaatagtaaaagtggaggaataggaatgcatgaaaacttcaatccataggaattttccaaaaaggtttgagtggatgaaaaagtgtctatgttttctctctataacttgtaaaaaaaaactttgtttcctatacctacattcttattaaccgaatgatactcatatgaattaatccttaggaatccaaaacctttgaatttcctccaaaacgaaagaggacatattttcatgaaaacgagttaagtgttgaaaactcatgaaaatcatatcaaaaagtttcgtaaattcatgaaaaaaaatactagagataggtgtagatatgaaatacattctcaccaaatctcaactctaaactcaacttcgtttaagaggaaaaaaaagacaaatttcaggttaatagtaagaggacactattcacctgaaatttgtcttttttgttacacctaaataaagttaagtttgaactggagaattgtgaaaatgtattttatatctacacctatatgtagtttttttcataaatttataaaacttttaggtatgattttcatgagtttccaacacttagctcgttttgtccccaaacggatatgcccttcagagggtttacacaggcttacagccacaacatatggtgtccatatatgtttgcttaggtaattagaggaattcactatttctttaaatatataaatcatttgattcattaagtgtaacttgggtcaaatttgagctgaatcatacataaaactcagaatatatagttcagcatctgatgaagcaagtacaccagtagtacaagactacaagtgcacagatcatgaacaaggcgcgaacgctttaacatactgaaatcttgcagatgtgccatgcccttctcttcaaggggcttccatcttcagtcaactgtttcaaccaccaattgacaatgttattgatctgcctcctccttgtttagatctttgttctatactccattttcccaatatttattttccatgtatatgctttccaaactactaaacagtatatatttgtaaaagaatttccatacgaaagttgctttaaaaaataataatgatttatttttcgagctttttaagctaacacttaattaatcatataatactgatgtgtcgttgagatctgtgtgtggaaagggaagggttccgaagccgtaggttggaactcagataatgtccaaacttcctgttgcttcatggctctctttcgtcgtagctgttcatacatgctgatcaatggcgtataggagcttgaggttaacccctgataggaaagagaatctatagacaagcttctgtgacaatatatagccttctctctaaacaatgtgacatgtaaacccatcaaacatctatgtccaagacggcaagaccccagccagcccatgtgaagataagatgaatgaaaattgtagctagatggcccatcaacaccagtatttgcattgagcggccggtccaccatgttgaattaacaagctatatgcaatgtactttcataatacatcaccaaacactaaatagaaaaactaacttttcttttttactacatataggaactgcctcgcagatttagttaacaccatagatctttcaccagctttgtttcgtaatatgtttttaggccaacttggttaatttggcaatcccatccaccgcgggcgagttaaatgtgggctcatctcatcatctgacctcaaggtagaattttcacatgtttaggctctgtttagttttcaaaaacaaaaactttctacccatcacatcgaatgtttggatacatatatggagtattaaatatagacaaaagaaaaaaaataattacacagtttgcgtgtaaattgcgagacgaatcttttaagcctaattacgccatgatttaacaatatggtgctaccgtaaatatttgctaatggcggattaattaggcttaataaatttgttttgcagttttctggcggaatctgtaatttattttattattagactacgtttaatacttcaaatgtgtgtccgtatatccgatgtgacaactaaatccaaaaattcttgggaactaaacaaggccttagctgaaatccatatgcctatactaaggctgtgttgtttacccctctttcccaactcacttttctccttttcaaactgctaaacggtgtattttttataaaagttttctatatgaaagttgttttaaaaataatattaatcagtttttcaagtttttttctcatacttaattaatctcactataataatcacgtgctttgttttccgtgtcctccgcaatgcagcctaaactaccacggcaccatttaccctcaaggtagtatgccttttttttctttcataaaggcataagttaagggctactagtatactgtacaatagtcctagattcagtcagggcccattaatttgagatgcccaatccctatcagtccaagcaaacttccaaaaagatgtgaataattagcctcggaagatatctgagcgtttctccgagcaaacttcccataaactagattgagcatgcgagtttatttaaaaaaagattgagcctgtgagcaaaattagattgccaataagcctctaaataataagcattttctacgagttaaaccttatttccaccgtataggtgcaaataaaaatagcacaaaatattatggtttggtccaagccttgggccaaagctcgagactgagtgagttttgatggcttaattaatactccctccgtttcaggttatacgacgttttgactttggtcaaaatcaaactgtttcaaatttgactaagtttatagacaaatatagtaatatttataatactaaattagtttcatcaaatcaataattgaatatattttcataataaatttatcttgggttgaaaatattactatttgttttataaacttagtcaaacttaaagctgtttgactttgactaaagttaaaacatcttataacctgaaacgaagtagttattttctccggtcacacatatttaaagtttaagataaaatttgattaaatttttataattttgactaccaataatttcttaaatacttagtttaaccagcgcatatgcgtttgcattttccttgtaatttttctatgcaaacctaagtcgtggattttgtagtggtgggcagctctatccaatgattgccgtgtattctatgtgaaaaaaccatcatcccttgaatcagatgacaaatgacaaaaaaaaaaaacggattgcaatcttgtcaaagatacggggtaactgggacaaagacaaataacacaatcaaagatttcgtggttcctcccatacctctccatcttggcagttggttcagacatttttcatatttcctatggaatcttgcaatcttttcttgatttctctagtcatgctatatatctagacgactaacagaatttctgttgaaatcttgcagaatattatattgtttgtccagaattaacaaattaatccagtattttctccataaatcgattgagtacctaccaagtgctccaaaaagaaaagaacaagatatataatgcagttgctggaatacgctgaaatgcctacatctgggattaaattatactcaagttgcaactctgtacttgccgatctattcatctgtatacaaggatcgagcaccaaccttctaaaattcttaggctgaggagagaacaccttttaaagaacgaatagagaccatttgagttgacaaattattttacagaaagatcaaactctgaattcaaatttgattatttgacccatctcatcagtgtgtgtctgaactctgaataatgcagcttactattttgttgcatagatcaaaccaagataagggtgtgtaagggtgtggtagtggtgttggcacgtaacgtgatgcgtttttcttattttcatgagcatagcctttccgaaagagtgattttgcagtccttaaggagatactagtaggtaccaaatttgcgctaaaacttttggtatctctcaatgactgtaaaatttcttttttaagaaaaactttaaaattttaatatgaagatgcataattcttttgcgtatttttgaagaaaaaaaaagatgcatggttccctctctgaagctaacaacggtatgaagctttatgtgatcacgacatctcaagattctcacatgtatgttctaatgagccatgatttgtgagtgagcacaatccagcatttgtttgagaaatggagcaatccaacaggccaactgtactaacctcctgtatggataggagagaaaaaaaacgagcctgcaaaaagaaaaggaaacaagccaaggcagcatgcatgtgagctagctccaacatattatgttctttgtcactcaccaattagctctctctctcttggtaggtgaagcatccatcactcgtacggaaaccttcttgtcagtacaacaaactgttgccatctctgaagaaaaagaaaaaagaaaagaaaagaaaaggggatgaaaaaacatgcaacaacttgtggttgatccatgcaccatcaactgaacctctgaaagacggttcgacacttcgacaggacagtgtaatgtaatgaggaaaactgcaccggcctagctactgaaattttgtactttgaatatttcatattggaagttagtttaaaaacccgtttaaaaatataaatttagatatgaacatagataagcgcttgtctagattcatagttaggattggattcttttttatgaagggagtagatctaaacttgtgattcaattatttacagataatttaatacaaaatatctgcgttgatcaataagtagttatggggaaaaggcaaaaagaaacatgaattgtcttttcaatgttttggcagaaaacagtctactttatgtgttgttcctctcctcaaattaaagctgagaactagggccaacaagaccccaggaatcaatctagttttggtatctgaaaacctgaggagcactgtagcaggtcatatagcttcagttgtttgacggtaacatgattacatcaacatacaaaagaatcataatttcacttccttgcgacgggataattgtccctgaaatataaaataaaatattggtgaacattgacttcttgtaaattctttgatgttttgcaccattccgcaaaataatttccaacttgttgcgattttaaattcagacggccggagaatataaatcatggatacacgggcagccaagacgtggataagataacatatttcaattttttttctcatatgtgccaacaaccttaatgccgggcacatggacacatgacagttttctcagtttgagttcattatatttttttttccattccccccccccccccccccaaaaaaaaaaaaaatcttctccaaacactagtcctcaaggacattcaagaggctatctttgttccacttgtttctaactttctgtgaagggtgcattacgacataactgatgatgattcaggccagagtgattaattagtcttcaagatgttctttaagggacaagacactgtctaagtagtgattaggatggtacctaataaggattggggattaagataatctcttttgtttatttattatttattttcagagctagccaccttttggttggaagcttcagtaacatgcaggccaacatatatggcccaaatctacaagtgcaatgtactattcttagggcttgtttggcaaacctcaaacctctagattttggagtttataggttaaaatataatgatttaagcatctattcttcgtgatctaaaatatgaacaagatggtgcggtgcaaagaattcttgcagctggagctccaccaaaaggcttctatcaaaataaactggtagcacacatgaaagggtatcaactaattttaactttgaagtactgtcatctaaaaatactaattttaagttctgaagctaattaatatatttcctgttcatatataagaactcataagatgaaaaatgcagaagaacatttagattaagatgctaattaatctgatctcttcatatatctttatggggcaacaggttcagttaaaaacatacaaatttagttatgctggataacttacccagcaaattttttttgaaaggttcggttgcccggttacactagggaaaatatatgtgaccagtaaaagtaaattagtatgacgtgaacaatcgcatgcatcaattttcttatcctacgtccaggattcactactacacatgtggtttccactacatgtattttctcgctatatattttaagaatgaataatgagctacagtgataaccggccagaaactatatattgaattcagctgcgtgctcttgaataattcatgttaatcaatagacacatcaaaagaaaaaaaacatgtcgttattgagggacctccaagcgtgatgaggatagagcaattactttgccataataacatcatgtactttcagtcattatttttcgcgaatgcgcaaaagaattgcatgtcaatatatttctcaaaaccttttttttttcattttaagtacacgatatgatgtcccacattcatttattagcaatgtcgaaatctcagattaattaacatcgcacagtagttgacgacgtagaattcgttcttttctttgatctagacagcgggcaattggttatttggatcagtagtcaagtgttcagacagtaacaagatgaaccatgcatgagacgtacaaacgaaaaggctatacataggtgtagctctcaagacttcatgcttgcaaacctaactcctaagatcgattgataaggctacgaaagatggtgaaagaaaataatgttttaacatgcatgaagggacaagctaaaggtgccaaattagggggaggtcatctagcccttaaaaatttaattggtttgttaataagtcctttagctttcaaatcttggcaacagtcaagcacttaactattctcccttcatgaaagctactccctaaccactacttgttcatgggctgcaagcatggtcattgcacatatatgctgcctttatgtttatccactttatctccttagaatgaaattcttttagcatcaagataaccctaaatttttagcattgcatttgctaattaattagctactcgtgggtagtaatagctatagctaattagctacatatcaggtaactgagttaacaggtacatccatgatgtaattaaaaggagttggtagatagcccatctgatcatgctgataagctagtggcatcggctggttgggaacacttattttacatcgaacaaaaagtgagagacatgcatgtaaaggtagagcattgacatgttctgtaactcatgtgttagtcattcactcatttgtgaattgtgaatatactaattaatactaatgtcttactaagttacatggcctctgatcaatcgttggaacttacctgtatagctatatatgtgcaggacagcaggagagcaactcaccttaattcattaatttgtactgcacaacatctcaaaacaccatgtaaataaccatgacaattttgtaccatttgtaaccatctatatatattgttgcttttaggagcatccatatagatatctaataaaataaactgcacgcacagagcataactagtggtaagtaaaacaaaatggaaaaaaaaatgaaacaaggagagcaggagcggtaatatatattcacatatattttcacccaaaaaatatatccacagtaatctcagcacactatattttttggtcatttatcccacacacattcatgtaaggcataaaccctacacgtgctctacattgaagttctcaaattttcatccatggtagtgtagcaacatggacaaaggaaacaaacaaagccccttatcctttagctctccacatggagttacactcttctgactttgatcaacaaacctcaccccctctaccattgcatctgcatagtccatcccctctcttccacgatcatctccaatcccaacttccttcaaggaaaaaaaaaagagacaggatgttaaaacaagacaatatttttactacttttctagaaacctgaaaaaaatggatggacaatttataatagtatcttttcaataaaacaccaactgattattgattgaacttaattaattaccttggttaggtccctggtattgcacctccttttagggctcaattccagctgtgtcaaagcactgacctgaaagatgcaaatcaaacaggcaaatcaacaccaactagctagtaatctctaatttttcttttctttatttcttttttaaaaaaaaaacaaagactctctagctttaagccttcatagcaacaaaaatatatagggaattaagctagctgtaactaccttagggctatttactggagagcttgcggtatcctccagggaatcatcatgatccagggccttgaagaccttcttcttgagcttcttcaactccttgtacctatcaggcaacgccgcagccgcgggagcgcaagacgcggcgtcggagatcatagaatcttcctctccttcctcctcctccagctccttctgatcactgcaatcgccatagacgccatctccgccatgggagcagtatgaagaagcaccatgatcttcttgactcttcttctcctcctcggacatcatgaaatccacaaagtagtcggtccaggtgctctcctccggctgagcttgagcagcagcagcagcttgctgatcttcactagtactactgcagctaattatggcactcctcatcacagatgagccactaactaaatcctccatgcttttgatgttacaagcaaaggtggtgatagctaaagctgatcaacttaatcgtacaagcttctatgcttgtgttgtacccaatgatcgaatggatgaattaatggatggctttgcaaagatgcatacagcctggctctctatatatataaacaggagagagagagagaaagagaagagagaggtgtgaagctgaatgacatcacgaggagggaggagaaaagaaagagtaaggtggttggggtgttaagatcaacagtatatgggcactgtttccgttacaatttttttttttaaaaaaaaggaaaacggagaatatttttgccttggtttcagaagttgcccgacctaatcaatcacgcctcctccttttttttttttgttatagtgtatacgcaggactccagccgcatccccttgctcatctgaatccatgtgacatagtctagctagctaggctctactcaccacaagatgattacttgtattccttgcattatatttaacggataaatgcatgcttcctaaactaccaaatgatgcggcttttattaaaaagatttatatatatgaatctcttagaaaatcgtttcaactttataatagttaattcattcggttgtatccttggataattgtcacgaaccaatcggtcactcagcatttagctcaaaagaatagacacttagattgtcaatatattactggcagaaacctgttaattctcaattcccttgttattaccctcatatctaactacgtaagagaagtttcttttaaaaaaatacagtctctctgtaccttctcaagagccttaaattaatcgtactccctctatttttatcaacatgacgttggttagttcaattttaaacatcaaataaaaacagaaggatttcggtaataatttccacaaaattgagggggaggatatagatgtgtttacctgcaggtagttcaggatggacatacattgtcaagctcgcagcaaactttctgaggaaaaagcatatgcctgcaccaatcgctgcgttgaaattgcaagcaaaggtaggcatgatgaattgatgatgatgaacatggcgacaccggtctctgcagcagttggtctctctctctctgttggtttggtccccggccgttgttaccgttactgacggacgtacgcacgcacgcacacgtacgcacgcaccgaatccatcattagtgcgccgcacgtcgtgagagccatataagtatatagtattccttgcaatacgctgcagcaatgagcaatcattgagatatcaaacttgtatatgtatgtgctcgcgccgaagaaacagtccgggaaattccgtaccatatgacagcttaattaattaaagcctaattgcattcgatcacagcctaactaggttttcaaagatggatatcagtactagttaagacaccatgattaattagctctcaaaaaatctttgcttgctgatcagtacttgatcgggccacggtcgacaacgtgcagaccaaaacgtgttgtgtgtatggggaggagtgatagatttatgtccactgttttgatcttttgacacaaacttgagcctttttaatttcctatggattaagaagaagatcaatatagtttagtaacctcgctttgaaagtgtagttaattgatggtatcaaagccacttcattataataacaagtggcatgcattttgcttggtctaactagattacaagcaccggtttcagattttcagcgaactgataattaatttcaggtcatgggagcataacacagtggcccaatccccatcaacaacgtatcagctacggcattttgggtgatgaccacatgacacagggtgctataagtatgtagcctaattacctatacaagattaatcgtagagacaggatggctgacatgctgatgagcagtagagtagtactaaccacacctctaatggatgattgattggtgcccatgtgttgtggttgacaaaaacttcttctttgcatggcagcatggcaccacatctcctggttttctgcatgccctctggcaaacagacattcctctggaagaaaaggaaaagtgagaaatagaaaacaaaacctgtcccttgaatgagtactgagaaggcaaatgtacaacatttagaatctgtcctggagtatggactatggaggtacaaattgcacctaaaaagagagaacatttcaatagtaaacttgaaagagatgcatgcaaacaaataagacatgaaagggatctgtcatggttgctaaaacgacttcacatagacataatttgcttattttatcggtactatatttgcaacgtttacatcgaattttaagtggcctagactgattaatattctgacttgtgactgaaacaaaagatagagcagcactgtaaagcatttagtttcttctgtagggaatagcgagttttcatctaaccgatcgagtgataaacaagtaatttgtttcttctctaaagaaacattgttggctcgttttcatctgcctgttcattgtctgaatgaaaattgatgttcagattatgtgcctcacaacttctgcacatggcttgtgttttcataatagctagaatgattatggtgttgaaagttatacctgaattcgtttttgacggcgtaaatcaaattagcacttctggggttccttttgacatttcagagccaaatcattgagtttttccctactagtatgtttgaagggctaatagaatatggcccccatataagaatccatggcacgggagcattgacttattgggacaaacatattagtgccaccgtacctgccatgacttgcttacaagacctgaaataaagatgaaaatgattcagaggtacatgaatcaagaaaacagaaatattgtatgtgcaagaacaaatgtaagggtaattagggaacaaaaatcctttgagaagactaacaggctgtacagaaaatggacgaatgtgaattgtaatgtgttatatagtactagtacttatcattatcctagtaaatagtgggaatgtgggatctcagctgttgctactaatcctcgcttccttggagaatcttaaggatttgatttaatgatgttgtccatgttttaagctcagtggtggcaggcaaagcgcaggaaaaactccagctacagcttcatgctagcctgtctttgggacaaaaatcattggaaatgcaactattactccaactagtcaacagcaagaaaaggctccaaatattcagtgcagataattcaatataagaaagaatatgctgttcaatacaagacagaaacttagcagcatttctatgctgggaatattaatactatgggggttgacacatactaagtatgatcttagaataaaaccagagagatgtatgaagttaatggcaagccagttcataggatagcacggaataataatactatcaagtatgtcctaaattgcaaaatcattaaaaaaaatgcagcggaaaatagctttttgtacctatcagcaaaatgcagggtccagcagtaactggaatattttatgccacagctcatagatattaggtgctatctgggaacaatctaggtggaccattagagagtttagtctttaggtactacaaactagatatatagaaggtagctaatcaatgtgattgctgaggttagctgttgcagccaatttagaaacatggataattttgtatgtattatagatatactccaagttaaaagatagagatgcctgagaacaattgacatcaattgcatgtctccagaactcggaagcttcagaactaatgtacctgtcagattatcaattggcaaaaaacggagctgataatcaacttaaccatatgggcatacagggagcaaactaaagaagttaatatgcaaatactaaattccaccaaagaaacagcattgtacaatcaggtcacatggataggaaatctctagacatatagatatatccaaatttcactgcactaacagcaaacctagtataaatagtatgtcggcagtttgttgcaggaaggaacataaaggagaagcataggtccaaagtaagcaatctgggtaccattagttaacaaagattatttgcagcaacagcggtgagaagatggaatctacataacttgtggtgcttccagatgccacagctgcatgtttggccctagaatcatctcctgtccctgaaacatagtaaaggtaaacagattagcaaaaggtaaggaaagctcaaaacaagcaaaacgtcaggcaaatagcaaaagaagtacagctttgcatttccgacactactaattcctatcgtatttcaaatactttgtttactgaagggtacatgccggagatacatatcaaatctcagctgcaaagaatgctttttcttggtgtaattccagggggaaaaaaatgcaaaccagattgtcacaaaatcaaaatgaagatcccagaagcagaaccaaaaggcacaaccattagctgacaacacaaattctttccctatatactaattcaacaacgtgaacagattttgaaatcacatggtcacaggttccatgaaaaagacctaactgatattcaccccgtatagagtctacagaggccatagggtgataaaacaattctcacagcataagtttattctccttgaagaaggtaatattcttgcagatcaggagatgtgcaacatccagaaatttgcaaattttactgggatggagaaccactaaaatcaccacagcctacagtcctgcaagcggatgattgataagagcaggcagcaatcagccagcaaagcattgatgttctgaattcgagcccgggggaatcaacccgtttcctgttttagctccctggacgatagcagtatagcaccaaaccccagcacggcccgagtctccatcccatgccgaaatgaagtagggaccgacagggaatcagaaaacgagaggcaccaaacgctcagcccaaaaccaccgccgcgcctccctcgctcgcgcaaaccgtcgaacacgtcgcgggcatcatagggaacctcgtgaccacgagaccgcatcccgcacgagcagcaatggcaccatcacctcgcacttaccaatgctgtgagttagcacgcgcgcgcgaaggcgagagagagagagagagagggcagtggcatcatccatccgatatcgccgccgcctcgttttctcgcgcgcgaacggcggcgcgagagaagatgatgagctgctgtacatcaagttaagcgcataaaccctc

SEQ ID NO: 29261 - DNA, 537 bp, Oryza sativa
tcctagtaatgctaagttgcgtttgtatccataaatcctaatatgtaaaaggcaatatctgctagaaacagattaatctggctgtacaaaacatgaagacagtgagaacccaaatcatcaagtctgacaaagctattctaaaataactgtgatctttaaatgtgagaggaacatactgtgacgacaaggcaacactcttagcttttctccaaaactgtagtcttccaagcaaatggcacaagatgatgatgtactattgtcttcttgcacttttgtaaaaataagacttggcattgctttaaccaattgactgctcattccatgaaattcccgggttacaggaatccttcccctgtcccgccttatctggtgtctcctcacaaagaaacaagtagctagaacagcagccatagcaagcagtgatgtgaaagaaattgccatgatagaccaagctgagttttcatatactggtagtatccacacctctacatcactttgacctgaatatttcttcaaaacctctcctgaagccttaga

SEQ ID NO: 29262 - DNA, 12367 bp, Oryza sativa
ttcctcccaaaccaccaccattcatttagtgttccggtggtgatccagtgcaacaaattgggtagtaattttgttggtttttggagattgctcaattttggggcaaaatttgagaagaggatggttaagttctcgtcagagcctcatcaggggtaaaaatatcttgctcctcctgtgagagaggaactgttttagcctctctgttttgctactataggatttttccttggctgcgatgctacaaagattgttttggacctgtgcatgatgaaatgttccgtatgtttatttcgctggctcaattttgcaggacttttagctgatcgatgaattgctgttcaagtgaagcggttttaagttccaaagtggcgcttctgaattcactcttctgtactatagtattgccaaaggagaattgctctaataagatgaactgtacaaaaggagggggatttccccttttgttttgcgcagtcatttgtctcatggcccaacagggggcttgcaatgtggtgctaatagcgaataacactaccttgtcatttgatgatgtcgaggcaacttttagtgagtgctacaacttaccaagtatccttgcatttcactactgatcaacaaccaatgcaggcactgcagagtaaacgttaattgtttttatgttacgtgctgcctctataggttatgaatatttatttggatattgcactagtttgtttcctaaacaaatgctgctaatcttgtgtgacaattgatgaatgggatgattgcttttcttgcatcatgctagttgtactgtatgggtcttctagctgttgtacctgtattagcttttactaattcttctctagctatttgcatgtttctttacatttgttagtggcttagtgcgcagtgctatactagtgcctgcatcattctatttgtgttatggacaacttattggcatatcaatcacttgcagctccagaagtgaaagattcaggtgtaaatggtgcaatttacgctgtggaacctctggatgcatgtagtccattgagaaagaaagcagccaatggtcctgtttcaccatttgcactggtcatacgaggtggttgccaatttgacgataaagttagaaatgcacagaatgccggatttaaggctgtgatagtatatgatgatgaagacagtggtgtcctggtttcaagtaattctactcgaatctaccctatgtctcttatggtcctgaaatcaattttcttatgtctaacgatatgtcacccgtgattattacatataaaaaagtgtttctgtgctttgatctgatcgtttataatgtatcatgatactttcttagctacatgttagggatggctgaaaaagaattttcatcatgtctatgtcacaagatgtaaattgtaggaataattagcacccttttaaaaaaacaaaaagaagaagaagcaataatcagcatccttgtataaactggatatattacttgctctgtgcatatatatgcaatagccatttgagttttgactagaaattgttacagtggctgggagctcgtccgggatctacatatatgcggtattcctctctaaggcttcaggagaggttttgaagaaatattcaggtcaaagtgatgtagaggtgtggatactaccagtatatgaaaactcagcttggtctatcatggcaatttctttcacatcactgcttgctatggctgctgttctagctacttgtttctttgtgaggagacaccagataaggcgggacaggggaaggattcctgtaacccgggaatttcatggaatgagcagtcaattggttaaagcaatgccaagtcttatttttacaaaagtgcaagaagacaatagtacatcatcatcttgtgccatttgcttggaagactacagttttggagaaaagctaagagtgttgccttgtcgtcacagtatgttcctctcacatttaaagatcacagttattttagaatagctttgtcagacttgatgatttgggttctcactgtcttcatgttttgtacagccagattaatctgtttctagcagatattgccttttacatattaggatttatggatacaaacgcaacttagcattactaggattaatagaagtgctgttctggcgtgattgataaaatcttccatcaagatcaatattggtttatctatttgtttcctttgctgcttgagatgccaactcaattaaatatgtgctcgctggatttcattttattcctgattccatagcggagtaaatcttggcaacagtgctttatctctgaatttttagttgcgttggtggatggttccacagcattgcttgtgacaagatgatcatttagtgattccacaatgtaattgatatgaaatgattagtgcatccatttaatgcaactgctttagatagttgagtattgcattttagttgatccgttttctatgtggtattatttttgacatgtgtcatgagactttggttgtttggcttttacagagttccatgcgacttgtgtggacatgtggttgacctcgtggaagacattctgccctgtgtgcaagcgagatgcaagtgctggaacctcaaaaccccctgcatcggagtccacccctttgctttcttctgttattcatctgtctgctgaatcaacagctttgtcttcttttcggtcaacggtggcagtatctccccctaggccaataagacgtcatccttcatcacagtccacatcccgcgcttactccatttccagtgccccccgcaattataaccttcaaagatattacactaactcaccttatattagtacgagtagaagcaatgtagatctcgcaaatatgtcatcacaatggtctcacactccggaccaagcatccatgcattctctaagaagtggccatttgtctctaccgatcaacatcaggtatacaataccacatgtttctcgttctgactatggatctgccagcctgggtttatcccatgattcctgttctcaccatggatctccgagttattatcatagctctttgggccagcaacgttcttacctgatgcaccgcaccgagtcagggccaagcctgtctactatggtgctccagtcgccacaatagagtcagtagcagtacaatggcgaatcaggagaagtctatcagctgcggtttaactcgatcattacgtcaggcctatgtacagcattgtcttgattctgatggaagcttgtctgctgtgacatcggatcagtcgctaccaagatgctgattgatcttacgaagttcactgtttcatgagcatttgtgcaagcccctgctagatttgttcctgggagatgcaaataaaacagaaaaatcctatgcgacacaaaactggcaggttcatgcaaagttaattcatggaactatttcgtgccagccaccattgtgattcaacaaggttacttacattgtctgtacggaggggaaattggtgatcttaaatcgaagaaagacttgctgagttttgctgaagaagcaaatatccatcagtctacaaggaatggtttgactttgcgtattgtttgaggcttgtattataggtgatgactttagagttggtgtaatggtgtgtttcttttacattagttattttgtcatgcgtataaatgttacagcttagcaataatctgttagtcggtgaatgttttgtagctctctaatatttattcttttttgcgaaactttctaatacttattctgatcttggatatttgtgcaagtgtgtttttgttgcttcgttcttcctttcaagatcaactgtacctgaaaattctagagcatgtttacgctatgttagctgatgggagaattctaaacttaaccctatgttcactgaaatacaagtttagacgtgggacagatgtctaaaactgtttcgtttctgacatcagaaatgggagaggtcacctcttataatgccagtttggtggaggttttccataagatttctggaggtcctgatgcttgaaacgcttcatgcaaacttttgattcgttgcttgttgtgcctttttacttatttaactgagaattttcttctggacttattaccaggtatttgattatactgtttaattaatgcctttgaatcttttttacaagagcgcaacgtgtacttttacggctacaattatgacagtaccaattaccgtccgggagttcctgcatttgaaataatgcaggccttttagagcatagagatagagggagagcggcgcttagataggggcatgtttggtttatgggatttatccgtaagtttcttcatttcagtcgctaagaatctaaacagagatgattaaaaggactaaaatgtatattaaaactaaaatctattagtcctttatatgagaaaattagtattatatatacaatcgcactaaatctaaacagggatgattaaaaggactaaaatgagaaaattagggttatacaatcgcattaaatctaaacagggatgattaaaaagactaaaatatatattaaaactaaaatccattagtcctttttatgagaaaattaggattatacaatcgcaaaagagtggttttgctgaaataccaccgcttcaaaatgagttattgaaatgccattctaaactgagaggtgtttaccaaaatactatttttattttttttatagaaatattttcgctcaatattattttaatacccctgagacggcccaactatcgtactctttcactctcccagtagatctgacacttctctttcccctcttcctctctctcggacgccgtcgagagtagtggccgagaggcggacggtggccggtggaacttcttgctaccttttagctaagtttctactctctccattccaaattaaccaataaaaccaatgctaatttaaacagcatcagagaacaagaataatttaaatcgcattaagacacgatacacatatttctcccacgatacatatatcttaaaacacattatcaattacacattagttgtatcttaaaacaccttaccaattacacatacttaccaattacacattagcatataagaccttaccaattaaacattagcatacaagcatgcacacatttttcatgttttattagttatacttctttattaattatactctgatgaaattcgttatataatgaacaataacaattttagtttccaatttcagttatatgttgatcaatttaagaaattttatataattatacgatgattaatttagaaagaggaagagaagagaaggagagagtaattatatatcgaccgaggcgatgatcatggattatatagttctatttgaaaaaaaaaggctagctactagctagcagcttgtcgcatagtagtactatgcattattcgtactagtattacatacacacatacgtatacggcctggcttaattagcaggagaggagaggagaggagacggttctagcacgcatgtgcatatgcttgaaggcggggcagggcgcgattacgcttggcggcccaccaccttgtgctgctgctgatgcgcgacgcggccggcgtcggagaagaggtccacgggctccgactctgcgatcttcctgcagccggcctcatcttcttcctcctccggacagacgcggcgagcctggtcgaagagatcgacgggctgggagtcagcgaccttgccggcctcgagcggggtgccgttgatgaagccagtccgtagcatctcgtcgtcaccgttcaccttcgcctgggccgtgccgtgcctcacctccttcttgctcgtcgccatgttaattactctctctctctctctctcttcgatcgatgtatatgatcgatctctcctgatgcggctggctggatatatatataattagttaagcgatcgatgatcgcctttaatttgctatgaaggaacagaatacacacacatatatatatagggaattgaagtgatgaaagctgatgcgaggacacgcagcagcgacgtggacgctacctgttgatttacgcgcctacgtacactctctagaactctctgcaataaactcatctccatgatccatgacgaccagcctccgcgtgtactcctgcaccgacctcaatcgccaaatacagtcagtcggtggacagaaaatgcaaataaggacagagctagcaagccaattttgtctttgagtatggttaattacctcttcatttcatttgatagcgagtaaggttacctctataatataatatatatatatatatatatagtataaaatatacatattgcataagtctaaaatatgctaaattttagtagaaaatcccaatatcaaatttaataaactttataagaccaattcatccaaaagaggttcaagcacaatatgatttgagactatactagccagttgaaaaaaaaaatactgaaacaaattaagactgtgttaaacagtaaaactccgccatatacctacaggcaactaaagaaagtaaggaagaagaaaacgggccttgccctcgtcgctgctcatccaccatcgctccctgcagttcgccaccatcatcggagcttgtccatccagatccgttggacaggagctcaaggctatttggtctgacacttatgatctcgcgtgtcagatctaactgttttggtggctcaagaaggggggcaatagcttgtcaggatgatggcatcatcagcagcgacggcaaggtccgaaatttccaaccgaaatttccgtcatttcggtcccctccgatacgatattaattcggccgaaatttttgaatttttcaattttttcatgaatttgggtaatatttgttcaaattcaactaaattttgttcaaaatttctgaaatttctgaaatttcggtgactcccgatcaaaaaccttcaaccgatagagtgaaccctggcgacggcaaggagaggaggatcccaacaccaacgacagcggtggagatgatggcgccccttgagcttctggatttgacatcctcttcgagtccttccttcttcctgggtagcaagaccttaccacccactagagatctgacaacaacaagcatgccgacgctagagctggtggccatgaagtcgtggctacctgctacagtcactaaagaagagaggatggcctccatcatcaacgagggaatccattgagtggcaatgacgaaataggaaaccctaagctttcaaatgggaagagggaggtgacaggatgtgtaaggtctcaacctggacgtggagtgaagatcgattcgggcctagttaggtgattttgcatcagcagaaccatgccttggcaaccaagcagccgctgtgtgcatccatgggtgcgaaccaccatccatatcgtgtgctgctgggaagggtgacaatgcggaggagaatggagaagtggtcatgtgtcacgccccgaactagctccgaacggaaccagcccgtgacgctccaaattaacctgttaaccgataccagtcccaggaaatagtgctggtatcacaggaagacagaatatcgcaacaacagaggtctctttattacagagtaggagtacagtcatgttgggctacggacagatcccgagctcacaactgcattacaaaagaggaaagcggaagccaagacttggaccaatcatcacaggcgcgacttggaaactaggccgaaaccctaaaactcatcgtagccgacttgctcctggaagaactcctcgtcagcgggatccacttcatcttcttcggcaactggggggaggattatttatatagagcaagggtgagtacatgagtactcagcaaaccatgggaattaagtgtttaatgctggcttcaagggaaaggctgttgtttttgcaattgattttatttaaactccttttcgaaacagctaagtgagtgcttctcaaacgacatggatgagacagtgcatctcgtccggtcggagtatgtgcattgtatcagtctttgattgattcaagattggcacccggccacaactttcaagcggccacccgggcctagctgatcccatcagccacagggtttccaaacatcgaatccaaatccacaacagcaatttcacaaagcagtagtcaaacaaaactacgctaaggaatcaccttacatccacccatgaccgtgggcacggctgttcgaacagtttaataacctctgcagagggggtacactttacccacacggcattactaacccggatcacccagcccgtggggatcagccacgtcgggagacctccaagctttcatgacaaggcatttccaaagccgacacagatttaccatatgccgacgagaggggtcccagaccaacaacaggttaggtcccagaccatactgtgccaggaagcccagggtcctccccgacaccaccccggcgaatccacttgtctctcggcatcaaggctcccctgattagctaattactcagccaggggtgtcccattccacccatgtggtcgtacttgttatatgttcggatgaaattccaaaggaatcggtccttaagtgcaagaacaggaaaccgtgctcccggcacgtcccctggtctgcgattttggaaattcatttagttcgcaagcaccgacccaggcgtcgggtttttccaagtcttttgtaaaacccaagttttacccatacttggatattttaaatttgaggagaggcgttccgatgcgcttgcccgaaggcccgtgcatcgaagcacaacagtcgacaaagggagtttaagtgttcaataattcaaggagggtaattgcagcaattaggattgggaccggcaggctatctcgcaagccgcggccgaattgcttgtgtaaatcctattcatgcaatatttgcggaaaagaaatacttagatttaaattataggtgcaagatgatcaaaggtgacttgccttgctcgagatcttgagcttgattctcgaaatcctcgcattgcgggtcttcgggctccgaaactacacgcgaaacgggacaactcaacaaacggcgaaaaataaagccctattattgacctctaagcgtgccattagatagatctcgagatttgaggaattttggaagttgaacggagtcaaacggtcatacggttgagaagatattgaatttctaagattattggatttttgatctaaaggaaaaggatttagttaaacccttttgaaaaagaaaaagaaagagggaggagaaatagacttccctcaggcggctagggcgcggcccgagagaaaaggccgcggctcggccgagcttaatgggcctgccggcccgagaaggcggcccaaggcacgcgcgagaggggaggagagagagggagacggtgggccaggtccttctcgcgtggtcccgagtgggacccgcttgtcggtggcttggctcaccgtgcggagggagcacgcggcgtgcgctagggtatggggagagagacgcggtgcacgcgcgcggttcgcggaggacgcggatgcgacgggcccacgcgcagcctcacggctcgcggtggaccgcgcgcgcgagcggggctggagggagcggctaaccagggtcggctcgacccggtcttggccgagctggcgccgatgtggcacctacgtggctgccacgcgggccggcgggaggtagacaacgacgtcggccggaacggacgggggacggcggctgcgaacggcggggggaaaccacggcgatacagggaaaagcgagcacaccgggtgggtgcataagacgaggggagacgagccaacggctcggattcgccggagggagttcgacggcggcggattgcgcggcggcatccggcggcgagagaagagggaaacggcgacggcgcgacgggagatcaattcgggcgagctagagcatcaacgcgactccgggaatccattccttgcgccggattaggagggaacgcaccgagggaggccggcgacgagaggcgctaccgagctcgggcggtgacggcggcgagcacacagtgggcagcggcaaggcttggggcggcgccagctagctacggggaggctacacaagcttctatcgaaagctaaggggaagagggggaacgaagagggagaacggggagatgcactaccatgcgggacgaggcgcagtgacgatgggccgatggcacgggagtgatctctccggcctcaggctggggaagcggaggaagacgatgcgcccgaagtccccttcacgcgtccttcgcacgcaccggctctcccggtgcttggcgatgaacggcggaggcgagacagaggggcggcaatggcgcggtggtggcgagcgaaacgggaggaggaatcgatgggagggtgccttggttaaataggaggcgatgtcggtttgggaaccgacctagggcggtcaagggagagagctagagctcggcggtcgcggccaaaacggcgtcggggaggggggtgacgccggcggaagagaagagggaaaaaggaggagagaaaggggggcttgccctttgccactttgggaaaaggcggagggagaaagggcgacgcggcagagggaggaggagctctgcctccatcccttggaagctagcgcgcggagtggcggggccgggtcgtgacaacggcgatgacggcgggggcggtttggaacggagcggtgacacgggcggcaggcccgggctcaggcgcggcagagggctgactgcggcggcgactggccggttggccaccacggcgcgcgcgcgcgggaagcaacgggcggcgcggcgatttgggcggcgtcggcgggaacggcagcgagagcggagagggagggagaggcgctcggcgcggctctcgcgcacgtgcacgcgcgtgcgcgtgcggcgcacgggcagagtgagggaggggagagagagagagagagagaaagatgggccgagagggaatcggcccaccggacctaagggaggcaaaatagacttttcgagaaggattgatattagggatttgaatttgacgatggattggggatttgagatttggaattggcacggagactgacaacaagcaaagaaacaattttcgcaattagggtttttagaatttaaattttcccgctaggcgccacgatggaacgggcgctacatcatggcttcgatcggccgctatcgatagctagttgagcttagcttgtataatcatcagcggataacagtgatcagccctcaagacacagtgatttacgtggaaaaatcccctcggtgtgaggagtaaaaaaccacgggaccaacggtccactccaagcttccactataatccagtacaaatggagtcttctctagaacatctagaggcacatcacaacaacagctacaacatcaagttacgcaattggcatcatccatcaaccatcaaaactaacaagaggcatatcagcaaacaagcaaagaaatgatagatcctgtcatcttcgtttctcagctgagatctcccaagccacatatgcaaattgcacgaaacatggctgaaatgatgatctatgagtcctttccaacctttccaaaaaacacctaatcggataccgtttgacctctcaaactgacactttactaactactgcataatctgtaactgcagtaactcgagttgacaaaccaccactcaaatccggcgctctactcaaccaatcctcatacaaactaaccagactaaagtgcttaaagtgagaaacaaactcatcaagtttagtgccaatccaaccacgtttgagcctccaatgaatgacttgatgaagatcgggtaagaatgcaggctagggtttttcttcccatcataaagagataaggcaatatccaccattgatcaacatatgaattaatggctcatatttgttggactttttcggctgcaataagctgatagtaaaggcttcatatggagagaaatttggcccaaccgtcagcggaaatgctaatgggcgatcgatctcctggagatgggggcagcgatcgatcccctccccctccctcccttcacctgttttccctttttggcaccgcattactttcctattttagtaaatttatgcacctaaaatttatacacatcaagtttacacatctaaagtttagagacccaatatctaaagtttagagacccaaagtttataagtcaaaagtttatatatccgattcaagtttgaatttgaattcaaatattttttatatatagtatttctatacacctaaagtttatagacccaaagtttataagtcaaaagtttacatagccgtttcaaatttgaatttgaattatatctaattcaaatttgaatttgaattcaaatattttctatatatagtatttttat

SEQ ID NO: 29263 - DNA, 5827 bp, Oryza sativa
tttcggctgcaataagctgatagtaaaggcttcatatggagagaaatttggcccaaccgtcagcggaaatgctaatgggcgatcgatctcctggagatgggggcagcgatcgatcccctccccctccctcccttcacctgttttccctttttggcaccgcattactttcctattttagtaaatttatgcacctaaaatttatacacatcaagtttacacatctaaagtttagagacccaatatctaaagtttagagacccaaagtttataagtcaaaagtttatatatccgattcaagtttgaatttgaattcaaatattttttatatatagtatttctatacacctaaagtttatagacccaaagtttataagtcaaaagtttacatagccgtttcaaatttgaatttgaattatatctaattcaaatttgaatttgaattcaaatattttctatatatagtatttttatgcatctaaagtttatacacctaaagtttatagacccaaagtttataagttaaaagtttacattcccgtttcaaatttgaatttgaattatatctgatttaaatttgaatttgaattcaaatattttccatatatagtatttatatacatctaaagtttatatatctaaagtttatagactcaaagtttataagtcaaaagtttacatacccgattcaaatttgaatttaaattcaaactttttatatatatagtatttctatacataaatttttctaacttttgttttttttaaaaaaatttttgtggtgtagtgtagtaggaaaagaagaagggggagaaaaaagggggagaagtgagaggaagtattacctatagggggagggggggccggatctaatcgcttgggtgatcgatcgcccattaggacccttcgaaccgtcagctcttcggttaggtacacgagacaacgcagcagaaagaaattaagggatggatatagaaacgtccacgtggccgcaggagattgggcgtcttatccaagctctgggctaccaggatcacacaataatacgtacatctctgagtcttctcttttttcattatacaaagtacctacaaagtatgatccgtattaatttcataccaagtaactttaatatctggcgcttctgctcccttagcttctttgtgtggatagatatatgaccgttttagcgattttaatgggattaattttgacctcgatcggcatatatacatccattcatacacgaacagttaattcagtacgaaacacatggagtagacacaagagtagaactaggatatatagcttattaattaactgttctttcaaatacatggagtacgtatttgacagtagtatatatgacacagtaatgcatgcatatatgacaccaaaatgtgatatggatatgattaagcaggtgcagcaaaacgtacattaattaaacaacaacaattaaccctcgggcacgcctgtgttttgttatctcgctcaacatatacgtacgtaatactttgcttgcatagcatagggacgacgacattatattcttaattgataaactcaagaacgcatggagatggatcgagagatttataaatatggagcttgcttgattgattagatgaggtcgtcctccttgtgggtctcgatgacgacgtcggacttggggtaggcgtggcaggtgaggacccagccggcggcaacctggtcgtcgtcgaggaagctctggtcggactggtcgatctcgccggagaccaccttgccggcgcaggaggagcaggagcccgcgcggcaggagtaaggcaggtcgatcccttcctcctccgcctggtccaggatgtacacgtcgtccggcacctgcagctccacctcgccgtccggtgtgatcagcttcacgttgtacgtcgcctgcatccgcagcctgtctcccagcttgttgctcgccggcagcaccgacacgcgcgccggcgccggcgccgtcgccacccgcagggacatcggcaaccggacctggctgctcagtgccgtcgccgccatggctgctatagctaattaagctagctagctgctgctgctaggtaaggtagacgaggaggagaggagtgagctagcaagaatgtgagcgtgaggttgaaggaggctgaggcaataagaaggaagtggaagggtgccacgtggcgagcggcgactggttggcttatctgcgggggagtggatggggcaacgaccaccacacgatgcacatcgccgatgctgtccggccgtcttgggggtggtcgccttgcttttcttttttggtttcttcttcaccccttaactttttttgagcttttttttttaaaaaaaataatttgtgagccaatcacatgtaccttcaggattcagatctggtatctctttttcccatggccgtccattgattttgtttttcacgagaaaaataattgaacaagatgtatgtgtggtcacacacattttctttaatttcttttgctatgtatatatgttgtccacacatacgttgaatcacaattgttagattgggatttgatggtcacgagtcttgcacaagatagagtgcgatgtgcagcctctaataattttgaactgctgcatgtgccttcttccttcctgttcctggctaggaactttctccaaactaacctaacctctctgtttttcttctctcttttttgagggccaggccaaaacttttgctttgtacgatcacatgcacgcttatatgatattccatgtaaatgggccggcccaatccgcatagccgtacccgattccaagatacggcccatagaacactggatgcgatgaccagcccatcttgtctcttattgggcttgtttgttgacaggaacatccatctcatctacttctaggacacgatggaacctgcagcaggcagcaggtacatacaggagtgattgagtataaaaatatgagtggatgtataacaagagagtagttcatgtgctgatcgaattcgatcgatccaactctatatgcatgcaggaatatatacgcatgatcgatgattgtacatgatattttcaactctttaagttctactctatatatatatattgctactggccggccggccacgtgttggttacgtggtccttttgatcctcacacgacactatcagtgaacaaacacgttgtacacacacatatatacgtgtatgtgtaagcggaacaataattgattgatcaattagtagatcgagataactggagtagtatcaactgctgcacatatatgcatgtcaagcatccatcacatgttcacatatatataccccgatatgaatattgatcatccgcatgcaatcgaatcgcccttcatgtggtaggactaaaagacaattttacctcattcaattttatattacattctatttaagtcaaacaacaaaccaatttaaatattttgaatcatttatactgatagtatatgtgtgtgtaactagtacattgtatcgtaacaaaagaaaaactctccacagctagctgactcacatgcatgccttggccctagcttgttgggacgtaatacatatccgtgcattattagcaaattaatagcaattgattaagaaaatgactagctacacagattccctagggaggaaaaaaacacacatatctaacaattaatagacagattgatatatggagtgagagaaaaaaaaagatttacaaccgaaaagaaagaaaacatcgggaaagcaccactggtattgacgtatagtaatgtgatgataaagtcgtggatgcatatctttagcaaatatgtccatgaatacttagcaaatatgcaagtgaagcttgtaccatgatttgagtgagatcagatcgagatgtgctattggtttctgtctttttagtacatgttaggggatgcattctcgggtgtacgagtgtggtgttgcatgtatggtggtgtatgtacgtttattgcacaattgaaaaaaaaaagaaaaatcaaacatggattatatttcattagtgaaattaaattgtagctgggtgtgtttagttcacgctaaaattataagtttaattgaaattgtaatgatgtgactgaaaagttgaaagtttatgtatgtagaaaagttttgatgtgataaaaaagttaaaattttgaagaaaaaattaggaactaaaccaggcctaggtacggtcgcgtgaagattgctcggatccgatcgacatccaaacgtaccgacacggtcaaaccagggatgcgcgaatgtttcctatctatagtttgaccagcatgcatgttctaatgttttctattcttccggtagccactactgttctattttcctatttcattaatcaatatactaataatgactaagcatatgcttcccacccggccctatccaaattccaatctcaaccaataattaagcaattaaccaatgagctatatatgagatttttttattgtactagccaaactgattaattttaattgttgcttttaatcatttcactttgcttgtaagcaattcatcgatcagttcgtgctttgcctgcggcctaccctttttgttgcccggcactactcccaggatatatacggagtatatgccaacacgtaccatgcacgtttcttcgttttgtattctctctcttcgcgtgtgtgatccagttgccttcttttatccgacaagattaatcttcatcacttttaaagaagaaaccacgtttaaaattgctgattttttttgttgaaaattctctctgtgtctctagtatttcaagtgctgatctcgtggtttttttactcccctttgtcacaaaacatgcatgtactctgaatgccgcatctatattgtttgaaaatataacattgactactactacctccgaggacaaagggagtaatttgtacctaattaaaagcaaaacattttaaaaccaacaatattataatactatcaaagtatttttcatgacatatttaccacatgcaactttctaatattggaaaaataaacatgtttagagtttttagagtttaacttgagacatcaattatgataaatttatattacacggggtatatataagactacccacctacaacatatgcgaaatatgtaacttttttttaataatggatatataaagttggtcattgtttcaactgaagctacaaccacctattacaaagttttagttcgaaggccaagcacggtacaataaaaccatgatagatgaaaagactggtacaacaacaccaaccaaagaaaataagccacttatttaaagtttaagtttattccttaatctccatttaaaggtaatgaagatatgtatgatgattgatcctaaatttcgaccgcagcaatgcgaaatagctagcttgttttgacagggatttgtatatatgctatgcatcttctggattcctagttgccatcgtttgtcatgacaatgatatattgcgctagcttgaagaaatggtagttggacaaataattatctcattttatatggtataagggtgaaactaggtattcgatcattggcatatactagctaattgctcatgtgttacaacaagatttcacaaagagtcctcatgataatttcgatcttagaccatttcctattatctatatctatatctatacctaattaaaaaatacgtaaggcttcgccctccccttcgtccatccgccccaccccttcctcccgcgccgcctcctctttccctccctcccggcgcccccatctctccccctcccctgcagcccctcttctctctagcgccccttctctcccacct

SEQ ID NO: 29264 - DNA, 3105 bp, Oryza sativa
tcttctctcatcttttgtttcttgtgttggctagggaagacgacgaatagtattagtcgttttttcctatgtgtttaaggaaaaaagaatcctctcgtccgggaacgtgttttgacacgcctgcatccagtcgtgttcaccactaaagctcgtcgttgtcgtttctctttctatcgggaccacatacacgtcctaccactttcctcaccatcgtttggtcactggagcactggcgcccatcttccctcctcttttatttctcgccttgagttagggaagacaatgaacaatgtctgttgggcattattccttcttagtctagcccaaccatgctactgaaccactcacataatattaagaccatatgagaatgaatagaacatgaaaaattctaatttatatcaattaaacaagcgaaaggaacaccatagaagatccaatattgaagacaatatcgatgcacgttatttgttaataaggttcagccgaagcctacatccccagagcagtggtcctccccaatcaagcatattacaacgtatccgaattacaattaatgattctcggccagacgccgccgacagccgatacctctcacctatgctaagtcatcattgtcgtcatcatgtttggatctcatatgacgtttctttcgcgtttggtttccgatgtattatcggggtcggttttataacaaaatcatttctcattatttattaaaaaacatcacacttgcatcagttatatttttcagtggttagcttgacatatatacagtccatcaatcctattgtttggggtccacgtggcagtggtagtgggtgtctggtggaaccgtgactagcagaaccaccacatcactaccatactagtgtttgggaaagagggacttcagtccctctcataaaagtacaagtccctactagtatgtatggtgttgtttgggaatgagggacaccaccaaagtaatatagatattagtgcgatttctgataaatatttcatgttttcaaatatgctagctcaacgtaaattatgacattatattacagaatatggaatcatgcatgtagctataataccaacgagcttaattatctagacaggataaggttgacgaaaaggatattgttattatttattttgttctctatatatgaactggatattaagtccagcatgtgtggttcagttaagtcatcgatcatgttaggacttaggagttaggaacaacaatacacactccgtaaagtcttgtcgattggttgcttgaaataagcgttcttcagacatacgttaattataacgattaatggatcgatggcaactacagatagaagtcttttttatctttatctttataagttggtattttgagtagttttattgttttttaattaaaccttgtttttagttcatagttgtttctatagtaccattttgtagcaaagaccgaaatattttttatcatcttaaaaagaaataatcgatgacgaataaatgctgtgcgtaggaatgagatcatctgacacgaaccatactaaagtgtgatccatatgtcacttttttttcgcgaacgcgtaaaaagattgcacgtcaatatgatccatatgtcagtgactgaactacgtgtctttacctattataaaagtttaaggtgtttttgccagaattttggtacgtcatctgtctttgaaacggttttagttttatgtttcggttttaatctatatgtctactacaataaattcttcttaaaaaaaagtaaaagaagtccgactaaaaaaaggtaaataaaggaagaaaaaaagtccgacttaacgagtgattaaaaaaaaagttccgtcgtcacttaaagagcgattaaaaaaaaagcttccgtcgtcgtcagtaaaaaaaaaaaaatctcttgtccgactatgtagaaaaaggaaaaaaatcttccagtaaaaaaaagtccgtttggttttttttggcaccgatatttttttcccttttttctttgcacgcaaaagagttttttatgcgcacacgctaaagcttttggttttttcttttttttaatccgatctattcaccgcgcacctctcgggtgcttttagttttttcgtcaatgttttttgtcacctgtttttttctcccgtatgctttttgtttttctcttccggttttataatcccatctgtttaccgcacgcctcccgaggtgaaccctagcgccgcgccgctgccataccgatttgtgtattttctcctccaatttaattgcaaaaatggattccccactcctcttatcattttctccatgattttcccttcgattcggctttaattgccagttttaatctctgttctatagttgccgatgatgacggcgatcttcctcggttatttttatcccgagttttatgctctgattttggggaaaacggaaagagtagatcgagtggattaaaaaccctcgaccaattttggtttaccaagaaagattcggccggatttgatggggagatttgctctagcaaacgtatgggcacgggattatcttcgggaggttgaagatgtagtcatattcgggaagttgaagatggtagggtcgaagagaagcagaccaaatggagggaggtagcggactagcctagggctgaaaaggaaggaaggctttcggtcaaaacccagaaaatattttcattaactttttttaattataatctatagcgattccaatattaagatttttattaactttttcaattataatgtatagtgatcccaatattttaatttattacttagctctcaatatattactgaaaaatgtttacccgttgtaacgtacggacatcttttctagtatataattaggtgagaggatctacttccgcacgcatacaacgaagggagattaatttttcatattcggcaatacgtacatgctcttttaaaattaattatgtgcttattaattaattttttttgccgcggggtttctttcatatacatgatgtgagcctatacatcatgcttattaattactaataacattgtttaagtagttaattgttctttagaagaagttgaaggtgcgtggctcgtgacataatca

SEQ ID NO: 29265 - DNA, 1514 bp, Oryza sativa
caacactggtactataaatgatgacgacgacgatgaattcgtatcggagagagaagaagattgcaggagtaattaatttgttgatcaggtctgtatgtgttgtcaaaaataaaagcaggtctgtatgtactgtcaacttaaatgtgagacataaacagtgcaaaattgcacctattttaggattgagggagtactaacacaaaatagaaatagtaatagacctcctcgtgtcgtgggacttggaattggactccctcttcttctttctttcctcttctacttttcttcttttacataatagtattagtattacaatataggagtaatactaatactctttgttccttttgttggcattgcatgtttgtattggtaaggttgttcaaatcaatcaagtctagtgtagtagctaattaagccgccgccgcgagtcgacctcgcaaccatccatggccccgcgcctcctcctcgccctcgccctcgtcctgctcgcctccggcgcaagcgcggcgagcgtgggggacacgtgctcgtcggagggagactgcggcgcggggctgcactgcagcgactgcggcggcggcggcggcggcgacaagacgtgcacgcgcgccaagcccatcgacccgctcacgcacgtacgtcttcttcttcttcttcttcttgttgctcctggacctggatggattcatggatctgatgatggatagtggttgaacggagcagggcacggatctccccttcaacaactactcatggctgacgacgcacaactcgtacgccctcgccggctcctcctccgccaccggctccgccctcatcacccaaaccaaccaggaggacaccatcaccgcccagctcaaggtatcgccgccgcatttcttctccgcttccggcgcccgcggcggttggtgaccgtcacatggctgtggcccacctgtccgccacttccttttcctgccgtgtgggccccaccgctcgcttctttctctcttcttcatgagatgtgctagtaataaaaattggtactattagtattagtattgcagtccgactaggtaaacacgattttccttcctttccctccgtaaaacatgaagaatcgtaattttcctttggctgtgtgccatatgccatacagttttagccaacaatattaacacttgacgataatcgctatgctattgagttactcaacaatattaagtttctacgcaaagataactttttttttcactgtaatccaagttttactttaccaaagcctgaccctttcaatctccacaatagagatttcgatcacatcctccccttttaccaccaataataataataataatggacaacgcacctccatctttctttgcattattgctctacctgcttccttatccatctaacaaattattctgatggttgttgagtaggtctcgccatcttcgatctaaaaccaaaggtcatgcttacacacacagggtttcaccaccctacctgcccactccttttgtctttct

SEQ ID NO: 29266 - DNA, 8783 bp, Oryza sativa
ctaaaaccaaaggtcatgcttacacacacagggtttcaccaccctacctgcccactccttttgtctttcttaggaatatattaactccatacccacaaagcaagtctgcacgcaccatttctccattaccttatacacaaaaaaagactgtccttttgcaattaacacatgttcatgttatatcgccatgcttttcttccaactctggtgcctgcagacaaaatcaaactggctcctttttcaactcttctttttttcccttttagatatctggatcccttttcacttcatgttagatgtcttccctttgcctccgggcttgtgctaccaaatcacaccttattggatattaaggtcaatatccaagacaaacacacaatacagattttaaatttaaagtttacatgtatggagcttcttgcaatgacattttccatacaaagactatgaataattcgaggttaattaaagaagggagtaaacaaagaagaattaacaactagctacagcttatgcatccattttctgtgtcttagttgcctgtggttggcccatttaccagctttggcacaattctggctttcaataaatactgctgaaagatacaacagattaatggttgtttgacttaaattttcctcacatgctgcaacttatgacacggttttctattttttctttgttttctttttttgcggtgttcaccatgggaatgacttgatgcaacttaagcatgttttcacattcttatattgtttattgcctcttcaaaataactaaatcttcaaaccgtggtgatgctcaatgtgtttaaaagcgaaagagattcttgaaggtagcgattgacaagtagactttgttgtaatcatatctggttctggtactaagctgtgaagatatcgattgctttggtcttaagaaaacaaaggggccatactcactcagtttatcataccatatcatcttacttttttctttttaattggcgttctaaagtaggaagttcttataccaaagtttataaatacagttgttgtatttaaaagtgtaaacttgatgcagctcctttttctcatcacacttcagaattaagccactcctcaacagtgacggctgaggattttctactcgtatgtctttgagggtggaaaatccacaaacatgttccagactctgtgtgcactcttatggtttctttaaaaaagctggtcgcaagccttttctcaaaaaaaaaaaaaaatccaccaaacccacctaaaaatactgtggcctattttgcagctactgaataaattcatttttttaccacaaagatacaaacctgtatcttgtggttgtccattcacactctgaattttgacttgttatttgttattaaaaaaatttaaccattggaaacttacttgataacatgcagaatggtgttaggggcttgatgcttgacacttacgacttcaataatgatgtctggctgtgccactcatttcaagggaaatgctttaacttcacagcctttgtaagatgatcaactgggcatttctctctttctcctatctctcctctctctcacaccgagagtatgttgatcttgtaactctaacattgagttggttttgtggtcagcaacctgccatcaatgtgttgaaagaaatccggacgttccttgacggtaacccttcagaagtaatcacaattttcttggaagattatactgcttctgggtctctgccaaaagtattcaatgcttctggactcatgaagtattggttcccagtggctaaaatgcccaagagcggtggcgactggcctctactcaaggacatgatcagccagaacgagcgcctgctagtcttcacatcaaagaaatcaaaagaagcaagcgaggggatcgcttacgagtggagttacgtcgtggaaaaccaatgtaggatttcaaaacaaaattggtgatgtcagaacgtgaaacatttatgttcttatttgacctgttatcttttgtctgtgcagatggaaatgaagggatggtagagggtaaatgcccgaatcgtgcagagtctccagccatggattccaaaagccagtctcttgtcctgatgaacttcttcacaacagacccaagtcaaacaggggtttgcgcaaacaactcagcgccacttgttagcatgctgaaaacctgccatgatctctcgggcaatcggtggcccaattacatcgctgttgatttctacatggtacatcaacttgggaattgtttcactctttaatccatatgaaatatgtttggacatcttttgttattataaatctccactctgaatcatgcagaggagcgatggtggaggagctcccttagctactgacatcgcaaatggtcatctagtatgtgggtgtgacaacatcgcatactgcaaggtaaggacatacaacatttctcttggccacaagttctacttgtaaaaaacaacatgttacattttgataaaaataaatgttgcataccatggaaagctgaatcagaataatggtgtagctatttattctacatatttatgtgatattttgcaatggaaaaggcaagttaggttgcatctcatcagcaagtggatattgtgtcaagtctactcttagatgttaggcagaacaataggtgatgggattatgaatgatatgtcttaatgatgaaaacggggccatctatctagtagttaatgttgcaaccacacctggctgtttacttggatcagaacttccattgcatttcttgtattgtatctgcatgatgatgatgttgttgtgacctctgagctggaggcgaatttgacattcggaacatgtgtgatacctccactttcaccgccgccgtcgcctcggaaggcacccagcggcggcaagggcacaagtgcaggcggcagctccagttccagcggcgcaatggctcgggttgtactaccaaagctgaccttcttcttcggagtggcacttctgatcctggtcatactctcttattaagagcagacccattcacttgagcttgtgctgtctttgtgctctgctggtacaagcacatactgtactgccattctgaggcaaaattttctgctctttttttagccacctgttccattggtttgtaacttctttttcttttttgttaatgagagctgtagatgccagattagctggagaaattgttcatgtgccgagctgtagatcattccttttatttgaggcaatatttttctgcatatcaagtgatcttattgctcataaaataactgcaatcgcattgtaaaaaaatgttgtggtaagaccttttacaggtgcaaaatatgcctattatgcatagacagcaaatggaacagattctgcatatgtcatcaggattattcttgatcttatgcactttatgttccaagaaattccaggttgtgctactagctggatgcctgattttttcaacttagtcggtggataacagcatcaaactaagcatatattcccaccaagattgttctttacacgttctctaatcagataacaatctgtttgaacaactttgtcggcatggtgtatgtgtgtaacccaagtagtaactagaaaaatgtcgttgatcctttccagggataaggaataactggttagtcagttagctaaagcataatctttgtacacggacacacgacaattgtctaaatgcatatgggaactactgactaatctttggacaaatatggtccaatgggggtgttttaataaattcattcatctgccttgaacatgtgagtgacaattaagggagacattgatctcttataatcaagggatctgatgctttgctatgccagattccactgcaacagtgatggtccattgtctttcctgtacaacatgtcaccagcataaatggtccctggttacctgtactcccacaatttatgaacatgcaacttttttttatagtagtatcacaacgcaatcaattgtcccttatttccagtgacattccttaaaaagaataacatgtgaaattattacatttcctaaataaccttcacatgaaaaatccgatgggctcatggtatgtaatataattagaagatacactcatatgtgtgtgtacacgtatttatatcccgtgtgatcgaacaaaaaacaaatttgcacgatcactcaagtaatactttatcatatattatattagagagtgccattaattttatttggacagtttgtgattaatttttatttgtattgaatatcacaactggatgatcaactgcagacattaagaccccacattaatgataataccatcatcaattgatagttcttgtttctctagtagtaaggagtatataggggataaataaaaagaaagaaaaaagaaagaaagagtagaggatgagaggagagagatgctttggtagtccggggcgggctaacaagaaggtaggattggatggatataggagcctgccttgccttcctcataggtttcgtttagctccccctacacccagatcacacacacagacgcagacgcaggagggagaagaagacgacccaagtgatgctgatggcatctcgtctcctgtcctgaacccttttccttctccctttcaagaggaaatcaaatcataaaggattctacaacaaggaagagtggccaaagtgttgtggagtggctttctcctcttcttcttcttccttcgtgcggcctgcggccatggccatggccaagcagcagcgggtttaccaagtctggaaaggcaacaacgtgagtgagattggattactcctcctcctcctccacgatccctctcttctttctttcttgcgcccccgtcccccttcttgtccccataatccgcgcttttcttgggttcggatcgactgttgattttgcccgcttccatttctgtctgtcccgttggcgcctaacatttcgcgatgtgatttgttctaacctgctctgacgaatacttttggggattagataaaggaaactgcttccggcccatatctttgtgtgtggttagctaggctagtttattagttaattggtttgtgcgcctggtttgtactatattttactacactgttgatgagttagatgaataaactatcgttaatcagtttggagctttggggccattctggatgataaccctcttttgtttccaataacataatccaattgggacaggagtcccaaggtcctgtctttctgcagctaattcaacctggcttcaggctgcataaaaaataatgtgctacacttgcaaacattacgttgcttaaatcttctttttactcttctctttagaattattgctttcagcaacttgtcttattcagagttcaggctagtgtaaaaacaatggccttgataggagttctgatggagttggacaactgcagattttacacaatatcatatcaaaccttttaggatttcggaattttcacctttgcttgcagtttataccaccagttaatataaacatttttaatgtgtcatcaacgtgtttctctttgttcagataatcttgtgcggtggaaggtttatctttggaccagatgccaaggccactctgctatctttctctctaattgcaatcccggttgccgtcttctgctactttgtggcgaggcatctcatacacatgtttcctgcatataatgcagggtatgcaattcttgctgttaccatagtcctctcaatttatgtaagtaggctttctgtgcctttgtacttcagaattatgctaaggttcctgtgtaggatttgtcctgtcaccaacaatcatgagaaagcaactttattttagacccttcaacagaaaacctgatgtgattgaaatgaaagatctgttgaaagctgctaactatccatatggaacaaataatataatcatgaatccagcagtattttggaaatttaatattttaacaaattgttgcatcttatctggtaatcagaaatgcagaggtcaatatgttagtaaagctgtagtccttttcatgaggtgaattggtaattcactggggttcgtcatcttcattgccttaaaatgttgtgttgttaatacagttgacaaaagcgctacgagcatagtttcactaatggaaagggatcttataggttccttttagtttatcaagtgatggatcatccgagttgtgattataatgacataccctgtttcaaccttcgatatatctcattaattgatgaaccaaactttttttgtgtgtttaccgagttatcatcttcgatgccctttttagaagatgttcactggattgattgatactttggtcttcatttttctcagtgcaattggtcctcttttcctcttacatatactcagttgtatatattatcatgatcatttatcttactggtctccaaaatttataaaaaatattctatctctagagtgtgtagattgttttatcgtattttatttcacagtactttttacagacaccgccaaaatcataggatccttctctgcaaaacctgattgttaggtactgttactgctcttcttgacctcatctcaagatccaggtattgtaccacggaactcacatccacctgtggaagagttttctcatgatgcttcagctccacacactcttcagtttccacgggtcaaggagattttggtcaatggtgtacccgtgaaagtaaaatactgtgacacttgcatgatatatcgacctccgcgctgctctcactgttccaaatgtgataactgtgtcgagcgctttgatcaccactgtccttgggttgggcagtgcattggacaggtctgttatgtttaatttcttttcaaaataaaataatccagctatgggtggctttagtttctacaccctgacagctgttcatatgaaaccatctcagttaatatgcttttatttcccctttgcagcgcaattatcgctacttcttctgttttgtatcttcagcagccatcctgtgcatctacatattttcaatgtgcgctttgcacatcaagcttctcatgaatagggatcatcattcagtgataaaggcaattaaagaatctccagcatcagtggcaattatggcatattgtttcatctgtttctggttcgttggtggtctcacagggttccattcttacctcattgcaacaaataaggttagtactccaattatacagagtgaatggtaaagtataaaatgtgtagcctttctgctgacaaaggtatataggtcacctttaaatatcatgcagaaggtttgtatgtagttatgtacataaccacaggtccgaaatgcctacctgctattttgaatttagtgcactagtgatcaagtcaaatctcactggatgaatttttattgagaatagaaatggaattaagtattgcaatgatgcatcatgtacactaattctttcttgcatttatgaaaaattgaaaactatgatctgaattgaatttccacttccttttttgaagacaacatatgagaacctcaagtacaaatacaacaaccaacccaacgtgtttgaccgtggttgcatgaacaactgttctgaattcttctgcaccaaaagagcgccttcaaggatcaacctgagagcaattgttcaagaggaccatggggtagcaccaccacgaatcagccgttccaatgtagcagaagaggagacaccccaccgtccacgagccaaagtcgaggatgatcttgagatgggcctcgacatccttaagacctcacaacgtcggtcagatgaactgggtgacgaagagttgggagttgaaagcaatggcgtgaaatatcgcagagctgactgctcacctggtttagacaatgagatcccaattacaagaactaagattgagagttctagtgaggttagagatctggagatcttgccaactggcaatgctgcactcccttcatctcctgagaagaaacaacatcctgatgtactttgttgacaaatacatgaatgtggctgtgaaaagtgaagttgttttcatggattgctgacaaccaacaacttgttattcatcaggtgtacaaatggaatccggatgtcatttgacgtatgttgagtgttgccatctcttcctgggattttgagtgggctgttgattagtcagtcatatcatagggttcttcctgtaacgatctcccgttaagcagtttatgaaggtttcttttttttttcatctaggatttgtttccaagattgcaggaatggtgcttcattactgttaagtgttaattgtacataatctgcatgcctatgaatcgatcaactgatattgcctcctttccaagtggctccttcaagcacatatgcaggctgtagcagtgtagcttctctcatatagcagctatgatcctaaaggataccaagatatatagaccgagtagataaatcacattcgcaagtaagatgcataccctctcgagaaactagaggagcctggggttgttccacttccaacctccaaatacttacatgatataaatgtagtagcagcaaacaactgcacttgagatgtgttgccattctttgttcacatctgccacacaagaagaacagacaactaaatcaacagcaacaacaaactgcacctgcatctgcacacaacgagactgactgatgtttatactatccacacacactgacacgctatacaaacacacttatagtactgatgtatgttattcacaaaccagcttggtgtccaaactgggccaacagatggcgaaagccttgaatgct

SEQ ID NO: 29267 - DNA, 1265 bp, Oryza sativa
agaagagattcgccggctgccatgctgacatgacatgaggctcccagcattgtacgggggctgtgtatcgtagacaacgaatttggtgccaagaaaatttgacctgtttgtgtttgcagtgtcagatttcaatgcatatttctatgccaaactcaagttaatgaagttaggcaggaacacttagtgaaggatggtgcatcacctcatttttccaacataaccattacttgaccgtgagatgtttttagaatccacagaaattatgtattccgtagaagttgcccgacgattcctcttagctgcaagaaggaattttccattctcgctgagcacagctacatgatcgaaatcatattattagcattgcatccatctatgtttctaaaccaatgttaatggaaaaaagaataaccatgcgtgacaactttcatgtatactgagaaaatgttcggtaggtatttaaatattaataagagatgcggttacatatacttaccagggctaagacacaggtagagataataagttaattttgatttgtcccttttgataaaacactggattaaaccatctcgaggcccaggctgtacatgaaaaatcaaagttagacaggtgcagacataacttgactgagatcaataaagcttccattatctaataaaagacaggtgcagacattcataagaggacacatctatttgcagaatctagtctttaatttcaattgcctacaagaatttcagtgttacctgataaacatagcatctgctatgatttgaaacacaaccatttgttcgttttggttgttctacactacaagtgtggcaaaagaaatataagctatacaattctttacacttttaaaaggagttggggtgatgatgtgccccacacccatccccagtccagaatatccttttggctggctatccatagactacatgtgttgttcacaagaactttggtaagactttacattcttagcatatatctaggtgcttgattgatctcatgtaatcatttacagttttacacaaaggtaccatacatataattgaacatgattttacctgttttagagacacaggaaaagtgagctttccacagatttccgggctttgcactatatccttacatatctctctccatgttcggcagactgctgcacaggcaacaacatctttgcgggacggccaattgctctctccttcctccagtcttttcatcacatcacggagtaattcaggaggaagaccaacccatct

SEQ ID NO: 29268 - DNA, 3287 bp, Oryza sativa
catgtgttgttcacaagaactttggtaagactttacattcttagcatatatctaggtgcttgattgatctcatgtaatcatttacagttttacacaaaggtaccatacatataattgaacatgattttacctgttttagagacacaggaaaagtgagctttccacagatttccgggctttgcactatatccttacatatctctctccatgttcggcagactgctgcacaggcaacaacatctttgcgggacggccaattgctctctccttcctccagtcttttcatcacatcacggagtaattcaggaggaagaccaacccatctgctttgatctactactacaggtctgtcacgcagctcgctcaaagatccaagggacttccctctgtgatggccagaaagaccagggaggcctgaaattctcacctcgaaactccgtcttgataagctcccgaagctgtccctaacatcacggactatgctgcggaaagacatcccttgtgaaaaatgcacagcgaccaaactttcacctgatgccgcgtgaccaagatcttccacttccaattgagcttagcagcactgcatatgcacaagataaaacatcagcaactgctgagctcctgcaatcagaaagtacgtggagaacaaaatcacagtagtacaccatggtaataccttaagtaatcttgttctgatttgcaaatcgaaacatcacccccaaaaaagtaacctgagaaggacaaaagtgattactcggtgatgtcagagcaatgaagaccacaaagcagttagtgccatggaataaaactaaagcatccaccatggaagatgattagtagcattcaacaaggaatccaggacaaataatccaatcatgtagattaagtcaagcctactctagagcataccattcccatttgaatagtctaaagtggtgggctaccgcggttagtgagtacaagttattgtcacaaacttaatacaagatctcaacgtaggcgaccaactccgtgatggtgaaaggccaacaaaaggccgcgttaattacaaataatctaattacatcatacaccagcgttgtaaaattttgaccccttatctgctgagactagagaggataaaaggttggctcttgttatcccaactttgtgatgtgcaatagattgcatatgtcctatgttggtgaggagaaattctaagatctgcaagaactttgcacaaggggtagggtagagaagcgaagcgctgtttgagtagctagagaaatgaattggataaatataaatgtttctgtatttttctatgcgaagtgcaaaaccaaattggacacaagaagagaagaggaaccaaaacagaatttctcctgaaagacggaggaggagatggtagggatggaatcaattaatcaggcggaagaaggaaaaggaacatccgtatcttaccctctccaaatcaagctccccaacttattcagaaacctcaaatgaaatcagccagtcccccttgcaaagatccaacttttgcagcagaaaacgtggcaaaggaaatgaatctgcagaaagcggccaactttgcagacagacagaaacctgggaagagcacaggttcaattcctgtgtgtgtcggctgaaattaaccttggatctgaaaagaagaagaagaaaaggaaagcaagcttccgaccggaagagaaggcaacctcctcgatggtactggtatatggttgtggtggtggttgcaggtgcagagagggaagagagcaacagtgtgaagcagttgagagagaaacagcaaggggatggatcatggatgaactctttatattatcattatgacttatgaggtcgattgagatttggcaagatacgtactagtagcactagtgtatatatatatatatatatatgaaaacattattccagtaaacacgaatatgaaacgatttggaagataccgagcaagtctatccaactaacctcaaccaataaataaaatgtcacccaaccaaccaaagttaattagtagtattgtttactttttgttgataaagagagcgagtcgattagctcaagctaactatccggtgatgattaactggtgggccgaattcctgaaaaaggaagatagaggaaggcctaattttaacgggctgcatgggcctcacctccttcaggctggccatgcccggttgcttgttgcgtctctccgtcgtcgtctttttttttttctaaaggcatgctcgatgtacatgacctaccttaatattatcgtagggcctataaaaatatatcgtcatacacataatgtatatgataagagaagggtattaagatggatcccaccaacctaagagcagacattgagagagtgagagagagtagcactaccgtaaaagatagaagagttttttcccttgtgggtagtctttatgtacatatagctagctcaacgaaatacatcccataaagactactctcacaaatatataaggtctattttagaggcttaagacaccggctattcttcctacaatatcattcctctccttctcaaactccttcatgttccaacgctctcaggtccttggactcggtgccctaaccttggggctatagcggtggttgggtgatggcctagaagcagtggcggatctagaaaatcgattcgttggtgttataatgtgtctatcggtgtcatagtatgctgataatacttagatcatagtgttataatatatagataagtagttttgctatagattttgccgaaagtcgtcggtgttggctctagtactgtagatccgtccctgcctggaaggtatcgatgggtggctagaaccgaacaggcagatggatttgagtgtttggggataaaagttttatgtctttttgtataaaaagtggggttggattggaaggttttgggaatttgggtataatccctttggtaattatgagatgaaagtttcatggaagagttttgtgatttgagataaagttttatatttgaaactaaaaatttatgattttcgaaatgaaagttttaacgcacggttaaaagtttttgaagcagagtccgacttgtgtgaagcggcaagcgtagtcatgtgtgcgtgatttctgttcgtggcgcatatgcatgcgcgtgccagcatctcctagaagatagccatatgcactagacgccatgcatgtaattaagataaatactcctagattggaaagatcgatatatatgtatcaccttaattagtacattgtaattgatattttttttctgaacgaat

SEQ ID NO: 29269 - DNA, 2692 bp, Oryza sativa
catcatgattcaacaagttctacaagttttactcatattttataaaatttcacttggatattaattattagacataacatagtgcaaagtaaaacttatgtcaacatatatgcttatataaactaaaagtattcgctaaaccttacacaaagtgaaatatgcaagttgcattgcccgttgcaaattgtaaccaattcctaataagtaggagtaatattgattctagtgttggatcggagcttgatgtgatataaagctttcttgatatacgtactgagatgatatgtatgatcccattaaaacaggagcatgaatgtagatatgtactaggatcacctatatatttatcgtctaaaaatttaccagatgtatttatagtacaatcataatataattacactataactttacatgtaaccttgtatataacttttaagaatctctccgtaacatgctatttcggtgaaatggagatcatgggaaaaaatcctctcatatttgtgcgcgcagtgacttttttccttcttcacttgcacaaatcttgaaacaaatatacagttcaaaattatgtgaaagttacatgcaagttacagtataattacactacagttgtactataattgtgctgtaattacatctgtcaaaattttagaagaaaatttgtcgataaatatatagcatggtctaattagatatatagtttgtacagcagggttcgtgtccatgagattgttttcgtatgccttgacaaacccaagctccttagtcaggtaacacacgtacggttcatttactaattaatctggctagctagtatgttatgcatcattttctctttttttttcttttgcggagaattatcatgcatgcatggttttagttaattagttgcatttatattgtgcaaacattatgcagttaactattattgagtacaatataatatgcagctatctgcgttggtgtctgaggttggactgaatatccgtgaagcccatgtgtactccacactcgatgccttttctctcagcgtatttctcgttgatggttggaacaaagaggtaccccatgtcctaaattacaggacgctatcttttaaggaaaattagattcgataacttttaactaataattttactgattatatatgttaagtattatgtatgttatatcattatatttatattttaaagtatttttattgatgttaattttatatcggttgagaacataacacgtacttaaaataacgatcaaagtatgttatttaagatcgtatgaaataaatatatattatacttttgactgatcaaccaaccatgaaagactactactctactaattagtactctaattattaagctagtacgtgttgtccgcaatatttggccattaattaattagctaattcatcgtctaataactgcaattatataaaacttaatttcaggaagcgggtggattgcttaaggcaatcaaggagaaggtcatagtatggcttgcagatcagatgctgagagccacggactgagaaaagttactaatattaacgatcaacctacgaattgataggttggtcgagctgcacattgtatcatcttcgtggagctagggctcgacagacagatcgagatcctcgtcaattaatttgcactgcgcctgtatatgtaataatcttccagagagacttgcaataacacggttgctggtaccgtagtatgtcagctagtatgcctgatgacaaaacaaattagtttgctatctgttaattgtaatactaatacttatttaattagtttgcaatcttgcagaatatatggtggcctatctgtagatagtccatgtttgatagagatccaacttctaaatttagcttcaggagttaggtctgaagtggagttgtggagctgcctaaacccagctccacctcaccagaatgtgacaatttaagagaaccactttaccaataaggagattggtaaagtaatgccatgaacccagaggacattaattgtcacatgggcacctcaccaataaggagaacctccaatgtgacaatttaagaaagttgcaaaatctagaatataatatcgccgtagctatttcggacatccgaaacaagttttcgcctggagaatccaccagagacatgggttagagagagagagagaatgtaactaatattcgtaatgcccaaaataccaaaaaaagagagaagagaatgtaactaatattcgtaatgcccaaaataccctcagaaaccctatccatccaccgtgcaactctctctctctctctcgtgcaacacacattctctctcgtgcgactcgtgtagcggcggtgatctgagggtgtggcggcggcggcgctccgagtgcgcgcggtggagctctgagggggtgttggggaggcgtcagcgagggggcggcggcggcgtgatgcggagccccgccggcgtccgctcgtggaggtagaaggcggcggcggcagtggggtccctctctcttgcctctccgccgctgccccaagcccgatccaccgcctgtaccacgtgtcgttgccggatccaccgcctgtgccccgagccgccttcggatccgctgcccacgcctcgagctccgccgccagacccgctgcccgcgcctcgagccgtcgctggatctgtcgcctgcatcccaaatacaaaatgatt

SEQ ID NO: 29270 - DNA, 9164 bp, Oryza sativa
aatctatcaaacttgagccaaaattattacaaatatgttaaaatatttgaatatatacacggtatgacatataatagggtcaaacaagtaagatataacagggtcaaataagcaagggcaaaattgactatttacccctaaattaacaccgttaactcacccaaacggaataggtgcttcgtttttgaaaaggagggtcaaataagtaaacttcaaaaagtaatgttaaattggtagttacatgtcaaaacagggtcaaataagcaattgaccttatgaatataccaacttgtcactcctcttttctttttacatggcaccgttgatcaggatgttttttccctcaaactttgatcagcatttatttaattacttagttataagtaaagtaaaagaatatcacgagatctatcatcaaaagtactttttaagtgagccttatatgcctatctattcatatacatatttccagaaaacacgaatagtacgtcctacgaattataaaagtcaatgcatcatatatattaaaaaaacagagatagtaactgtaaattatggtggatttagtgtgcatacagattgtaaagttctagggagatcgacatgggagttcatacataggagtataagataaacatggcttttattaattcctgcagccttagctttaaatcttgagtttcaacggtatctttgtgttgcgtgagatgaattaattaagcggccggcagcacctcaattggtctaataattaatctgaatatcacaatatgcacgacaaattgactttgcttagtgggcatccatatataatagcacgaggtagaactgcaattgggtacctatgcttggtaattgaacttattgcattggtttttccgacaggagtgcttgatccagtgctcctccacctccactagttgttaccagataatttttaactataagtctatggtaatagtagtatttgtttaggtttatacataaaagttgatgtattttggattggaggttgtatgtcacagaataaaaattaagatatgtcatgacattatatatacggagaatgataattagaccccaaatccaaccactgcgatacttcacaaaaaaatacgttaagtatacatgtgtgtgtatatatataaacattggacatgtttgggagcttctgatggctgtattttctcctaaaatccgaacctcccacaacaatacaaacaactctaaagctatagaccggcatgtatttatttactattctttgtctagatttattatcttagaagaggtcatatattcccttaattaaattaagttctgtaacgcattgtaaatgcagtcatcaaattaataatggttcctagttttctccgtacgttgaaatctctgtcccaaccatactagtagctgctaggtcgctaattaattaactaaactgtctcaagtttatcgagttgttaaattgttaagtgaacttggggttttcaccactgcgtgctcttcggtctaggaatctactgtaagcaagttactaataattaatactccatcgttctttacatcgtacgtgtttgataaagctcctaacttagcttcgtaaattcatacatctatgggcctgttcactttaatgtcaaaaaaaactttatatagttaccaaaattttgacaggatttcttatatagttatcaaaatttgacagcaaactaaatatagccacttttttttacaactttaacaagattgaaaatgacatcaaaatgaacaggccctataatccagagctccaagatctaaatatgtaattatgttgataatatttaaatacatcatttttttattttcaataaaacataaaatattaattactatttcctccgtaaaaaaatcaatctaggagagggtaacaaactacgagagccagtatatatgagagaaactacgagaggcagtatatatatatatgagagaaaataaactcttaggttacatttttatcatatatttttaatacaaagtatagtgataagaagcgtacgtcacgagtgagtcaccttgtttgtggagttttttttttgtctttataattatttttaatatagaagaggaagaaactgcggtcagagtcacgcctttctgtgggccccacccccaaccaaaccctcaaagtcgcagcttgcgtcatccaggtcccaacccggtgggccccaccgcatccgcatccacccgcggtgtgggggaaaatcccagccgtccgcagttaccatccgcaccgtccatccctctacgcagatccgatccctttccgctccggataagagatgccacgcgtcgtgtccccattggctggaccgctacgtgtccccattgttcacacggccacggcagatcggaatattctgaaaaggaaatactactagtagaaacaaaacccacagaaaattgaattcaaaaaggaaatttaaatccgttagtatttcaagcccagtggtcgtcgtcgtcttctccaaactccaatcggtggtcgccggccggagcctgcaccaccgccacgcacggcggctataaatacgaggcccccgcgggcgcgagcacgcaggggcgcagagggggagatggaaatggaggcggaggattggggggagagctcgtcgccgccacggccacacccagaggcagacatggtgaataaagagaaggaccccgaggagatgaagaggaagctgaaggagcgaatcctggagctggagaaggaggaggtccccctccccgacgacgcctccgccttcgtccaccacctgtcgcgcctccccaaaaggtatctcttcgacctcggcgttgacagggtggacgacgtcctcctccactggaggatcctcacccactgcgcccacccacagaatcgccccgtcttccacgcccgcttccaaaagtccattcctctcccggattccgatttcgatccatgccagaggctcatggaagacctcagcttggagagaagaagaagaaacgacacaggagacaacaccggctccatgtccatctcctctaggttggtacttcctttatttcctcatctttccatttgccttttcactttattattatgtctttatttgtttcaatacactagatgaaccctcgcgttgctgcggaaaactaaggaaacatcatgcatgccataagcacaaaacaaaacccacaatcacatacctttaaataacatagtatttgatagcttgcagaatcatagaataggccaaatatatgttgagcgacctgcaaacaactcaagaataatatgaaataaggtagatatttagctgaacaaacactgaatcagtacattagaggataataaagcatacaaatttctctctaaaacatcacaggatcgtgcaatgtttaaggatatatttgtgttgagaatgagaaaaaatgtatacctgctagctatgcatccattttttcagagctaaaatctatgaataccttttaatatcattttaattaaagacaaatctagttagtggtaaagaaatattgctcgctgagtacctgcagccaagcaagcaaatcatcagatcagattataaagtatatatgagatatatacatcaattagccaatcaaaggtaaaaggattaaagaacaactgttagtaaaaaaaaatgatttccataaagtgaacacaatattattgaataaaggggtgcatagtgataaggatcagtacaccacattctttggtcaagctcacacaaagcaagcactgcaagatctggttaatggtgtccaaacaaaatgatgaaaccaagcagtgcagagaaaagccgtgcaaactgctgataatactgtaaaacacatcaaaaggtctgggcaaagagtttgggttcctgaatgttacagaagaaacaatttgtcaaatcgcagtcaaaagggtgcaaagtgtacatatgcagtacccagtctaacctgattataagcacaatctaataaattggttgtgaaatacttacattaaaaaaggttgtgagatacttgtgcacagatggcactgatcctgttcaaatgttgtcttgcataaatctgaagcaaatcaaacaaaaataccagtacgatatcaatctcgttcatagaaattggtgtggcaaaaattctgcagtagaaacagaggcaacccaaatacataaggcttagtgtagctgcaattttgcatatacatatataagaattaagaaatcttgtcttatatattttgtcgactcctagccttaatagattccatacgatattgtatggataattaagaactgattcgatttttacaaattgtcatgtaactggaagtgaagaaacagcaatcctgtactgtcgaaagtaaagcatccccatttttccattatcttaatcatggtgatgatgcatatggttgggttggccggtcgcacggggatgatggattaagagtcttagaagctgacgatggtatattttgaggacttaaaaaaggcttaagaagatactcccgactgcttgttgctggcgatggtttcagaaagaggaatcatcccgtgggtagctagtggtaggctggtagtccatcagacaatctggagaagaggaacagacgacgccagcgaggtcaccgaaggggattggtgtgcgcgacgggggtggctgatgtgaaggagcggaacgtacaggcgtgaggagcagcagtgcgagaggaggggaagcggcggcagtgttggccgatgcgccgcacttgtgaagggatgagagcgggcggtggttgcgagtttggggatgagagcgagcagatagggaggccgtcgggatgggctcaattcagttgggctttctcgtgtgcattgtgcaagcaataaccatcaaaccgttgagttttggtccaacggctggcattcattttgatgacgtggatcaaccacaatgcaggaaattgtgtaataactacactaagtggggatcacttatatagatttataggataggataccatatatatcatactcataccttatacaccccaactagtatatagtacttactgcctactgaattcccttcctacaggtaccccaaaactaagcttattcatgagattatcttctcttccctggacaagcccaagcttcttagcagggtaataattcattttccatctcctacttctgctttcctttccatattataattgccaacttacttaccaccaatagttacttaatcttttcaacagctcactctactcttgtctgaggttggactgaatattcgtgaagcccatgtttactccacaactgatggcttctgtttggacgtttttgttgttgatggctgggacacagaggtcactctataaccatgcctgtttctacatccatctataaactctctgtgattaccagctcacatttcacgcacacagataatatcgtttactctttcattatgtgctcttgtatatgcaagtgttgcttgctcattttgcaacttcacatgcaggagacagatgatttgatcatcaagattaaggaggcattgtcgcacaaaaatgtatgatgccctttacactcaacctactttaattcctttccgtttcggtcatcataagtcatccgcatggtttttcgtctcgcttgtttcatgtaaatgcagtaccacgtgcaaagctctagtttcactcacaaggaaattaccgacatttcctaacagacttagattaattattccatgtaatatgtaggcatcaccatctaattcaacaaattcttcagcctcgacaaatcagcagaaaatagctgagctacaacagcaggttggagattctgaaattgactggaacttgctaacaacaggggaaaagattgctactggatcttctgctgacttgtaagaattatttggcacttacagtttgctaacagtctagtatgatcaccatttactatgggaataataatttacaagtttcaattatttgcacttcactgctgatacggtggtgtgccgctctatcctctacagaccataatagtttgctggcttccactgacaaggaaatgttgatgtattaccatgatgccaattgacaaattaccatggatattattaacctagttttggctctgatacacaaaaaccatataacagtattttccagtcgagtctcatctttactctgtttcacaggtatcgaggaacttacaatggtcttgatgttgctgtaaagattctcagagattctcatttcaacaatccgtcagaagttgagttcttacaggaaatacttattctaaggcaagttcttttataaactgctgaaattagcgtgtttcattttattctgacttactcaagatattttcctccaggagtgttaatcatgaaaatgttcttcaattttatggggcatgcacaaggcctcaaaagtattgcattgtaacaggtagcatttatatcttttttttccttaatatttgattggaatcacctccataaccactggtgctgaattgcataaacaatgctgttgttgccacgtgtgcatgtgcgcacataggcttaaagcagaagctagtatttaggtattgacacaaacatacatccattttatagccatctatctgatgttgttcttcaggtagactatttaattttgaagttcccatactatcaagaaaattgtgtaatatatagcaaagaatttttaattatgcatcaaataggtcttagacttgcatagttggagtcagtattcgaatgaatcatgcttcatgtcctgtctggcttactgttactgaactcacatttttgtcttgtggttggttctctttctttcagaatacatgcctggagggaatttatatgactttcttcacaagcaaaataatgttttggacctccttacgattttaaggattgctatcagtatttcaaaggggatgaattatctgcatcagaataacatcattcatagagatctgaagactgcaaacctgctcatgggctatcatcaagtatgcgtactgaatattcttctcagttcccattttcttcttctttctgatatgtggtagtgatatccaaaaattagaaaaatatatcaaggtgaccggtactattacagcaaatcatttgttatccacttttcaatcatatgacactgctttgggatgggatatttttttcttcgaattatgtaaagattttcagtccacatcttgcagatgggcaacggcatttcaaagaggattttttacaacattttatagctcaaaggggagatttcatttataaaaaatcgagttgcttaagaactttggcttcaaatagtccttgtaatttgtcagtattaattttgtttttcagttttgaactgtgaaatttcatgcctcatgtgaaaaaccacattatggtcctgaagatgtaattctgttcctttaattgaaatggactaatctcccagatttgtattgactatatctgctactggtaataggttgtgaagatcgcagactttggtgtggctcgacaaggaaatcaagagggacaaatgactgctgaaactggaacctatagatggatggcacccgaggtacagttgaccatttaatttgtgcccattgagattcatacttcttttttgttgaaagaaataacttttaggaagcttctgtgtccactataccatcctcagttttcctagtttccattgttatctgatgtgtgaaactatcggtaaaccttttgcttttgcgtggtcctttgtttgctcttgtgagttgtgaagcgtaggctccttgcatcacatttttttctggaatgggtcatgcctcctcttcactaaactctgcctttcttttaagaattgcttggtgttgaaatttttctttcagatttttgtataaccaatttgtgagttctgagtaacctaagttttgaaaatctgctgctttgtatgagatacctttttagataaatccaattcaaagtcaagatttgaaactagaaacaccaatcatatactactagataatgtggagtggataatgctgcacaaactgaaatagggcatcacttctccaacttactgttgagcgatgaaccacccatcattaagccatccatgtgagaggtgtaagttggacttcttaagttcccccatgcaggcatcactgcaacagtgttgcattatcaactttgaaagattttgggtcaatcagtgtccttggaatctaagatgcctttggaactttacctgttatgtgaaattgattgtattgatgatttgatagtgacaaataagatccagttgtaggaaaaggttggatacattgtttaccactctggaattatctttgcgtgagatgagaagttctgaccagagttttcattgcaacagtttttccattcttttggatgagaatctcataggtgctgcttgtctcaacagatcattaaccataagccttatgataacaaagcagatgtgttcagctttgctattgttctgtgggagctggtaactttgaaggtttggccctggtgtacattctgcttgagcttaattctgagttgtttgaacataccatattgtgattattaacggtaacactgtaatttttaattctgctataggtcccatacgataacatgacgcccttgcaggctgcactaggagtaaggcaggtatgtatctgattctggtcatctcgagaaaatattgctttcgttgtggtgctacctccatgtcatccactgtaaaagattccagaaaatcccaaattttttggagttgtaagggatgctccttatccatgtaaatcacaagatcaaacagaaccaaagtaccacacttcaaggatattagaagatgacagaaatgaacatgaataatgacaaactagcaaattattttgtctctgtgtttctttaaacagaaatccacattgactcattttcccacacaccctgcttagggatttcgcttggagattccctcaagtgtgaacccgagattgtcaaaactgattcagcggtgttgggacgaagatcctgatgtccggcctgtttttgcagagattgtcatcgaacttgaagacatcttacagcatgcccaggtaagaatgatt

SEQ ID NO: 29271 - DNA, 641 bp, Oryza sativa
taccatggatattattaacctagttttggctctgatacacaaaaaccatataacagtattttccagtcgagtctcatctttactctgtttcacaggtatcgaggaacttacaatggtcttgatgttgctgtaaagattctcagagattctcatttcaacaatccgtcagaagttgagttcttacaggaaatacttattctaaggcaagttcttttataaactgctgaaattagcgtgtttcattttattctgacttactcaagatattttcctccaggagtgttaatcatgaaaatgttcttcaattttatggggcatgcacaaggcctcaaaagtattgcattgtaacaggtagcatttatatcttttttttccttaatatttgattggaatcacctccataaccactggtgctgaattgcataaacaatgctgttgttgccacgtgtgcatgtgcgcacataggcttaaagcagaagctagtatttaggtattgacacaaacatacattcattttatagccatctatctgatgttgttcttcaggtagactatttaattttgaaggtcccatactatcaaaaaaattgtgttatatatagcagagaaattttaattatgcatcaaataggccttagact

SEQ ID NO: 29272 - DNA, 743 bp, Oryza sativa
ctgattaccagataagatgcaacaatttgttaaaatattaaatttccaaaatactgctggattcatgattatattatttgttccatatggatagttagcagctttcaacagatctttcatttcaatcacatcaggttttctgttgaagggtctaaaataaagttgctttctcatgattgttggtgacaggacaaatcctacacaggaaccttagcataattctgaagtacaaaggcacagaaagcctacttacataaattgagaggactatggtaacagcaagaattgcataccctgcattatatgcaggaaacatgtgtatgagatgcctcgccacaaagtagcagaagacggcaaccgggattgcaattagagagaaagatagcagagtggccttggcatctggtccaaagataaaccttccaccgcacaagattatctgaacaaagagaaacacgttgatgacacattaaaaatgtttatattaactgctggtataaactgcaagcaaaggtgaaaattccgaaatcctaaaaggtttgatatgatattgtgtaaaatctgcagttgtccaactccatcagaactcctatcaaggccattgtttttacactagcctgaactctgaataagacaagttgctgaaagcaataattctaaagagaagagtaaaaagaagatttaagcaacgtaatgtttgcaagtgtagcacattattttttatgcagcctgaagccaggttg

SEQ ID NO: 29273 - DNA, 939 bp, Oryza sativa
tatagggcgaattcgagctcggtaccccatatatatatatatatatatcgcacctggctctgcaatgcaagcccattatatccaccataagctacctagctacctgcatctctctttttgctaattccatgcatgctgcttctcaacaagcattccaccacagatgatgcatataaacatgaattcatgccttcaagcatctgatatttacacaccacatcacatttgccgcccggagttctgcagtttccacacgactatttacacaaccactttcctctactataaacacttgtgaatcttaaactgaatactgatccacattggggtacaactagcaaggacgcagtgtacatcttcacaagtgcaaccgaatatttacagacccccccatatatagggtcagtttggagctagcgctcatatgggcttccacgcagttatgacctcttggaacatttccagcatcagctcacgatctgcgtgctggaagaagctattgatctcctccctcacatcgtatatcttcccaaaaacaaacaggtaggtcaggcaccctttcttcagcttttgcagctggtacagccacgcgacgtgaagcctctcgaggacattgctagagtttatatcctccaggaggctctcctcgcagcagtccttgatatcagaaatgctgtacttgttcgctgcggcgagcagcgagaggcggtgcttccagaactggtctagctttatggtcccgtagatgaagccaatcagagcagagcaagactcaaggcacatgtcatttatgttgattgtggaggactccttttccttgagatcatggaggaacatgctttcaaacacaggagaacatgatgcaaggatggccttatgggccttgaggacaccatcagtcgtatttatggtgacgtctgcatgtatcgactccgtgag

SEQ ID NO: 29274 - DNA, 656 bp, Oryza sativa
cccagtggcgcatcgacaccttgggcccctcctcctaccgccgctccgattccttcaagatcggcatctggaactggttcccttcccaatcccaatcccccactactcagagatcaccgatttgccctatcaaatcaaatcatccgccaattcgatccgaatccgtgcaggtacctatcggtggagaaggctcgatatgtatacgtgaggctgttcccggagcccgggcgggtggccaaggaacggcccccgctcgcccgcttccttctccgagcttgctggtccggcccgccacgccgctcctgcgtctcccctggtacatatactcctctactttcttctttcttcttgccaccaccaccatatttagctttaggctatggaccatccccgttttagtgcatgtcttgtcttcactctccatgccatcttcagactttgaacacctgacctgacctgaccacttaacatgctatctgcaaattgtctaatagagcacttcttcacttcccttaccagctatctactctagtagtaccattcaccattcaggtatggtggctagttgaagatgctcccaaagagtcagaccctccctatgcatatggtcatcatatttctctatgaaatactcgtagggcatattggggggaaaa

SEQ ID NO: 29275 - DNA, 565 bp, Oryza sativa
ttctcccatcagctaacatagcgtaaacatgctctagaattttcaggtacagttgatcttgaaaggaagaacgaagcaacaaaaacacacttgcacaaatatccaagatcagaataagtattagaaagtttcgcaaaaaagaataaatattagagagctacaaaacattcaccgactaacagattattgctaagctgtaacatttatacgcatgacaaaataactaatgtaaaagaaacacaccattacaccaactctaaagtcatcacctataatacaagcctcaaacaatacgcaaagtcaaaccattccttgtagactgatggatatttgcttcttcagcaaaactcagcaagtctttcttcgatttaagatcaccaatttcccctccgtacagacaatgtaagtaaccttgttgaatcacaatggtggctggcacgaaatagttccatgaattaactttgcatgaacctgccagttttgtgtcgcataggatttttctgttttatttgcatctcccaggaacaaatctagcaggggcttgcacaaatgctcatgaaacagt

SEQ ID NO: 29276 - DNA, 1154 bp, Oryza sativa
ccacattggggtacaactagcaaggacgcagtgtacatcttcacaagtgcaaccgaatatttacagacccccccatatatagggtcagtttggagctagcgctcatatgggcttccacgcagttatgacctcttggaacatttccagcatcagctcacgatctgcgtgctggaagaagctattgatctcctccctcacatcgtatatcttcccaaaaacaaacaggtaggtcaggcaccctttcttcagcttttgcagctggtacagccacgcgacgtgaagcctctcgaggacattgctagagtttatatcctccaggaggctctcctcgcagcagtccttgatatcagaaatgctgtacttgttcgctgcggcgagcagcgagaggcggtgcttccagaactggtctagctttatggtcccgtagatgaagccaatcagagcagagcaagactcaaggcacatgtcatttatgttgattgtggaggactccttttccttgagatcatggaggaacatgctttcaaacacaggagaacatgatgcaaggatggccttatgggccttgaggacaccatcagtcgtatttatggtgacgtctgcatgtatcgactccgtgagcatgcgcgaaaggcatccgagactgctcttactagcaatgttctgcaccgctatgctttcatttggccaaatcgaggtagatgattctgcagcctgtaaccatatcacattacattagcatattattattatcagtaggcatctgtttgaacagtaggacttgtcataacctccaagccacatacatacatacatacatatatatatatatgtatacacacacacacacacacacacacacatatatatatataaactaccgtgtaaagaaagagaagtgtgagatgttctgaaaaagaagcggaattattttggaaccaattttgaggacaagaggtggatacttgcattgtagaggctatcttcaggtccaaaaactcaacatcaatagtgaaacgcccagcgtacatcgtatcaagttgccagaaaaagtcttcgctgcttcggaggagatgctcatgcactgtcaggaaaaattggacaatacttatgaagatcaatgaggctggccgtaacatcagtaaaacatcact

SEQ ID NO: 29277 - DNA, 5570 bp, Oryza sativa
tttggaaccaattttgaggacaagaggtggatacttgcattgttagaggctatcttcaggtccaaaaactcaacatcaatagtgaaacgcccagcgtacatcgtatcaagttgccagaaaaagtcttcgctgcttcggaggagatgctcatgcactgtcaggaaaaattggacaatacttatgaagatcaatgaggctgcccgtaacatcagtaaaacatcactgcagtagctatagaagcaagatgactatggaatgacttggaaataaaagccattgggctgttaatgcttgaaagtgaacattaccctattttcgttctattcatattataacaatgacaaagccacccaaattccagtaaacctagtgtcctgtgaaaattagaaaacagacaccttatgtttcatgaaggagatggtggagctgttctgagcttaaaaaggttcacccaaaactaaagcagtagaatggaaggtagaaacagtcttctgcgtatagcccttccctttgagttattgctcacatgatagttggaattaaaatgaaagtgttatgcaagaaaacaccttttccccccaatatgccctacgagtatttcatagagaaatatgatgaccatatgcatagggagggtctgactctttgggagcatcttcaactagccaccatacctgaatggtgaatggtactactagagtagatagctggtaagggaagtgaagaagtgctctattagacaatttgcagatagcatgttaagtggtcaggtcaggtcaggtgttcaaagtctgaagatggcatggagagtgaagacaagacatgcactaaaacggggatggtccatagcctaaagctaaatatggtggtggtggcaagaagaaagaagaaagtagaggagtatatgtaccaggggagacgcaggagcggcgtggcgggccggaccagcaagctcggagaaggaagcgggcgagcgggggccgttccttggccacccgcccgggctccgggaacagcctcacgtatacatatcgagccttctccaccgataggtacctgcacggattcggatcgaattggcggatgatttgatttgatagggcaaatcggtgatctctgagtagtgggggattgggattgggaagggaaccagttccagatgccgatcttgaaggaatcggagcggcggtaggaggaggggccgaaggtgtcgatgcgccactgggccagccgggagatggtctccacccggttctccctctccatcccgccgccgccgccgccgccgcgccgtctcctctcactctacttgtaataactcccggtaacataactcattaacttttcctttttcctggtcaacaacatttttcttatcttagaaaaaaacaaagagataaactttaagcctgttcagattgtagctaaaataaaccttactaatttttagcaagatggcaatattactaaaattttagtacgatttcttatatatttatcaaatttagtaacaaactaaacataaattttatttggcagctttataaaaaataatatggttgaaaatggcatcaaaatgaacatgccctttccgagacatcacatttttatgggtgatgcaatgtatcaaaaaaaatacacacaattttgaaaagtaattttgaaatagaagatttctattgtagtataaatacacacaattttggaaccggacaacacaagatgctcaagggaagaatgccaagagaaaaaaaaattaaagaaaaaaaaaaggtcccaccgggattcgaacccaggtcgccagattcaaagtctggagtgctaaccactacaccatggaaccattattgttgctaattatctctgtaaacttatttatacaaataatattcgttagagcccacttgagacggcccattagtttatagaatgataatagctaggcctctttcgtcagatggttcgaccttccaagtccaactgtacgcaccgcttcaaatctgtttgctccctcttcaattattctcctacattgtttacgaggtttagggcttgttccttctaaagaaattgtaatggaaaagtactgaaatatgtcatcctttaacactaaactgcccatttgttttaaagaaactcacgaaaggcaaatttcatatccctctactttaggaggaaaaaaaatccacctcaacataatgttttcaatcctttgtactgtttaccgaacaaccatagaaaagtttactatgttttcaacccttaggtttgcacatgtattatcatatattcctacttttttttctatttttatgttgtgaaaatcctacaaagcaaatgagcccttgagggaaacaaaactttttttttaccaaaaatgtggtgacacttttgttcatttcagccctatatatgtaatctctctctctctctcattttagtatataactatctctcatatcatatcttctaggcagttgattaattacttttaattttgtttctcttaaacacatgtattatcatatattcctacttttttttctatttctatgttgtgaaaatcctacaaagcaaatgagcccttgagggaaacaaaacatttttttaccaaaaatatggtgacacttttgtctagttcatttcaaccctccctctctctctcattttagtatataactatctctcatatcatatcttctaggcagttgattaattacttttaattttgtttctcttaaacattgtgtattaaaaaaaaatacaatgtaactgcagaaatttataatataactttaaaaatttacaatgtaaatgtagttaatatatagcacaaaaatgatttgactattttctatttaaattgtggcgcaataaatatagctagtcaagaaaatagaatatctctaccatatctatacttctttaaaaagactctaaagttgtgttcttttgggcgggttgggaacctctcacctccacatgcaaaacggagcgatagattaacacatgataacgtggcaatgatgcatctgtctttccctacctatttccgttgtagcttttacatattacccacttaaacttcttaatattacataagaactaaatctaaatagatagccacatgtaaaattaaattaagataactattccatataggaaaaggtagataacatatctcacaaaaaagtacttttctttattttgagaaatattgtgatattttttgtacttttatcactagcaaagtgcgacatttagctagttagaaaagctagcatacgtcataccatcccggtacgtatataagacaatatagtcatgtagtccacacgttacagccgaaacatggccataccttatgctcaatgtccccatgcccaagcctagccatgtgaccacaccttgattctccacattcctcctctactaaattgctcatgtcgaagagcatatgcaggcctagcgcaacaaatacatgcagctgcgtgagccgatttgatcatacataactttctccctagttttttttgttcttaacttaatttttccccttcatttcatttgatttcatttgtcagtattaactaatgcaccatacccttttatttgtatatcttaaatttcttactccaagcactattggagctatgcatatcgactggtgataccatgataatcttatgtattcaagggcaaacattaataatatttagcgatgctacattgatgatactctactaatgcaccaattacacttatagcatgctaaagataatcgtaaacatattatacggtcaatacaccaacaataatgataaacaatgatgaaaccctcaatacaatgatgatattcatgacacattgatacaccaacggtatgaagtggacaatatatttgacatgccaatggtactatcacccaaaggatatctcaaatacaacaataccatgcctataatacctctcatgcatcaacaataacacgttgatgatacctccaacacacatatagtactcaaattggaatatcgatgatatttgaaatacattgaccataaaaaaactaagaactcaacattatgatatatccacaatactatagtatcatgctacttgttgagtcataatacctttgtggtaccatgaagaatcattgatgttttgtgatacgtcttgatttcatcaattcatgatacccgtaggtatcacggatatttcatgatacctataggattaatggtaccttgtagatatcaccgatgtttccatcatgacaccttgtggtatcatgatacccgtaggtatcaccaatatttcatgacacccaaatgtattaggtacctttgttgtatcatgataccagttggtatcaccgatatttcataatatccatatgtagcatggtaccttgtggtgttatgatactcgtaggtatcactgatatttcataattcctagatgtatcaggtaccttgtggtatcatgataccaatagagataccatcgacaattcatgatacctttaggtatcaccatgtttcatggtgcccatatgtagcatttacattgttgtatcatgacgtaccaccaatgtttcacgaaggaatcctctatataggtgtgtgtcagggtttaggggtaactaaatttctatagtaacattatgaagctatatcaaggttgtaagattatatcatagagatatcacctatatttatagtggctttcatatagtgttgtctgataagccaacaagtagataataaaggcctatgtaggtattactaaggttttatatatggtgctatcagtgatatgtatatcacaaaattttcatgaacgtgttgagctcatcttttcccttcgtcggtccagcccaactgctatctatcctaattagagagggaggcatgctatcctagaccaaaacacacaaattatgctgacaagaacggccactaaagccagcccaatccggccaatgcacaaagcttaatctagcatgggctatgtaacgcgtgcgggccgatagggttccatggctagcacttaagcaaaataagtgctcagctcgcgaaatagtggcacgttgaacataagtagaagcactagcaagtcaggtataccattaagatgatatatcgtacgctagttgctccctatgtaaaaacatagcggaaaaaatatggttccctatagtttttttatctgtagagaacaaagggtagagggcccaccacactcttaccatcgtctaccagcatgcagaaaacaacataggcagtgccataaaagttgtatgggacaaactctcatttgcttcctaaatttttttgctttgacccaattttgtttttttttcgccatctctcatctctaatatccccttttcttatgctccttccatcccaaaatatatatacaacttctagagttcaaattttgtcccaaataaaacaacctaatacttgtaaaagatgatttttacaactaaactacctatactaccccttaacttcattatcacctgaaagtctaggtccacaactcacccaccttgagga

SEQ ID NO: 29278 - DNA, 14917 bp, Oryza sativa
aaaattttcatcccaattaaaaccctgctctaaaggtgcaatcctcatcgaacctaagactagcatcaggttacttgtgctaggcaggtaggtaacttgtcctcatgcgtcccactattcctagaggttctcagttaagtagatcgaggaggaggtagatgtagtaaagaggtggtggccttggcgtgttatctaagagtgatgtatgatcgtgtgtcatttacatcttaaaattgtagccttaaaaatacaaatcttaaggggctgtgtgttgtttagttgcctgaaaacaagaaaaaattagtaaaactttgaatagccacaatatatcgttttaagattcgtgcaattccctaaccctaccatttcttatcttcttccttacattctcgacacaattcctctttatccctcccgatcccccaacccaacacacacctcctcttccaccatgccatatgtacagaaattgttctactcctaaccagatagagcatggctattgatttcactagagaggcgtagatgagctttagtgtgccccacccttctttgtgccatcgcccccaccatgctctttcttcattttcccaaagagatacccggctcgccccaccttgcctgtcggattatccaccaactcctagttgatcacctcacccctgccaacaactgaccctctccttgcctgtggctccaacgccatcactgtcaccttgtaccatataccttcaccatcgagctgccacctccacagccatccctctaagcactacaatggtgctagctttccttgacgaggcattttcatcaagaagtagcgcaatccacacgcacatatgctggagagagacgttgatggatctattaaaggggatgggtggatttgggggtttgcgggtgaaagggcatacatacacacgctgatttagaaaacgaatgccggacaaatgcatacggtccatgtaaacactggaaaaatgcacatgttttctcttacttacacgtggggctttcttgaaactatatattattgattagttatatgatgaaaatacttgtacacctatgctagtacagttgttacgactaattaggcctagattatatatgacgaatttttccatacaatcccatacttacaaatgggaccaactttgttgtgggctcatgaggaccctgcctaccaagttatacaacaaaattcttcgtcaccgtgtgatagcccaactattaatgacaaaatccacggcgtttgtgatgagcccgtttgtcgccgtgaacatatattatgaccaaggcctccagttattgctaggattggttgagggtgaagtttacgatgactgtttaacgaatttgtcatagatcaatgacgtacggattccctattcgtcacacggaatgcgtagaaagcctatatctattttattgaagccctgggaagcccccgccttccattccccccaacccctctctcaccccacccaaccttgggacttataattggtctgtgctgccatctttaggcattgccggagagaagagatgcttgctagaggaaataaaatagctgctcgtggagaagaagaggtgcatgaatttccatgttcatctaactattaaactatacattggaattttcgaggaatattttaggtgatagaaaattaatccccaaatactaaacccttagaatacattaattttcacataatacattacttttctgtaagataagatcggaagtgagatatcatggggtactcaatttgggcacatgaataacaaaaggatggaaacaactgatgattgcgttagggtggaccgccccagccggtgtgttatgattgcagtggtagtggaagttgctatccacgtatataatcccgcggcttcaatttcaattatattcgttctgttgattaacagtgaaggtatctgctgagtttaagcaatgtagcaatctactatctacctagctaggtgtactaacaaactgtgttttgtatctatcaactaaaaacaacacatgcagaaacaagtgatacgtacgccatgatcaatataatgttacattatatttaaacaatgataaaatatatatatatacaaattaattgatcaatactatatatactgcagagaggtggtgtacacattaagcagacaacgatatatgtatacatatatatgatgtatatagtgatagtgcatatatatgtgtatatatagcacctaattaaatgctagctaacttaatcatcatcagttacaaacctctctcagcaatgaggtcaaaagacgaacaaccgatagatacacacactgacactagtagctaattaattaagaatgaactaacaaccgtgtactgacataagctagatagtaagcatgcagatggcctgatgatggccagtggtcaaattaatgtatacatcatggagacggagtaatcaactaattaatagtacactcgatcgtttaattgtgcgtatttgtaagaattcatgcatatatatgatgaatgaattgtcaattgataataatcgatctggatcgatcgatcagtctcggtcatcgatgaagcctgacgaagaaatgttgttgctgttcttggagctagaagcggaaggcaggtggtggaagagctgatgcgccggcggcggcagcaagctggtgagcaggttccagtcgacgatgccggcttgctgatcgacgtcgacgcagctgctagcctgcgagacgtagccctcgccgtcgacgatggtggggctctccagaggcggcatcatgtcggagaagtgaagcttggactctgaactcagaatgttgctgtggtcgacgacgctgttattgttgttgttggcgaagagagctgaggcagcggcgctcatcaatggccgcccggcgaagctagggttgtcgtggtgcagcagcaagctgtagttgtcggggacggcggcgtaggctccggcgccgtagctgccggggatgcagccgtaggacagcctgtgctgctgctggttgggcatcggcttctgaaacgcgcggcaaaccacccaaccttcctcctgcatccatattccatattaatatccatgaattaacatatatagtaggacagataattaagtaaagaagtaaaaaattaagatggaatggaataggtggttgcaatgcatgcctgagtaggggcgtgttcgtttgattggaggcggtactcgtggatgatccagtcggtcttccggccgttgggggcgcgacccttgtagaacaccagcgtcttcctcatcccgatcaccctcgtcgacggcgacgagagcaccggcttgtcgcggccggtggccttccagaagcccgccgccgtggcgcggttggtcctcgtcccgctggggtacttgcggtccttgtagctgaagaagtaccactccgtctgctcatcgccgccatgcccaccgtacttgcaacgctctgccacatatatataattcatcagaatcatcgatcgttcagttcccaaattaattgctgaattgatattaattatgcatgaatagaatgcatggtttatttaatgtaatggatcagtacgtaccttgcagatcccatggctcgatcctgtagagatcgagctcctggatgatgtcgagatcgatcttctgggaggccaccttcctggcgaggtagtagcccaccagctcctcctccgtcgggtgaaacctgaaccccggcggcacacatggagactctcctgcctcctcctcatgccgatccattgctatttcctccgatcgaccgatcaattcttctagctagctagctaggagtatcgtgatctttgctgtatatatatctagctgatggatggttggaatttgattgcctggtgactctctatgcctcgatcgattggctgcagatcaaaacaagcatatgcagaaaaagctatatcatcatcagctatatatatgtcttcttcagatcgatgctcatcaattttcagcccaatctcagattctcatgagtgtatagtagctatagcctatagctagagcaatgaactgcatgcaagtgcaagtgcaagcgcatctggatgggtccaaggctggaaaagctcctagaaataggacagacacggccactcatgcaatggaacatgacctaatcagccagccagtagttgcaccatacctatacaacctagtcgtacatacatactagtaagtatacctttaaaccaatcaatattctgaagctagctaggtcgaccggggagactagcttcatgcatcagatgaatattagaactaattaagaacacggacagtcagcagctagcaagctgtacacacacgcctgtacctactaattaattagtactagcagtttgattagggacaggcaggcatgcatggactatagcatatatatgcagctgaaactaagggtaccttccttaagctagctgctcagcttgtaacacaccaaagttgggcttctgctgcatgcatgctagctaggagagatgagaactggaaagtagtagtactggcttgtggacagtatgagaggctttttggagggtagagagagatctacaataataataatgtgtgcaatatttgtcttcctagcttggagtgcacttcagggctcatatccaccatccatacaaccctctctcttaccatacagccatatagtactagtactagctcctcctttcccaatcttacctaaagcctgctgcttgttgagctcctggtcacatcttcaatatttctccacacaaaaattatatgcgaatctaacataatactgcatgcgcaggtatgtaacaacgactcgtgcatatataggtacgacataccaacaaatttaattaagatcatgcatgcaagaaatatgtactcgatccttagtttaattggcatatatatatgacgaagtgcgcgtgcactcacctaattagataaccatatgcatgaagtacagcgctacagcagcagccagaaggagatcttctcccaagtcgatcccaactataatgaacactgtatatattatatatggtggctgtgtagctagctatagatgagatgagatcaaaagatggatcgatgatggcaaggaatttagttggtatctaagctaagggagctttgtgagctatttatacatgagaaaaagcgagcttatgagtgcctgggctgtgcaaagatgaggatatgcatggtacatcatcgctcgatcgagtagcgctatagtcatgcttaattgaattaagtgcgcgtggagtggagatcttcagcgcgtgtagaatctagaccgagaaagagacaccactatactgtgtactacagcatgcattcagagagagagagagagagagaattaagcatgcagcattgcagcagctagctagctatagctaacttgtttggtcggttaacaagtcaccaagcgaccaccaccactcagtacatgaaagcgactctcaatttgttcccagcagcgcctgctcagacttgagtacaaacaaactctcatcagctaattaaactagcttaattagctagctagctagctaactacacatccatcgatatgatatgatagctagatcgatcccgatcatattcttccgcgtttataatttgtcctattgaattgaaggaaaaaaccactagagatattattaagcagacaataacatgcgcaaaaccgttgctttctatatatctcccccgacccggccatttaattaattcctacatatctcacttagtgtatcctaatagacttatatcttagttctcttagtgtgtatacatattttttcccaaagaaagattaatatatagttagttagtttaatcaacaactgtgctatatataaaactagtgcatgctctatcagattgcatcaggagaccctagctagtaagatatatatagtaaaaaacaaataagattgcctgataagaaaggaaggaagggatgatacatgcattgtatggccaaagttgtctaccatatccatttttccgccgttatattgagcttcaagggtagcttttgctacttagaacagacgctagctcgatctagctaggttgttcttcctgtacagtatacatatataattaatcattgatttgttttgacagggaagggcatgatcatatgtgtgcgtgtggagcccacaaatcatacgctagctagctaggtatggtacgatgtatcgatcgagcaataatactggcctgcagctactacatataatatgaatgatcgatatatatcatcctatatcttggccgggatcgagggaagcacactacataaaatacatatatacgcatcattgcttgtgttgcatgcttgcattgctattctcgtctctggccggccatgacaataatatttgtatttacactaacactagtgctttgttctagcttatttaagtttggtggttgtcactgtctggcttggtgaatgcacgtaatgtctggctccacactcaaatgatcagataaagacggctctagattcacgagatctctacatgatgtatcaaattcatggtaattaataatcaagtcatataacccatatttggaagctaggagttctctagaccgacctgctgcaccgtaattaaatggtaattaattaatcaataactaaaagagatcaagctaagtgtgttcatatatatataaatcaaacttatcgtgtcctctatagatcatagtagccaacctgcccccactaacaataaccaaccaatcaacagtagctatatagcttcatcagtattatattttcctatagtttcttttttgcttctgttccaaggtttagtgtggatagagttgatgtacaatagctagtaccgattgacccttcttaccatcagttcgatctgatcacattatgctagagtactatatatatattccatatccattaattgctggaggtaagttaataatttcatatatattccatacccctcgctcttggtagcatttgtttgcagacagattaaacatgtaaagtacaaggaatgcatcatccatgatatatatgcagaattgtcactactatatacaaacatttatttgatagtgtaattaaaagaagagaaagagtaatatgtactggtgattaaatgttactacatattcacatttcatgtgcctttggcagctaatgataaacacatactaggatgagatatgaagtttcccagtatgtccagcagattcattttacaaggaaatgttacatcctgtcctatgttgattttttatgggacggtaggagttgtataatatagtttgtttttcttgtaagattgttatgtatgataagcgtgtgcacattttatcaagatcaatatcgctcattcagtcacaagtccaaaaaagaacaccatagaagtagagtcaatctattatattattaaaatagccttgaaagaaggcatgacgttcgctgtggaggttacaaattcccacattaatcggagaaaaagaaaaaaagaagagttcaagtagaatataatttagaaatatctgaaattcggaattaaatataagaaaaattggaagaagagtccttatataactgaatacgagattaattaaaatttggaattaaaaataaaataaattctgaaattagaaaagaaaaaaagatttcaagtaggaataaaagttagaaatatcttaaattcagaattaaaaataattaatatctgaagaagagtcttatagaactgaataagagaataattaaaattcagaataaaaatagaaaaataattataagagttcaagtaggaatacactttataaataaaaaaaatcagaataaaaaaatatggaatttttagaaaaaaataatcaacctagaactcaacgacgacaaataacaatagcaaggggacaagtaataggcctgtaaaacaataaggtagtgaatggttgatgggacatctaaaaattataaacaaaaccataaatagaaccccaaggacgattaagaagtggaatgatagacaagacgttaagcagcatagtcatgacggttggcgggacttctataaagtaaaaaaaataaatcgaaataacaatcatgttttacttttaaaatctcaatgataataaacaggggagacaacgagcaggccatacaggagtatagtggtgtggagccggcaacggttggcggtacttctagaaatttaaaaatgaatccttaaaatttgaaataaaaaataaaataaattttgaaaatagaaaaataattctaagatttcaagtaggaatacactttacagataagaaaatatcggaatgaaaaatatggaattttcagaaaaaaaaatagtccatctcgaactcaacgatgacagataacaataaaaaggggagaaacattaggcccgtaaaggagtaagttggtggcagttgatgcgacgtctaaaaactataaataaaaccacaaatataatcccaatgatgattaagaggagggacgatagacaagccgttaagtagcacgatcacgatggttgatgggacttctagaaagtaaaatccaatgacaatcatgttcaatttttaaaatctcaatgataataaaaatacatgagtatagtatggcggagctggcggcggttgggcggatttctagaaagtaaaaaatgaaccccaacgatagttatattcaatttttaaaatcccaataacaataaatatgggagacaacaggcggatcatagagaaatacaatattgacggttgacaacactcctaaaaattataataacagaacatgacgagacaatggactctaaaaactagaagatgtttttttaaggtttaaaggaaggtaaataaaagccgtgatagatcgggtaaacaaataaaggagttataaaagagtaagagttaaatactataaaaatttaaggatgataaggttcgatcttttaaggttataagtcaacataatggccactcactccgtttcacaatataagtcattctagtatttcccacattcatattgatgttattgaatctggacatatatactccctccgtactcataaaggaaagtcgttttgtacagcgacacggtctccaaaacacaactttgacttattgtctctataaaaatatttattgtaaagtgatatatgtatacttttatgaaagtacttttcaagacaaatctattcatataatttttacattttcaaactcaacaactcgagagttattcatgatttatatttctaaggtttgacttaaatattgtcctaaacgacttcctttacaaatacggagggagtatctatctagattcattaacattaatatgaatgtgggaaatactagaatgacctacattgtgaaagggaggaagtatttaaaaaaagtaagtaatttcaaatatagaaaaatggataattttatatgtgtgctagccgcgttgcacgggtcacccagctagttctacatataaaagaggggggtggggagggggatcgtcaattccctaggagctcgggcttcaactatacatacatgtactgtatttttgtgatatttagctttaaatctgtagttttgtgataaatttattgttaaatttatagttttatgataatttgctcaaagtacatgtaagttttgtaaaatttactcattaattaattatgtgcagtttaataattagtaaaggtttcttgtaggactgtactgtgtatggtaagcgtgtgcatgctttgtcaagatcaatatcgcaaagagagatcatgttgaacacgccacagatctatcgatcgatgatctagacgaacgtacacatatcgatccatcgaatatatgagacgtctagcttggatcgagatggtgatttaatttgatcgttcgatcgcgatggatttacgcgtcatccatggactagtagctagcgatccaacatcgatttgtctcatttttacactggatctgatcaatcaatctctcctatacagtgtcatcagaagctctagctcagacacagggcgctagctagtagtagaccaattattgattaatcgatcaatacccgcgctccattccaattctcagatatcatttataataaaaacgtacgggccgcagattatatttgttgaataattaaatttttgcagatctagtggaatttaaaatagttatgttttatatgcatctcttatttggttcttgtaaaattttaattgtatccaatgtgtaattatatcaaccaatctaattattataaatattagttgaacaatcgcattacgatgtttatatttctatattttcctacttttgtaaaaaaatattttttgagataaatatttcgagcgtatgtacgtacgtacgtcgtcgctgtctcatcacatcacttggagtcttggatcgatcatgtgtatctggagaaaaagaagatcgagagagagagaagaaattcctagcctagctagatagctactacaggcagatcgaagcagactcttctccctaattggacctcacaaacgccggctgtcccctccactcggaatcaggcaactagcagtagtcaaactaaggtggtgtttggatccaatcatccctatcatatctgatgtttgaatattaatttgaagtattaaacataggctacttataaaactaattatataaatgagagctaattcgcgtgacaagttttttatgtctaattaatccataattagcacatgtttactgtagcatcacataggctaattatggaattaatgggtttattaatagtctacgtttaatacttctattagtatccaaatatccaatatgacatggactaaaaatttttagtcccatccaaacagcccctaatactacatgctgcaaaggaaggctacataaagctatcgctaacaaatactctatccgtcgcaaaatataagtatttttggatcttgacgtacacggtctccgagatgctactttgaccaacaatatttataaaagaatgatgttttaaataaaaatggttgtatattatgatagtttgtttaatgataaatatagtaaaatcaattttacatgattgatatttttttatttttttctattaatggtcaaagttaaaatgtttgacttgtcactatgttaaaattgtttatattttagaacggagggagtactagtttgtttaaaagaaaacaaatggcattagtactttgatacggcagctatacttctatcatatccattgcaagtaaagtacaataataaacgggctctaaaaattgccactcaataaatatttatatttgtatggttactacattgattgaagatgatgtgtaattcttttgtgtgttcacgaaaaatagataacgtgttaattcttgagaaatgaatttgaaatatattcggagaaatggataatatatagtggagctaactatagctaaaaattaagataaacactttacaagtagaagggagtagtaattaaatattgacctgaccgatttttattttaagttgagggtgttagttttgtctgcgttagatcgaccgactccgagaggatttgtattgtgtccttttgttgtgcatcaaattaagggaaactaatacagtatgtcattcaaagaaagcaaagaaagtactatagtgctagtccttagcaagagtagtcaagagtcaagatggattctttgcgatcctcgttgcacgatgattaagcaaagttgcttttttttttgctggaaaagttgatgttgtgattgtgtaggtagaccttggctaatgaactggctatatatgttatgttatgtatgtgtcggattttggctgggacggtcggtaatttgcgtgacggatagaagcttctggagtaatttgactgaccgtcacattcacatcactactcacttaaaattaatttgtctttcggtcggcccagtggtagtggagtttgatcgtttccagcacctttctgtttccaatcctacagtatcgatcgtcaatctgccttcctttttctttactgaaaaggccaccaccttagctagctcgtacgagagaggagaaatatgagtttgatttggctcaaccggccggcacaagagccgatcatagtgtcctcttcttttcggcttacatattatgaattatatatcataggcacacgcttctaattaagcttctaatctgtagtaagagttaatccaaaatactttcttcatcagtatttcttacgagatatcttctgattttcaaaacatagtacatacagacatgaatgctcatataaacaagcgcacaatcaccatattactgagttgtgatccaaattcatttgcacataataaaggccagcttttgccagagcgaagcggaggcccgtcgccggaggcttaggtcggagcgttatccttttaaggtttcaccttcatatatacctcttgtaagccatcgttcgccgttgtaaccttaccccgatatagtgaagatattttgctgactggcgcccatggtttttctctcttgttttgggagttttctacattaaatctcgtgtcttatgtgattgatctattgttctttgtcgtttatttgcctatcgtttcctaacactgatgagcatacatgtcttattcttgataggtacgtcgcctaccactataagaaaatagccataaatacgagcgcatatattaaatctagaacttgaatctgagtggacagattcttctaaagaaaaataaccggttgaactatgcttactctatcttcttagaggactttttatgtcaatatttctactttttagttttaattcatcagtttatgtccttgaataattatcataaacttatttccatccttcatccacattaccatatcaaacacattaccataactctcacgcaagtaaggtgaaacaaggacatttttgcaattttttagtggcagtcttgtaataacgattcagagtagtagtaaatttgtaattgcccaaaaaaaactacatacctaagctaagaatgcgaatgctctccatctttgtttggtattcacctccggtcgctccaccttaggaggggaagaaggaggggagggttggcgccggtggagaagggggagggccggtgccggagtggggcacaagtggtcgtagctggcaccgatatgcatcaagcgttgggaggagatcagaactcaggagaataggaagaggaatagttcagtgctaggtagggtggaatttttatggagaaccctcgtaatttttatggaatttttacaatgatatccttataagaggaatttctcttattctcattgtatttcgtgaaaatacgagggctttttaggaaaaataaaacgagttgtcagctagtgcgagggcttgtttgagattatgtatacagatgaggagtttttgcaaaatagactgaacacgtgtcaaattctctgagaaaccaaaaatgagaaaattgggaaggaagaagtgttatgaccggaggattctcttccatttcaaatgtgaaccctcttttgtccttaattctctgttttcttcttcttcttcttctcaaatactccttaggactaggctgttgaatttatttctcctacatgggaatacaagtttatagcccaaattaaactccatgagcaaaagggcataggagcagcaaattattgtgtgattgtttcagcatgttaggtttagaatatgcagagttgcagaccgtatgatgtggcaaatcctctcttagccaatgttattgttttttaggatcttgttatgctttacggtccacacaaataactttgcatttattttcagtttccacctttcattgaaaagggcataaacacggccgtcgtatcaaatcacttttactaccgccccaaccactatcacggcctcctaatgataataaaaccaggaatcgtaacttattccaaccatctacatatttgaaaaacgaaagccttttggatgctaatgaggaaataaagtgagaggaaatgtgctggaaaattgcttcaggaactcaaaagtgacccgtattcataatcacactcagagaagacacaggtgttaaatcaaaatgagttattgaataagtattacaattgcaaaataccctgtcattcatggagccagattctcaatggaaaaaggatttgccctattacacatatttcagcaaatacagtaactcgactcctgccttcgcatgaaaaacaagaatgcgtgggaatacacaagctacaggcaaaagagtcaagctctgggcctctggccatgatttcttcaaatgtgaaatgatccctaaataaacactgtttttgtgaacgactgctacatgtctacacatggtaagttcacacaaaaaaattccttcggttagatcaacagtccaagggaagcaacttgtctgctggccaccaaacagcgtagtttcagcttttcaggtagcttaagatcaatcctgcttgttacgaacctcacgagcacggtgcctaagctccgcccttttccatcttaccatcagcaggcagagtgtgacaagagtgttcacctacagaaacaagacaagaaacagttgcccacaatgcacgggatggaagacagaaatgatcaactggatgagacatgcacttaccaaaataaggatcgttatcaaaaggaggggcccagaccagacaactgaaatgaacagaccttggggatcaaaataattctggcttgagaagctcttccagtgttgccctaaaaatgtatttattctctcagcgagaaatacaccagaaactgcaccaaaccaacaagagcaggt

SEQ ID NO: 29279 - DNA, 4336 bp, Oryza sativa
cttagtggcagtcttgtaataacgattcagagtagtagtaaatttgtaattgcccaaaaaaaactacatacctaagctaagaatgcgaatgctctccatctttgtttggtattcacctccggtcgctccaccttaggaggggaagaaggaggggagggttggcgccggtggagaagggggagggccggtgccggagtggggcacaagtggtcgtagctggcaccgatatgcatcaagcgttgggaggagatcagaactcaagagaataggaagaggaatagttcagtgctaggtagggtggaatttttatggagaaccctcgtaatttttatggaatttttacaatgatatccttataagaggaatttctcttattctcattgtatttcgtgaaaatacgagggctttttaggaaaaataaaacgagttgtcagctagtgcgagggcttgtttgagattatgtatacagatgaggagtttttgcaaaatagactgaacacgtgtcaaattctctgagaaaccaaaaatgagaaaattgggaaggaagaagtgttatgaccggaggattctcttccatttcaaatgtgaaccctcttttgtccttaattctctgtttcttcttcttcttcttctcaaatactccttaggactaggctgttgaatttatttctcctacatgggaatacaagtttatagcccaaattaaactccatgagcaaaagggcataggagcagcaaattattgtgtgattgtttcagcatgttaggtttagaatatgcagagttgcagaccgtatgatgtggcaaatcctctcttagccaatgttattgttttttaggatcttgttatgctttacggtccacacaaataactttgcatttattttcagtttccacctttcattgaaaagggcataaacacggccgtcgtatcaaatcacttttactaccgccccaaccactatcacggcctcctaatgataataaaaccaggaatcgtaacttattccaaccatctacatatttgaaaaacgaaagccttttggatgctaatgaggaaataaagtgagaggaaatgtgctggaaaattgcttcaggaactcaaaagtgacccgtattcataatcacactcagagaagacacaggtgttaaatcaaaatgagttattgaataagtattacaattgcaaaataccctgtcattcatggagccagattctcaatggaaaaaggatttgccctattacacatatttcagcaaatacagtaactcgactcctgccttcgcatgaaaaacaagaatgcgtgggaatacacaagctacaggcaaaagagtcaagctctgggcctctggccatgatttcttcaaatgtgaaatgatccctaaataaacactgtttttgtgaacgactgctacatgtctacacatggtaagttcacacaaaaaaattccttcggttagatcaacagtccaagggaagcaacttgtctgctggccaccaaacagcgtagtttcagcttttcaggtagcttaagatcaatcctgcttgttacgaacctcacgagcacggtgcctaagctccgcccttttccatcttaccatcagcaggcagagtgtgacaagagtgttcacctacagaaacaagacaagaaacagttgcccacaatgcacgggatggaagacagaaatgatcaactggatgagacatgcacttaccaaaataaggatcgttatcaaaaggaggggcccagaccagacaactgaaatgaacagaccttggggatcaaaataattctggcttgagaagctcttccagtgttgccctaagaatgtatttattctctcagcgagaaatacaccagaaactgcaccaaaccaacaagagcaggtaaataaaatagtaagctagcataccagaaataaattcattctttaaaattgatgaaacgtacaaaataacatgtgtcagaatatgaaagagaattttcactaatgctccgctatcgtcttgcaaactagggttgagatattcatcctaacatatagttaattcatgctgaagatagctgaaacaagagcaatgcatgcccttcacatctactgcatggaacaagaatctggaaaggtttacagtgcattaattgacataattcgccagtaacttgttcaatattcctaccaatgtataactcagaaggttctaccactaaagaaacttacattaaatttaagcaagtaggtagaactccacacaaatatgttgttttttttatggttttagggaacctctatccacatttgagggaaaacgttaagttagaaagcacataaaaacaagacaattatggttggtagagtataacatttaatatgataccagcagaatataggaaaaaaggataatagtatttatgtgaatataagcattcaataaacattataaaattgcaggagaaccatgcaggacaatatcagcaaccaagacaaatcaaaacttacatgttaaagctgacaagataagttggaagttgacatttctccttgagatgattgttaccagcagcagaatggcatgaaaaattaacatgctgatcaaccaaggttcctgatgaagggaataataaagattatagcacagacataaaaattgatacgatgagatattgcatttactaaatgtttgctaggttgacgaaacagacaattaaacgtgaaggcaaattagatgtagcaaaatatggatatccactacccaaagtattcgggtcaccactgaattttgtttgtctttaataccacggatagtgtgcagttggttattcattttacaattccaactacctatattagctttcatttagtattccttgttttgagaaaaggaaggaactagaaattcaaggtgtatggttgactgggtcaaggaggctttccccagcaacatggtacacggatggcctgtcggcatagatggagcaacatagcatgacagtgcaaagcatgcgaaaactcaggtatggtatcacgtcccgatagaagattagacatgttcctttattttataatttccctgagatgttagagctgttgcgttgtgtttatgataatggaaagggagagggctacctctttgcttgtgaagaaaacaaaatagattagatatgtcattccgtaagcatggtatgactacacagtacagtacacttgtaaaaaacccaaagctcattagttttctccatctatcgatggtttcatgtacataggaaagacaggcactcaatattgttgattggggcaaagaattatcgccatagaaattatatagttagatccgtcacaagaagcatgcatcatctttttttgtgggattttggatgaatagcaagcatcacaaggtgggtgtcgtcattcatttgctaaactagcactactccctttgataagccctcaactatatactgtatcaggtagccctattgcttttcacttgtcttgtctaatctatcatactgatattgatgcgcgcgaggcaggggaacgaattttcttacattatttaattacttgatgattgaggagcaaaaggttgaagtgggaagttagatcccaggtagatccagggcagatggggggcaagaaggctataagaaagaaaccgaccttccagtcgacggcgtggaagaagccgaggaaggagtcgagggcggggcggaatccggagcggaggtcggaggagacgcgcccaaagagctccgccaccacgtcggcgtgctcgttcagcgcctcccgcacctcacccaccgggcgccccaccatctccgccgccgacgccgacgacgccgcgtcgcccatctctccggcgagtccaaggaagactcgagagagaggcgagtgagatcgatccaaggttgcggagaagacgagatgagagaaaataattaattaaataaataaaagccccctcttctgctgatcggggcccacacgtcagccacctatatacagtatatgttctcgaaaattctctctctacaactctcgagtagtgattatatcacagtttctcaccatcttccgcgtgtcttccacttccagatgttgctatgttaacgtgagcaaacaatctattcttagcttaataagagcgactagactagcaggctacaaatcggctataagcacacgtaaaaagaagaagagagaaggaaaacgggctacaaatttatagccagttacagcacagactctaatatattatatgtgtatgagaggtgggaccatatattaatggtatagtatatgcttgtagctaactattgtatgaatgaatgagcta

SEQ ID NO: 29280 - DNA, 1158 bp, Oryza sativa
aaaaaaaagacaccctggtttccgtgcccaatatttaaccgttcgttttatttaaaaaaattataaaaaaaattaaaaagacaagtcacgtataaaatattaattatgttttatcatctaacaacaatgaaaatacgaattataaaaaaatttcatataagacggactattaaagttggatacggaaacccagggtttgtctttttttgagacggagggagtatatcacatgataaatatgctgcaaataaaatactagtagtacgtttttaagggaaaatatactgcgtatttcctgaacaccacatactgcaactactactactttcttttatttatagctacttatattattccaattccgaacagtgatacccattaggagcatagcgaaatcacctgatattccaaatttcccagagtcagtactacgtggcaaatttttaaaacacaaatgaataattgattttttgtatttcagagaataacacaggaggttccaaaaattgtagagggattgagatagatgatgacagagagggtcggacaataaatctgatgcagatggatggaatcaactcaagactgagggaggccaatttgagcttccatttcgcatctctctcagcctcaccgtcgtcgcctcccttaatctctcatgcttatgctcatggcagccgacgtctccatccccacgccgcctctctgctctctgctctccctccacacctactgattcttcttccccttcccttctccgctttccctgccttgcaaatccgccaaaggttcgccctttttcctcttccaccggttgcgttttttttttcttttttttttgggggtggaacgtcccgcgagtgttgggattgggccttcctcgttgcctcatcttgatctgatatggtgatattctcttattggaacgggttagggctcatcttagtgttcctcttgcgtgattccgagctaaaggtgccgtctttcctcccaaaccaccaccattcatttagtgttccggtggtgatccagtgcaacaaattgggtagtaattttgttggtttttggagattgctcaattttggggcaaaatttgagaagaggatggttaagttctcgtcagagcctcatcaggggtaaaaatatcttgctcctcct

SEQ ID NO: 29281 - DNA, 569 bp, Oryza sativa
attcatgagaagcttgatgtgcaaagcgcacattgaaaatatgtagatgcacaggatggctgctgaagatacaaaacagaagaagtagcgataattgcgctgcaaaggggaaataaaagcatattaactgagatggtttcatatgaacagctgtcagggtgtagaaactaaagccacccatagctggattattttattttgaaaagaaattaaacataacagacctgtccaatgcactgcccaacccaaggacagtggtgatcaaagcgctcgacacagttatcacatttggaacagtgagagcagcgcggaggtcgatatatcatgcaagtgtcacagtattttactttcacgggtacaccattgaccaaaatctccttgacccgtggaaactgaagagtgtgtggagctgaagcatcatgagaaaactcttccacaggtggatgtgagttccgtggtacaatacctggatcttgagatgaggtcaagaagagcagtaacagtacctaacaatcaggttttgcagagaaggatcctatgattttggcggtgtctgtaaaaagtactgt

SEQ ID NO: 29282 - DNA, 4822 bp, Oryza sativa
ttaacatctgcttttagtggtttaaaagccaatactgaaaaattgaaaacaatgaaaagattaatttagattttaaattgtggttgcgcagctgataagctgacgagcagccaatgaaagtgactactgaaccgaacataccaaattaaaaatggaagtatacatatatatggtgctaaaaaagaaaagcaactcatattggagaagagttgcctagatttgataatggtgtcatccattattccacaaaaaaaaatcttagaattaaatggctagtagaatttttttgagagaagaaaaattaatccttgttcattttcaggttcctttttagcatactactagtactaatttgtactcccattgaactactagaaaggtacctatattttggaatggattcagtagtattatttatgctttctccttataccaatgtaggagtactactttttatttgacattttgtgcagtaattgacaacacaattaattttctgcagcattaatttggaaaaaaaagttttgtgcacattagctgaagcacctaaatatataatttatgttctcaggattcactggaaatgttatcgctgcaagccctagagggtggtgtctccagcagaaaaggaggcagattgggaggaggatggtggggattagggaagcacacttgtaaatatatatctgtcactgtccaaagctaggtttgatgatagggaaaaaaaacacaaatataattaatcttcgaaaaaaacgcagatattatatacaaatgcaatagcattgactttgtgtatgcgcatgcaccgaatcggaagcgtatgcatcgcacttctcagaaaggtccaaacaaagtcacgtacaaattattcctactcccatgccttttcattgaaaggaacacatgccaaagagaagagactgaattgaagccatccatccatatctatccctaattcccttgcagttgcgtgagaaatacataaacatgcatgggttagtaattaatcctagatgaatctatctatcgtcagtgattaacttaagtttactgatggattggcatctcggattctgataaggtttttaagtgattttcagatgtcacttggttactttccaagattgtttaaagttgtcgacacaactgtagccaaaggtcttattgtactgtaccccatgatatgctagatcttccttaggtcatatgtcttgtcctcgaaatcttgctgccattcctacaggattatccgaatatttaaaatgaactatcggcgaacagaatcgaccaaccgattcagcacaacattactgcaccatatgcattttatccgaaagtatcatttgagttgattatatagtgcatgccacaaataatactcaaaaaaattgatggccttaattgagtgactgacaggaatttgagattaaataaacttaacggtgcaatgatcagtttatgccgaaatcaacaaaactgagctacagtattcccacaaaatttaatattgtaatgatcattaaagtgtgatttcgaaagcagcaatgaccagacatatatatattagggaaaaaattaatacttgggaataaaaaaatatcgaactaaacgcagatggcatgcatatatataagatcaaatttcaaaagagtttgaaattagagttatataatgcccagaagatcagggaagaataatcaccaaatgtgtgcaccgcagtattaatctgaaatacacgtagcgatctccataaatatggaaattccagaaagaaaaaaaaagtaaaatacaaagggcagagaagaccattcataaaactcaaatgccagcttccaaaaggcatgcagtacatgcatcaattagaataccaaataaagctctgcacctactacaaaaatagaagaaattgtacaaacactagcagtagaactttggaaacccagatgatcccattacaaagaaattccatatgcatggggatcaggcagtacacaaagtcatgtgcagcagaatgatcaccaaaacattaaactcattcgcaggtctaaatatctgaagagaaaagaagaaaattaatacagtactaaattttgcatataacttaaaggttctattgacagtaccttaagcgaaacagaaatcctaccccaccccacccaaaaaaaaacaaattaaaacatcgataatattgtatgcagaaataattaagatgtgcccgctataattctaaaaattataatttgacacatgcatgcaccttgtctctctttgtattaatgaaaacaacagagctcctgccatgtagctaggtcaaaaaggaattcaacgcatcaaaaattactaacctgattatattgactaatactagtataaataatgcatggtagcaactaattttccctaatgcttttgtaaacacaataaaacagataattaagttgcaaggtacaatattaattggtggttcaatgcatggtaccctgtttaacgatacgcaaaattcaaaagaaaatttcccattcctcccgatcctttctttggtgagaaaaaaaacagagcctatacaaattacaatgaaaacaaatccagcatgggaggaaatcacaaataaactcttgtgatgttcaaaagagaaaatatattgtatgagcttaattagtacaaactgaaatcttaaaattaataaacaaaggaaaacgatgaagaaaaacataacttttcgtgagaaaaaacaacagcctctatggccagctagcattcaggaatcaaagataatgtgcacgtactgctagtctgatactaggtagtacggataattcaagaggtgaaatgaatgtcacgcaactccaatgaagtaaaatatgaggaacagttatctgtcaattaagctaaaagattacttatcgcaagctagctaaccttccaagagaatgttgaatcgcacaaaaattaagttcctaacagatcactacaaatattatccagcaaattaacctttattttgggcagagtaaaattgcacctctagaaaaactacatactcctgctggagagaatgttccgagacatgataggatcaacgatagatttggcttatggacttagccgtttcaaatcctgtggtacaactctcagtttgaacactgtaacagcacaacaaaaaagtgtaggcgaattactaataaacctatctgtaagataaatttcatggccaaattcattttactttaaaaataacaagaataagaacattgtcaataaattaaggacatgcatgggaaaatcaagcttatctcttactactataattgtagtatttcttggaatatgaactggatttgaaaggatcattcccagcaaaagaagaagaggaagaagaagaaaaagaactaatttgaatgaaccgttaatttcatactatgcgcattgctacagtatcccaaattaatgaaattttggttgaataattacatttaataggtgattataaacttgatatgttaaatgctaactactgcaagagtgatctcatcatttgaccactgcagcttagctagatctctcttgaagtagtaaaattttctttgagcatatgatgactagaggaaattaatctctctcaatgcaagtggcactgttgagcacagcaattattcaaacaaaattcccatctaagtagaggtatagctactcctagctagggctcagcttttgaagagcaaattaaaggtaaagcaccaaagttgtgacaccttatggaggagacatagataggactagaagctaggagtattgagcaaaggcaaagaaaccttaactacttgcagtactagagaaaaaagacccccaagggaacagcatcatcaccatcatagaaatgaatgaagagcatgaaagaaagaaaagaagaagggcatgcaagagaatatagggtgagtgtcaatcaagccactcccccaagacaccaaaacttactaactgtcagagatttttcatttttaatcattgctccctagctagctagtactactagttccaactttatggagtaattaacctcatggatcgatggatgatggatggctaactacagaagcagtgagatgcagcacatcaatttatgcatcagtgatgagaagaagaagaagaattaagaagaagcaattgatcgaatagtaattagaggagctagctaagctagagaatgaagcggaggagctagctaggtggacgccatggatgcctaaagcaaagcaagcggccgatcgatcgagcttagcgcgaggtggccgtttgatcacctcgggtggccgtggaagaagtgcgcgccgccgaacgggccgggcgtcgggtacgggtccatcaccacagccgatgacgacacggccgccgccgccgccgcgacgccgctgctgccgccttcgccgccaccgtgcggcgccgcggccgtgctcggggaggagcccgcctcgcccgcggctgcgtggcggccgcccatgccgccgccaccgccggacgagtgttccgggccgacgtcgtggaggatgcccttgaagacgtggccgccgatgctgacggtggtctggtacgccacctcggcgtcggcctcttcgaccggccccagccgcacgcagcggaacaccgcctccgagctcacctcccgcgggaacctctcgcccaccatcatctgctgctgctcccctacaacaattgcacacatctatcgtaagaagaagaatcgaagccatggcgggcgagcaagcagtgcataattggacgcagcatgtacctgaggaggtggtgggcgtggtggaggtgg

SEQ ID NO: 29283 - DNA, 20206 bp, Oryza sativa
acgatggccggcacggcggcggccatggcctcgcaggaggcgtggtagaagacgctgccggtggagaagaggacgaagccgccgccgtggaagtagaggatgacggggagcttggacgtcggcggcggcggcggcgaggcggggttggggaggtagaggcggagcgacgtggcgagggaggcgtcgagcggcacgtcgcgggagaggaccgggccggtggcggagggcggcgcgtcggggacgaaggggcgcgtgatggtgccgtccgggtggacgacgatctgcatgaagaggttgttcgacttgtccgtcgacggcgccgcggcggcggtgacgtcacccatggtgtcgggggcttgctcgctctgtttcttcttggatttgggaagataattagtgcttaccagcctcgtgagcatatatagtgtgtaatctttggttgaagtctttagtttgtgtttttttcatatcatgtcagtgtgggggtgagtttgtttacatatgtattttataataattgagtgtagcttatttgagcaaatacctaaacgttattgcattatttataataacatcattaattattacactctatttaaagatgatatcagatattttaaaataaatagagatgattttaaatgctcgaacagtaaggttatggacaatggcatgatgtgcacgtgtagtttttttttttatggtgatggatcatggaagcaagaaacagagttgagctaacgagtaggcgtcgttttttaagttgtgataataagtatacttgtactgtcacggttatcaaaagggaattgaagtcttggcaagttggcaactaagggcctgtttagttggtaaagagagaagccaaacaaaaggcctgtttagtactttagttggtgaaataaaatttttgggtgtcacgtcggacgtttgaccagatatcagaaagggttttggaagacgaatgaaaaaaactaatttcataactcgcttggaaatcacgagacgaatcttttgagcctaattaagccgtcattagcacatgtggattactatagcacttatggctaatcatggactaattaggctcaaaggattcgtctcgcgatttacatgcaaaatgtgcaattagtttttctttttatctatatttaatgctccatacatttgttcaaagattcgatgtgatgcttttacgaaaagtttttttgtggaactaaacaggcccaaaatagaagcgtgcataagggtaataagaaaatttagtaataaataacatttttataacagttaaagtatttcttgtctcaactattgtaagtagatagtcattaatttaagagtcccactacgatgctctatattggtagtagaaaacaataagaaccattgagctaatttgagcaaatggatcagatatattttactacaccctaattaaaggtagtagaaacgtggagacgtattattgtaaaaaaaaatatattgaggggggtataattgtcatttaaacaatgattgaatcccctcctaagctttttagatggaacatgagcgatgtcagcacaaagaatgactatagatcgatctagtcggaaaaaaaacataaacaaagttacgcttaatcactatattagtaaattactaatttaactttgataacgaacggttcaaatcatttctactggtagtataatattattaatatagagcagcggagcatcgttcttaatttaaattacatatattttgttataaaaacatatttgtttaagaggatatatcacacactatctttgaacatgtcgacaaaggttgcatacttccaaccacccactttggcgatcgaacaactaatgcagactgtttgtcgaactttcttccttgttcgatctgcagaggaagctcaaaaaggctacctgtggcgcaagaatatcgcaattgtggctgtcgtcgagtgacgcatgcaccattgctgctgctgcatttaaacaggataaataaattgaataaacctgcagctgatcgagctcatctccggccttcgttgagaatttgtctccttaagaactgtggctgattgagctcctccaaattcgtttgtattaggagggtcacgtccctttctaagttaagttatttttaggacgaagtaagcagcaagtagcagtggcagttgtgctcccttctcttaagctctttttgcttcctgcaaggaatgattgtggcttaatgcataaatatgacggataaaaattaaagttggatagcaagtcaaaaagatctgtaaaagcaggggaatgcacaccttgttgactcaaagcagacaacagatagtccaaaagatgattgagccttctgcaagtgcttaaggtgcttcctaaaactttcttaattagcatcggcttcttacttaattaatgtctttggccattcaaaacacaagcacatggccacttcgccatcgataatatgatagtggtggggggtcagcatcatcatatcgccatcgataatggcatgaaacatttatcccacacggttgcccggtaaagaggccagcacaaataacgcatagaaaagtaggataacgacttaacgagtcataaaaaatagagaaagaaatgagaaaaagcagggaaagaagctttgcattgcacaccatattgtctcaaactcaaaggacacagcatacatatatgaatataggggcataggacacagcatatcggcacttataatctcttctctactattataaaaattaaagatgtttttgtcagtattttggtatgtcattcgtatttgagtcggtttttaagttcgtttgcttttgaaaatacagatctgtgtatgagtcggattttcagttcgtttgcttttggaaatacaaaagatgtcatataagaattttctttaaaaaacttgcacgctaacttgagatgaaagtcggactcctaattacagctcattattttctaaaaagaaattcgagagaattcccatggtgaatttcatcctagctaaaccgtataagaataataagattaaaatagcattcactcgttgcaaagcacatacattttttctagtaataatattgcaaccaaggattacttgcggatcagcccacaaaccatttataggccattaaatgggtcatagcccatctacgggtgtacgggctggcccacttatatccttattgcaacctggtccaaaatatttattactgtgtgtactaatcgtttgtactagaaaataaaggatcaaaattgcgtgagaagagtgaaagtcatcatcatataatacgtaggataaccaaggatcaaagtcgcagggcttatgtgaacttttatccgaatttttattttcggcccagcatatgttgggctgtttctttttttgctcgtgtctatttctctttcgggcttagtaggccttcttttagaataggccgaattcaggcagatgggcctcactgcccatgcacatgtttttttctcaaaaaaaaagtttttttttcaatttatataacacagagtttgtatgttatttgtatatgtacaacttttgtacgtattttttctttctcaaaatgttttttcaatttgtagatacaaaacttttacacatatatgtataaaattccgatgtatttttttttcatatgtatgtgcaaagcttatatatatgaattatatatataacgttatatgtataaattttctgtgcataacaattttgggccagtccaataattaagcgtaagaaaaaaaagaacatgagagatgggaggaaacagggacgaccgagagaagtgggtctctgaggcgacatgtgccgctcccgcgcgcgtgacccactgtgtattagcgctgcctaaataaaagaaaagaaaagaaactgaggaactctaactgaggaatcaattcatcctaaaataagttaactaaaataagttaactttgtacaatatataacacatcataatactaaaaatttagattggattaacttattttaagacggagggagtacgttgtttttttttccattccacacaaatggaccaaacggtttataagtgattatatttcagctcccatacaacctatagtgtgctaacgtaaccttgaattttagctcagtggcttgtcgttttctcgttttctgataagtaatatcaggattacgttctgtatgaactctttttttttttaagtaaagctgggcgaaagccttttctccaaaatatcaggattacgtctcagctcaccacaaagcccacaaatcatcggattcatatttccgtctctttcagagcaggatttcagttatccaggtgtgttctccaaacatccaaagatctagacagaccaggttacaaagaacagtgccaacaatggtgtaaatttctatctccatcctttatttatcggcaatacacacaatatttgtagtatatatcattatcttttcatacatatttagctgaaaatatattaagtatacattcctagatgaaagcatagatggacattctccagctaacacaccagctcggaaaaattgtttcgtgccgatgaacagagccgaacataactgaactctcactaacatttgacttgagtgtatttgattgatggagtgacatcagcatctagcagtgttttaaatagcagactaagatattttgtggtagattatctcaaacggtaaataacagctaaaatgcatatgagagtaaatagctagatcattttcgaatagctagctacaattatagcccgagatttaaaacctttggtatctaggcggagtagagctgagggttggagagcctcggcgtgggcacggcgaccagcggcgtggccttcttcatcacgatgccgaaccgctcggcgaggtccagccgctcgccggccggcagctcccagtcgaacgcctgcaccagcatcgccagcgagtaggccaccatccgctccgccatggcgacgccggcgcagatcctcctcccggacccgaacggcatgtactcctgctcgctcccggtgaagtccagcctccgccctccgccgccgtccgccggcaagaacctctccgggatgaagtgttccgggtccttccacaccgccgggtccctctggatcgcccacacgttgacgaacacccgggcgcccgccgggacgcggtggccgcccaccgtggcgtcctcgccggggcagtgcggcaccatcagcggcagcgccgggtgcagccggagcgtctccttgaccaccagattcaggtagtgcagcttcgggaggtggctctcctccaccacgccgtcgcgccccaccaccgcgtcgagctcctcccgcaccttgcgcagcgtccccctgttctggagcatctccgccatgccccattccacggtgttcgacgtcgtctccgtccccccgatcaccatgtcctgcagccaaatcacacagccatgaatggtggtgtcgtcgtctccgacgccggcagtgcagtgactgagcagtgagcacttaccatgagcagggccttgacgttggtcatggtgaaggcggtcttcccgtcgccgccttccttctccagcttgagcatgtactcgaggaagtccgacgccgtctcgccggcggcggcggcatggtcggactcggtcctcttctggatgatcctggcgaagatgtcgtcgaagcggtccttgagcaggtcggacttgttgcggatgccctggatgtcgagcggcgccagcgccgggaagaagtcggacacgttgggcgcgccgagcaactcggtgatgtcggcgacgagctcccggaactccttccccaccgtcgtccgctcgctctcgctgccgacgttgccgccccacagcgcgccggtcaccacgttcatcacggtgaggaacatctgcgcgccgacgttgacgggctcgccggaccgcgcgcgcaggtggtggagcgtggccatgaactcccggcggcggaggccgtggaggctgtcgaggccggcggggccgatcatctcgtggacgcagatgcggcggaggaggcgccacgtggggccgaccgggttccacacgatgttctgcccgccgccgtaggagatggagcacgcggcgtcgggcgtgtcgcggttggagaagacgaggtcgtggtcgcgcagcacctcccgcgccagcgccggcgaggtgacgacgacgccgagcttggagccgaggcggatagagaagatggggccgtacctggcggcgaggccggcgaagtaggtgtgcagctccgggtcgagggacagcaagctgccgacgagcggcagccccgtcggacccggcggcaggccggcgccgcggccgcgccggaccgcgacggcgaggtacagcagcgccgccgcgaacagggcggcgtagagcagcatcgctggggtggatgtcacctccatgactgccaagcaatcgagatattaatgcactcttaggtggaaaatggagctaatccatcaacctatttagggtgtattcggcaccctcttttctcaacccctctctctcaatttttcacgcgcacactttttaaactgctaaatgatacgttttttgcaaaaatataaaaaatttctttaaaaatcaaattaatctatttttgaaaaaaaatagatataattaatcacgcgctaaatggatcgctccgttttccataattacaactcccttcgtattttaatggatgacgccgttgactttttaactaacgtttgacctttcgtcttattcaaaaaatttatataattatcatttattttattgtgactttatttatcatcaaatattttttaagcatgatataagtatttttatatttacataaaaaattgaataaaatgaatggttaaacattagttaaaaagtcaacggcgtcatatattcaaatacggaggaagtattccggatgggaaccaggatacccgaacacagccttatagtataaatagattaatatggttttcaagcaatttttctataattgtattttcaaaacacaatcgtttaactgtttgagaattggcttattcgaaaaacgaatggatagaagttaggaaagggaagaaaataacatgccctaagctaagctagctgcaaatccacatatataaatcctcttgatcaaatgcaatcccaaccaaacacggcaagacgacgaggatttcatggattgctccgccggaaggatcagtgcgagtggacggaagcgcgcggtggatggcacgatggagatgccgagtttgtttcgttctcgatcgacttctcgcgccaaaaacaaggagggacgtaggaggaagagaaatggacagggggcactggccagtgacatctactctctccgttttataatataagtcattttaacatttttcatattcatgttaatgttaataaatctagacatatctatctatctggatttattaacattaatataaatatagaaaatactagaatgtgtaacggaggaagtactaccaatctagaagaatcttgttatgttttctcacagcctcatctggatatttttgttcaaggaaattataccatgattgctgacgaataaacgaaaatgggggtaaattattgtgggttgccctgtcatgtcaggtactcaggtgtagtgtagctcgtgcatgccctcgtgcgaataaacaagtcatggaatcaggcacttaaaccaagagtaatccatccgtctcaatataaatacaacatccgttatattttaaatacaaccatgagttttcgtgtttaactttgatcgtcccttttatttaaatttcttttatgattagtatttgtattgttattagagcaagtataatagtagggtataagctggctaaatgctgagtcggaggagaaaagagaggagaaacgagctgtaaatttacagccggcttggatacaagaaccaagaaactctgtgagagagacaagtggattctgtattaattgtaaagagctaactattagagaagtttaatagtatagcccactacaagctctaattcatctataaccgatctaatagccaattcatacaatagttgcttactatactattaatatgtggtccaacttgtcatacacacattgtgtcttggagtccgtgctgcagctggctacaaatctatagcccgctgctcttctctctcatcttttatctcgttaaaatatatttatagttggctaatagtctgctattgtacctgcttctatgggtagactgagaaaagactacaaagaaccttatatccaataggttgtctgtattattagccttgctcttaaataataaaacatgaacaatactttaggcatgacttgttttttaaatttttttttaaaaaaatattttaaataagacggacgattaaaattgaacacgaaaactcgtgactgcactcaaaatcggacgaaacgagtgtagaatatactcatctgaaatcatctgaagattgcatatccttgaccattcaatctcagggaggggaggtcaggtcacatgggctgtcttggctgggatcgttacttgtgtttggaagcaaatcaccctcccacactaaaaacggagtgacctattaacacatgattaattaagtattagctaatttttttaaaaaaaataaatttatttatttattttaagaaacttttgtatataattctttttaaaaaatcacatcatttagccatttgaaaagcgtgcgcgtagaaaaagaggggagtgagtttgctacgggtagtacctagtttcaatgattcggctatggccatatatctctatcttgttgacacgaatcgataacaaaagtactaaattttcatatatattccaattaaattgttgttaaaatattgacatactaaaattttgataacaaaagtacaacaaatttcatatctattcatataaaaatgttattaaattttcactaatttgtagaaaatataccgtttaacagtttgaaaaatgtgctaaaaaaacgagatagaatccacatgttaataaaaaagcggaggtaatgcagactttagcacttgatggtggtcgagtcattaacattttagacagtgttttattcactgtttccaacttcacccactcatttttcacacgtacgttaccaaactattaaacataacttaaaaaaatcatattaatatatttatttaaaaaacaagtaatatcaattaattatgtactaataagtagttccgttttacatttgcgagaatgagttcccaagtcagtttgccgaactcagcctagtgctgttaatctcagtctctttgcccgtgttccgggggggaggggaggagggacacacacatccacgggcctgtctggtgcccatgagtaaaaggaaaatactttagcttacctaaattggtgacaaggcaccactgatattaaaattattagctattacttcttttgggatatgtccaaatttataatattatgatatgtcaaatttctcaaaatcccttatattttaggacggacggagtaacaagtttaatggtagaataaatattagctattagctcatattaaacctaatatgtagtataatatataagtttatctctatatttttcttatatcttttttcatccatacatttatcttagagtacatgactatatgagccaacattctttttttctataagttctcttaccttcatgtaaatttatagttactcgagtttgagtagtttataggcacttgctccaatttgagttgcggttcccaccaacatgtgaggaagacactgatcactgtgttagtcacttcagctctctctctgtctgtaccacaaagtggagccgggtggattaggcagataagcacagatacaggacagcaaatcagctgtgttaaattcagcccattttgctacagaaaaacggcccaaaaaaataagttgaccctttaaggcccatatggccgtacacagctcatccagattccagaacactgatccctccggcctttgcagcccataaaagcccattattctctctctccagtctgcaacactaaatgtttctacactaacttgacagtcttgaatgactaccacttttcatataggtcacactccctaatagcaatagggagtactcccttcactaagttgtttagactttttattagttaaacttatttaattttgatcaactttacgtagaaatatagtaccatttctaacacaaaacaaacatattatcaaaatatattcaatgatagatttaataaaactaagttggtgttttagatactgctatttttttctataaatttgatcaaacttaaaagaatctaaataaaaaaaagtcaaaacaacttttaatataaaacggagggagtagtataaatttgatcaaacttaaaagaatctaaataaaaaaagttaaaacaacttataatataaaacggaaggagctgtagaaattaagcaagtaatcgacattgggaggtaccaggatagcaacctgcctcctgtttcagtcatatcaaatacagtaataatttataaaagaaaaacatagtcgtaagtcgtatcatatcattatgatacttcatcatcattacagctttcttaatctgtgataaactagggcagcttggatctccctgcaccattgatcagtatgtgcagtcatcactcttgatcagaatctgaagtcatgcatacgaaatcttcagtgtttaattccaccattgatgagggattaaacaaatgtgtgataaagatcacccaaccttcaaaacattatctaattccattacgcatgcatgaatttgtttgtgagggctagctttcatcgcgtcgactttgttgcaagctcaagaaaatatctgacagtgatggagccgtcagggtggtagaaagaaagcaagtcaatttgcaaagcagttctttctgacaggtagccatcctgcaacgagttatgagttctaatcctctcattgttgctcgttaccttagttaccttattagcacaacccaaatttatttttttaaacggggtttgtgggttttatttcactgtactatattctttaagcattggcttataaatcactaataacacagatataaagttattttttttaccatgaattatgtttgtaacttcgttccattttctgcagaagataaacgcaaataagatagcgtagaattgatcatttgtaagtttagtatagatatattgcatctttctataacatcagcagtgcgaacagctgacgttgtcctagcttactgacccccaatacatgataaatctttgtcaggaagacggagaaaacagtgcatcgttccaactctgaatgtacaaaatccgagttggtcagtttcaataaaactgatctaccgtgcaattgtcgttatcgcttaccaaatccatgttaactttattaagcaatttgctcttgtagtagcatcaacataatccattaaaatgcattaagtataacagaaccccccaaaaagtatcaagcaaacaacgtttattcatatacatgtatggtggtgaatggctagtagttcttgtgagctactgctactaaccggtggagagattctccataggaaaatgccttatcaagagaaaaaaaaaagtagtttacactgccatctatttggatatcagagtgccacgtcacctggagaatggagatgacctctcatatttctgaacagaagcatgtatacatgcaaacgtgtctataagggtttctagttctacaacctttcatctatgagaaatataggttctataaacacaaagcccttggttttaagggtggaacatcactattctatgttctgaatatatcttgtgcttgtgtctgtcaaggcacctgggagaactggtcttgttatcatccacagcttgggacacagtgcaccttgctctcttttcacaatcttctgcacctaccagccatgcacaatttgtatgccccttcagtctaaaagttcaatccatctgaattctgaacccttgcaccatcaatcaagctcgaatcgtccatgctgaagtcttggtagtcaagcagccagtctgttgtgcttccatcccatgctgactgcttaacgatgccactgaagtcatcttcattgctgctagtaaaatttagccatggctcgtcagctggaagctctgcctccaacagccagttcaccaatgggtccaggccatgactgctggtgttcctgcttgactgctccatcgagtctgtgggcactgacatgtccctgctgcagcctccctcgggatcgaacggatatgccataccatttgacttggctgattcggttgtggcagtggacagcgtggaggttcttgtttggctaaccaccttggtgttgggcagaggctgatgtgtggctgggtcgatgcccatcttgatgagcttcttcttgatgtgcgtgttccaatggttcttgatctcgttgtctgttctccctggtaatttggcggcgatcttggaccatctgtgtacggatacaaggtatcaagaatcaagagtaatgaaaatggtaatgttattccagtaaaaaaatatggtaatgttatcttctttgtgcaaggaaccgaaagggtgaaaaagacaagccattcgaccaatttcaagtattttcccagtttgctaatgatagcagtgtattcgatatcatgtttcaacattttttgcactaagctaggttgattacgacatgattggtgctatcacttttactttgtagcctttgaattgttctatttctttctctctctggttcatctacataacatatggaggttacatcaacataacatttgtcggtttagagggcaataacaaaaacaagcattactattccattattcttttgagtcacattagcatcattgtaatgaccaaaggcacggaacaataaatcaacaacagaggttacagagaagaagataataaaaggaacaagaatcactcattcaggacctagtgaaataatgacatgcaaaacccacgggttaattaactgtcaaaaatgtcgaacgctgatacagttgcacttagacagctaacagtaagtttttagaagatatgaggtcctattatcagcaatttcctttccagatagattattctaagcagttccaacaaaaatgttaaccaagggtagcttactctcagtatataaggacttgtttcattctaaacaaagtactaatagtttttagataagcttgtagtgattaatagtcatggaggcagactggaggtttgagatttgacaaggataccgtgtgcatatgactttgacgctcttggttaaattcagctggttgagtattgggcacatatagtcatttgctaattagttgtatacaaaaataatctcaattattttgttgggacgccaatactgatattagatagcaatctgtcatactatctatgctcctttactttcagctttagaaattgatatgatctgtagcacacaccttcgaccatcattttttctcaatcaagatttcaagtataattatacgaagaagttacatgaaaaattaaaaatctagtaatctcattttgaaataacaaatccaaacagtttgatgcatattagtggtcaaagctttatgagtttgatccataaaagaaacagagggagtgatgtatcactatgcatcttgtaataattaataaatgcatgcatgcatacatcatgttttttgttcatatacatagtaaacatactacaagttaagtgctcatacgatctttagaaacacaaatgcactgcttctaaagcataccaagagattgatatgtaactacacactgctacatacacgatgcacacactaactgcatgcaatttggtttttgagaagcattgtggcaccactgctcattaccatgaagttttgctttacctatattccgtttttcctggatgcttctaaacttaatcaaaaggaattcactcatgggttcatgcccaggaatgcatgcagatagcattttctagcatagcaggaggcagatggatcaacatatgagatgccctatatgcaagcttataagcgtgctacaatatatcatatcatatcatgagatatccatgcaagtaggcgtacctgttaccaagcttggcatggaggtccacaacaagctgctcctcgtctgcggtgaggaggccacgcttgaggtcagggcggagatagttggtccaccgcaacgggcagctcttgccacagcgcagcagccctgccaacttaggcactgctcgccagcagcagcggccatgtgtcaggatgaaactgatgagcttcttgtcctcttctgccgtccatggccccctcttcaccttcttcttgtcacagcacggctgcctccccatttgctagttactgcagacttgcaccagatagatggaatcctgtataaaatgaacacttataaatttctagtgcttgcacatgtccagtgagctgcaaaactcctgtgcacaagcgtcagatgaaagggtggtgacagctctgttgcaactgcaattggtgtctgtgcttgcatatttataggtcagctcctcacttcctcagtttctcgaaaaaaatgtgtctttcatgaattttgtgtggtggtgatgatgatttggcttaatttagtgtgcttagaaagcaaggcctcaatccgtgctacagtagacttgcacccaaaaatccacatatatgcattgctgcaacgtggtgcatctacagtttagttgttgatcgaatttacaaattaagtataaaaaatatgtactattttattagcacagcagcaatttggtcgcacatgatgctacaggaaactcagatgtgattttctctggaatgaagttgcattttaactagtatttttaaagcttttgctgctttcatttcccacaaggctacacatttatgctgcctttgctacccacctatgtagccatttcgtcatcagctgtgaactatagctaactgctaaccaaagtaccaaaccatttgaggagcccccctaacttcatgtgattgctgtgagctgtaactcatcgtatggaccagaataatgactttgagcacatggtggtgtatattttgctacagtaatatgtagaaaaataatcacgatcagtgactccagtggtgaaaattgtcatacaagatacaggcaatttaggatgtcatagcactgaattcatgacatcagctttcagtaggcaagaactcaaccaagtgatttcttctggcatacatgtacaggtgcaaattgtttttctagggcttgttcggttaataccgaagaggaagggattggaggggattaattccacacctcaataggtgtggaacaaatcccctctaattccccttcaatccccttctaagagggattaactgagcaaagccttaaggaaccaatgctaagtctgttggggaaaaaaattacaagtatacctggggctgggacatactttgtcaatagcaacactgaagatggaaagagtcacaaacataaaaatatcaaccatgtcatatatcagcttcctcgaatatgcaattactcatttactttacgatcaaccagaaaaggctagcctccaatagctctgccgatatctaggcattaaagcatatcaggaaaaacagtaactaattgatttgagttgagaaaacagtgcccaccatcagtaactttcaagtaccctgttccatcaaacaactgattcaatgtgcaagataactgattattttgtagcaggatacaaaatggaaaactagtgaactatgaactgtatgatctaggcatctaaccacactcttcagatcctactcaccacaggaacgggaaaagaaatggataattgtaccttcacccagaaatgacagcaagggatagcttattatctgtgggcacacaacagaatctgccgacatgaagaagaaaatgaccttgtgctgtaacaagataacaatgtcagcttggtgatacatactttggagtattgatgtaagaaggggacattcaatcaatcaatcagcaagcttgtaaccaagctatctattagtagatgtaagatttacatgtgtacttagaatgttgaaaccaagctcattgtgtattttctggaagtcatactccagatttcaagaagtgatatataaaactacaaaaagtgagaacaaactcttgagaaaacatatgcttaggaaacaaacactctgtaaggaatgcatctgttgtatatttacacccagtgccgttgcatgtttctgagatgaaacagtaaataaacgtagcttttagaagaaggaaactcccatcatcatgggagtaattttctttctagtcggttggtctattccatcctgccttccactatctgtagtctgtactagttagaatcaatggactgcatttctagatgagaagatttagctgacatcatccagttggtattatcatgcaaaattggtcctgaaaaaaactaaacaggagggattatctgggaatagtaacttcaacatttttctcttgtttttccccctcttatgtgagaggggtagttgattattcagtgcccaacttcaagcaagcttgtacagtaggacttagtgggaggtctgtgtgtcctttcagtataacttctggctgcttccctgaagctctgactataccttgacaggataggaagatattactaaaagaacaagtgacattatctatatatgaggtcatttaataataaaaacccttcaaaattacatgtgcatgtaagtgagactaccaatatttaggctcctcagtcctcaccaacccatctgagttacagctttcaagtaaaagacctgacactttcaagtccgtaccatgattctccaatggttgagctagtcaatgttatagataagatcacatagaagtaaccactgagctaccatctcgtgtttgtgcagtaaccactaaccaacaggctcatgattccattaaaatgcaaggttttagacagattacatggatttggtatacattcgatggatatggttagttgattactgctcatgtaacggaggtggctagcttttaaaatgcatgaaaaagagaatgggtctagtatttccatcactacatcagctaaatgcactgaataacaacctggattaccaaccttccagctaagaaaacgcgtaatcgatgccgcttaacattaaaggtactcttgattagagggtaatttatatatttaggttttgaatattgatcttcatggagactttgcgttttgaactaaggtaccctcagtaaggtatccctcttgctttatttagcaattagcacaatgactttctgaaaaggttgaaagaaatgactgggcttaaaggaaaatgttgtgcctgcctcttcagacaaaaatataattaaaaaatgctaggaagtgtagcttgtctacctacaaaatcatccaagattgatcactctatctgacagataatgagagcatggaattagttctagcaggctgtaccaacggcatatgcatgacaaattggcaatgctaatagtaagctaacaattagaactggaatgctcctcttgttcattcattggcatcgttcccgaatacgacccaacgcagcatggagatcttgtgtgcattcctcgattcagtctcaagctatattgttgccgatgctgaattacatgagcacacggaagtattggtcttccaagatatcatcataagacaaaagtaccagaagaagggactagactgtacaaaacctacaccctcatgggtccttgctgcaaccaaactctacgacttcgcgtatctgctcatgtcattgcagaggactactactgaaggttgcaaggtgtttcacatattgtcattcacatataacaacacttcactaaaaactagtgtgagaggagacacatgcctctaaatttggcctacatcaaagttgttcttccacccccaaaatcaacatgcatcgatcggttcatctcatggggggacaagacaagggcgacgcattcagatattgcgaccatgtgtgtcagtaagacaagcaagtatacccaccaagatcgcggcaagatcggaaagctagggcacggatcgcagcgaggagatgtgtacaggagactagaaagcgaagcgagcaaaagtgcagtggaatctttggttggtaatggacggaacgggcgcacactgaccgagcggaggcgcggacttcgccgaggtggcggtgacggcgacctcgcaccctttcccttcccccaccaccggaggaggaaggggagggcgccgtcggaggggagggcgtacggcccgcgcttggaaggggacgccattgacgagggcgcaacacaacagtgcgttggatggcgatggctggagggcgaactcctgtctttttcagaaagttcagattgttttttgtagaaaacaataaggatttgtttggaatgaactccctccatccttttttatatgtaacgttggttaatttaaaaataaatataaaagcgtcaaatatgaaaatacagagggaatatgaatttcgtagtcaattccaccttaaatcccttcgaaattcctatgttttttttaagaggcctaaactcttttaaaggtacacatttttttattcaattgttatggactgaccgggtaaataaaaaaatgaattcttggaatttttcctatgttgacttcgttatatatgaaagagatgcatccgaatgaaaaataaaaattgttcatgtagcaaaagtaaaaaaaaagagcaaaataagggtggtgatttgttttaaagcggaaaagatatactttgacaccctcgactatggtatcaactatggtatgagtaattcatattcgaacacacaaataccggatatattgatttctccaactattaaaacgagcataaacggtgaccctgattgatttggaaaacagttttggctgacgtagcatctacgtggcggtgttgatctactatctgtcccatgtggtgtttatgtggcattagaataaaaacaaaaacaagaaaaatatgtgagacccatatatcattcacccaaaaaaaaagatgggacccattgacataagatgcacatgtcatcatttgtctgattgtctcctttcctttttcctctttcctcactccccatctttttcctctttccttttcccccttgctactgttcgaagctcgtccaactcccttgtcagcatcttgttctccttccttgtctgctccaccgtcatcattgtatcctccttttgcgcctcggtagcgctcgtcaccgccgtcgatgttggcgatggccacttctcgaccattacctcgccaagaactaagaatgacagcctctgcatcgccagcgcagacgcgcccttctccctgccggtggtcatctcaacaggtattgtcaacacttaccggacgcgcaccactaccgtatcgcctcacaccgggatggcgctcctcatcgtcacctccgaatccgatgtagcaaccgcggtgggggtcgacatcatcggcgccaagccacctcagttagcgggagagtcaaaccgcttgtgcacgacaaagtcacccaacaatggcttgaggatgagcgagaaggacatggtatcggcggttttaacctcgataatcacagtgatggctaaggtagcggtgccgaagataaagaggacgagaagggacaaccgccagggctagagctacgtgggacgaagactaaatcaacaccaccccatcagccaatactgcttcccaaatcaccaaggggcaccagttttgatagttgatatagttggttttgtgttggagggcatgaattatactcgggccatcgttgagggagtcaaagtatactgttttccttttaaagctcatccatcaatccccttagccagcccatgcacaacaggtcattcaccagcccaacacaccgtaccgaatgggattcggcgctaccgtgcggccgtagcagatgggccggaacgggattcacgtcaggcccgtactatatgggctgtaactcacgtgcgggccgtatcgcgtcaaataacgtgggtg

SEQ ID NO: 29284 - DNA, 950 bp, Oryza sativa
actagcgagttggttgttctggtcagctaatggattttgtaaccccaaaaccacaccatgactctatgaccaaagcataaaaacattttttttctggctaaagttttattagtattgacggagcttggggctcctcaccgggagaccgcgcaggcctccctttgccggttcggccgggggctctgggtgaggttctaagctcctagcctgtggaaagttcgcgagagtggaaacacacaagacacgagcgatgtatacaggttcgggccgctgagaagcgtaataccctactcctgtgttttggtggatctgtgtatgaagaagctacaaaagagctggagaaccagagagctcttactctctccctctctgatcgttctggatccgaaaatttccccttctaagtgggcaaggtcctccttttatacctcaaggggataccacatgcaccatctctatcttttttgtggggacttatcctatcttttcataaacagacggagacttgtatggttgccgtccgaatgaccttctgatgggacggcccatacctacctccacttccgccggaagcaggcgcgacgtgggaacatggctgtctgctgacgacatgaccagtgtcagaccggtcacaaatcggtcattcttgtccaccacgcgtcagtttatcaatctgcatgttcgcccctcttcatacaatgtcttgtttgtaatggttaggatgaagcctggtatatatctgaccgggaccaacgtgccatctccaggagctaacacgccggctccggctagggacgagtgcttggaggctctcatcctgacgggatggggcgaggcgtgcgtcagaccgcctgtcgccacctaacccacgatctgatcggtctgtgactggtcactgaccggataaacgagcgcgctgcactgcgttacatgcggcgtgacgcgctcgt

SEQ ID NO: 29285 - DNA, 11242 bp, Oryza sativa
atcccggttgctttgtcaccgctgtaaaggcgcctcatctccttatcttggccactgcttcatctcctctgtagtcttcgccgcagttagatgaatgctactctcatcactagtgcatccagtggtctggaatagtatgtttcgatgccaattctgtctctcatggcgacgacctttgctgctgcttggtgatgatggagggtttaattgattgattgtggagtcctaatttggacactaatccgatctgggacccacccagatgagctttagtgatcccatggttgatcaaagcgtgctgcatctgctaatctctgatgtgaagcagattggctgaagaagacttagatatcctttcttctttttttcccttgatagtactccctccgtcccttaatataagggattttgagtttttcttacattaaccactcgtcttgtttaaaaaaattgtggaattattatttatttttttacttgcttaattatccaaattactttaagcacaattttttattttttatatttgcacaaatttttttaataaaacgagcggtcaaacaatgtaaacaaaaactcaaaatgccttgtattatgggatcaagggagtatgtattagctggagtaattatattcagtgctgatagagtaataattgtagcttctactaactgccagtcatgattctaaaaaaatagaaatgtagagtagtatatatctgaatcttagcaaaatattattgtatgatcagatcgaccaattaaggcaagcccctcgtatgctgcttgttcgcaggtgaagctgacggtatgctgacagtagatttacttccttcatctataaatataagtatttttaatgttcagaatttggttatagatataagcatttctcaagtactactttttcaattgtcgtatcgctgagtgtgaactttttcaagtaatctctcagtggtattaaagtaatattattttaagtttattttttctaaactctaaaaataattatatttataaacagaaggactaataattaattaagtgaataataaaggttgattaagtagggtggtacttgcacttccctttccgttgctcgacttgctccaaggggagggtgggtcccaggtgacatgcgagtgggtgatggttggttggttggtaaagtgtgcgtgagcgtgtggggccgaggggccccaccatagaacggcgaggtgagccttatccgaaatggggaaaaaagggtgggctctcttgttgaatcggcaaaaaaaaaaaaactcgaaaaacatttttatttttagtttttggtttttgatttgtcaactgagacggagagagacaagttggttgtcacggtttctcttttcggcgaagcttaggccaatgggagcggtggtgtgtgtgggcgtgtgccacccgcaccaacatggaggcacaagtggtccacgggatcatcatgctttccgttgatccttctcttcctcgagtggcaactggcaacatttgttgtcggggatcttttgttaataagaaaatattttaattacatgcgagttatcgtttactctatccgttatagaatacaacaacctaaaatccgttaccgaataaaataagatgaaacgtatctaaaatcatccagattcatattattaggatatgccccatctaattctagattgcaatgtcctgtaatggagagagcatgtatgccatggtatgaattttttttaatgacctttctgatattcgagctacgagtgataagttaagaaacataagccaactaaaaataacttataaataattttttttatatctatgttactagtgatttaaaattcagtgttggaaagtagactacaagagagcgaaataaactttaaaattcagttttaaaatttaatattttattgtgattggtaagctaacggttagcaaagtaagtgtagctcaactgatttggtttattgtagtaaaaccagtcctgtgtttcctaaaataaaaactgatataccttttttcttacgtgaaacaacagaagaggtcctactgtgctatattatattaaagaaaaactgatatacctcacactactaaaaggagcagtagaacaaatgagcagtagaacaaaaaagcatgggctccagacacaagacgagaagttggcccagatccccgcgacggagagcagcggcccgcactagctcatagtactattcttcgttactgtctacaaccaacaggcaacagatatattcatacataaaaggagacccactgagtggcgactgacacgatgagcatcgcatcagtgttgtgcagcatcacaaagcatataggatgaggatttactccaggtaggctgatcagcagatagccatatacacttcaggtgaaccaaacagctctgcgttcctctcaaacaagaacagaaaagaaacaacacatgctaagagagattatgctgtgctgaatcatgatgatcaggtcaagtttctttcggggcgcccttcttcgcggacatcgcggcagccttctctgcttaaatctgagccacgtactcgtcgatctcaggctcctacagctcgcggaggccatccttgtgtgtcatcaccgcaatcttgatgttattgccaccgctctcgacaacctggagacatcaacccattactcaaatttaagatatttgttgcatataaaatgccaagcatcaaatgatatagctatgatggagaaaccaactcagcaaaaaacactgaataaacaaaggtcaaaggccaatgagttcgtcatgaaaaaaaaaaagcaaagcaagcaggcatctctgtctacagacaagtaaaaaaggatgacatttgttgcactaaaagagctcatcagaaaattctacatgtgcaacagactgacaaaatgcttaattacctatcaaatggcagtagtaatgtcattataaagaaataagtaccatggactcaatagttaatatgcatatgtgataaccatttgaagccaccaatgaatgtataagcagagtaagaaattgatttcggatatcatgaactgtgcatatgtgataaccaatggcattggtggagccagaatattcttaatgaggggttcagaatctgacctaagtggcatgattattagaatatagtgacatttaccagtaaattatcaaattggttcatatatggtatatagattcatgaaagttcaaatctaataaaataagtgactcttcattcccttgaatagctagttttcttatttgagtataaattgtatatgtttatgtatagtgtggttggttagcaaagagtttggggtacacatgtacccccatgtacccatctacctctgccactgaccaatggaaaaaaggtcaatgagtttgtcatatgtggcaactggcaaagcatgaaacaaagtactaacatactactttgtcttccaacaacgaaaaaaagcaagatatttcactaaaagaggtacagacatatacgtatatgacaaaatgtgcaagagacgtgcattttcacggtctgtatgagcaacagattgcaaaaatgatcaactgcttaccattagctagcataaactcaatggtggctgtgcatatgtgttaaccatttgaagccaccaataaacgaatatataaccagatgcaggctaagaacttgatttgaagtatttagctatgaactatgtgtccttgaggaacataaccatttgcagttagagacttacagtaatgaaaaaaggacatttagacttaggccttctttgtttaggcttataagctagcttatgagccaaaaagcctaagcctaaacaaacaagcagcttatttgtttgccctttttaaagccacaagccactcttacactgttaagccaaaagctaggttggagaaaccattttgttggattatatgaagtggaggtatgactcaaccattgaacttaggatttcaaatccaccggtttataaaacatataagccaataagctgacttaaaatctcaagccaataagtctaagcctaaacaaagatgaccttaatttgatatgtatttttgtaatggtgtatatacattttttttacctagacagtaaatacaatgaactaggcatccgtgcctatatctaagcagcaacatactaaagcggcagcagagttgacaaaatacatgcaagttgcagcttctacagtgcaatagaagagaactacaggtgcagattatcaataacagaaaaacaaaagtttatatgccactaatcaaacaactttaataacttttgaagagaaaaatgtactcacataagaatgcctttaaaaacttttgaaaccgtgcttaacacttaaaatatgagatgcagatgacaatcaaaatacacaaatgattaaatagctagagacgatttactacggataaagagttaaagacctatagccaacactacaacaataaaatttgaggtgcagatgaaaaccaatatacaaatgctgaaatagctggagatgatttatgagattacagatccaagccataccaattgctatgatcactccaggcaccaataagtatcatctttaagatggaagcaaacacaataaaaccaatcccatccatcccactctattttaggttcatgactgcatttatagtctcagccgattgtaacaaagattcagggaactattaatctttgcaccaaattgagtcatatggaacttaacgaagataacgatgttcaatcgtaggcgggcatcttacaaattactgaaccagtcaacataagcaacacaaattagtgaattacttttgagtatctgtcttcagaagcacagttactgattcagtggtagtggatcaaagctagaggtagttttaactagtaaaattattcagtgtgaagtgtatatatatacctcaaggagggctcggatggcaagcttgatggtctccttgccggaggtgtccttgtaattcttctcgaggaactcgcgcatggagttggagttgcggccggtggcgttggccttccaggcggagaaggtgccggatgggtcggtctggtagagggcgggcttctcggtgtaggggtcgaagccgacgatgagggtggagaggccgaaggggcgcaccccgccgctctgggtgtacttctgctgcagtccggcgatgtagcgcgtgatgtactcgacggtgacggggtcctcgacggtgaggcggtggctctggcactcgacgcgcgcccggttgatgagcacgcgggcgtccgccttgagccccgcgcaggcaagcgcgatgtgggtgtcgaggctggcgatcttgcgcatggacctggatttgggggggagatcgatccgcgggtgagatccggcgaaggggagggggcgggttgaaggatttacctggagtcctggagcttgggggtggatttcttctcgacgccgaggacgacggtgtcggtgccgcggacgccgacggcggcgttgcccttgcggacggcctcgagggcgtactccacctggaagaggtggccgtcgggggagaagacggtgatcgcgcggtcgtaccgggccatccctgcctgctggtggtggtggtgtcgccgccggcgaggttttcctgctctcgctttgcttttccttgtcggttgcgccgccgcctccgccttttctcgttgctgctcctgctccgccttttctttcttgcaagaaaagaagacgacgacgacgaagacgaagacgaaacggactcccattggcccatgggccggatcgtattccggcatggggctcgcgttatgaagcccactaagaaaaggccagaaagcccatggtttcttgctcacgaaggttactgcaggctgcatcccatgggcccatggttaagagggatcgaaattttattctccgttccccctttgattcgaggaaaaaaaatcgattttggctatatcttactcgaaaattttttttcttatctttcactcgattttctcacttaaacttacagtgcattttcttgtaagttacagtgcattttcttgtaagttacagtgtaatttatgaaacttacattgtaacttttgttttttaagctacaacgtaatttttaaatctttacatgtaagttttgaaatttgtattggatttagtctttttcttgaagatatggtaatttagtgtccattatagtgtttcttagttgctttttgccttttactgtgtctatcgaattttaatccaaagattaaaaattgcgtgatactcataaaaatctttcgaaaaatgcataggtactctaaaaaaataatggtttgtgtgtgtgtatatgcggtttatgtacctatagactacgtgtattgactgcctaggaaaaaaatataacagtatatcaaacaaaatgttttatcaatagttttgctgcatcataagttcataattttggccatgtcaatatatattgcctcacatgggcataaatttaatttgcaggcatcgagcagtcaccaattatccatgtctccccatcaaaatttgccaatgtcaaaactagagtcaaaccaacactggaatactaggagcccttgtctaaaaatgctttaatttctaaacggatggatttgagagaataaaaaaaagtaagcatgaactagctaattgaatttgtcgacatcatcagggcttgcaaacccatttaaaatctgaattgggcctttcatctatctcctcaaaagggaccaaatctgactcaaacttgaaaacttgttggatgcacttgtggcgtagtggagcttccgctatcttccccctcaaaaaatcatacctgcaaatcataggtagtgtttagttcgtgtgccaaatttttttaagtatacggacacacatttaaagtattaaatgtagactaataacaaaataaattacatattccgcctaaactgcgagacgaaactattaagactatttaatccattattagcaaatgtttactgtaacaccacattgtcaaatcatggcgtaattaggctcaaaagatttgtctcacgatttacatgcaaactatataattttttttttcgtccatatttaatgctctatgcatatgtctaaatatttgatgtgacggtaaagttggaagtttgaaaaaaatattttgaatctaaacacggccatagtatgaattaacaaacacatacctgtaaggctcctttgggttatatgattctcatatgaaaaattgcaatccataggaaattttactataaatgccatttggaacaaaggatttgaagtaaagccctgtttagatttcaacgtttttcttcaaactttcaactttcccgtcacatcgaactttcctacacacaaaaaattttaacttttccgtcacatcgttctaatttcttcaaacttttcaattttagtgtggaactaaacacagcctaaataaattcctgtggattgagttcctaacttcctatacaccaattccgtaggaaacaaacaatgagctcaaacttgtctctctactctctctatagaatccaccaaattctcatgttttttttttcctttcaaccatccaaacaatacacatttcatattcctatatgttttgcctgtttctgtatttttagaatcttgcgttccaaagagtaaaactactactgtttagctaattatttgcaaattgatttagatatgtgtaaaacggaagaagcaattattaagtatatacagttagcttaattaccacagcactctgtagacgctgttgaagaatgcaacgtcagatgcgtagagatctctgagtatgaatgagttgccttcctccattgccagcctcgtcaagctcgccgtcatcttcttctcccacctctcctgcctgtagccggccagcacccagacctcgacctcctcgtcgaccaccaccaccaggcacagcttcccctccaccgccgccaccttcttccgcgcccacctcttctcggtggtggcctccggcggcaggccgatgaggcgccacgtctcggtcttcacgtcgaacgcgaagatgtcctcggcgccgccgctcagcctgtcgggccaccggagccagtgcatggcgccgtgcgccctcaccgccggggcggcctccacgagcgactccggccacaccgcgacgtccgccgaccgccgccacgccatcccccgcgagtcgaacacctcgcagcggaggcagttcctgagcgtggggacggagaagcggacgatcttgaagtccgccgcgccaccgccgccgccgccggggcgcgccagcatcgcggtggcggccgtgcggtagcgcaacctcgggttaggcagcgcgcgccactgcctagtcgccggcttgcagacgtagtaggacgacgccggcttgcgcggcgtggcggcgtcggcgtcggcgtcgacgcagcagacgagcccccggtgcggcgagacggcctcgacgcggacgtgcggggaggggaggaagtcgagggacacgaggtcggccggcggcggcgaggggtgcatggaggagacgaaggtggcgtggtagcggttgcgcgcgacggtctggacgaggtagccggagacggcgtcggcgcggcggcagtggagcggcgcgaaggcgggctcgtaggtgaggcggcgccagcgggtggagacctggcggcaggcggcgaggtcgtcgagcgagacgcgtgtgagcatctcgaacacctggtcctccggcaggctgatgacgtcgcactgctccgacgaagacgaagacatcatggagaagagaagagaagacaagttggggcagaggcaggtactaggtgaggatctagtaattcagaactcgatgtgtgctagctgcattgcattgcaggcttgcagggcaagaaatgttggaattaatgaatgggccttagcccactcgaagattaattctttggaaaatcacaaaagcccacctcatgggatggcatgcatgtggagtttagtaccatcttgcttattctaggagagggggacctccttaaaagggaggatgtcctcctagccacttgaagcatgtgtggtggagagaagaggggaaacacacgcgcgcgctcgctcgcctggcctggcaggcggcgcgcgtgcacgacgtacgcgtcgaatggtccgaaaaattggctcctcacccttgcgcagatgcagcctccttttgcagttttgttttgctgcaaattcggattcgtttttgtgttggaaacgttccgaaaaatccggtgcgtgcaaacggcgtggagtccggataagttacgcgcgacttatccggttcggttacgcgcagtagagatcgtgcgggcgccctgatcaagcgacccttctctatataaaccgacccgccgtcttcatgcaatatatacgcaaaatcaatctagggtttgcctcctactctgtactgcgccgtcgctcgtagcctactccatcccgctcgccggcgtgcaccagcgatcgggagagcaggtctccggaacctctgcctttgacgtcctgcaccgggagaaggcggcaataaggtttttgggaagcgcttcgcgcgactgctccctgttcgttcgcgacggctcgccttcctcttcgctcgcgtgtttcgtgccttcgtagacacctgcgaaaagtttcgaccaagcagccggtcttttcgtcacctcggtacgtgttcaatatgttgcgcatatttgatctgttcatgttatactgtgtagtttacatgtgtagatctaatgatgcgttcatgctagttttcatctgtaatgtcatgatttatttatggaatagattaaatcattatatgtctataatctcaacaatccaaaaaccttattataggcactgtgattttactatggctggttttgccgatgcactgaggccggataaattcaccggtgtgcattttaagagatggcagatcagggtcactctgtggctgacagctatgaaatgcttctgggtgagtactggcaaacctgaaggagttcttactgctgaacagcagaagcaattcgaggaagccactactctctttgtgggatgcattcttagtgttcttggcgatcgtctggtcgaggtgtatatgcatatgaccgacgctaaggagttgtgggatgcactgaatactaaattcggtgctactgatgctagcaatgatctgtatatcatggagcagtttcatgactacaaaatggctgacaaccgttctgtagtcgaacaggctcatgagatacaaaccatggctaaggaactcgaactccttaagtgtgtcttacccgacaaatttgtggccgggtgcattattgcaaaactacctccatcttggaggagtttcggtactgcactcaaacacaagagacaggaatactccgttgaggggttgattgcgtctcttgatgttgaggagaaagctcgggaaaaagatgccgcgtctaagggcgatggtgggcagtccagtgccaatgttgtgcacaaggcccagaacaagagcaaggggaaatacaaagctcagcagaccaccaacttcaagaagcagaagaagaacaacaacaatcctaatcaggatgagaggacttgctttgtgtgtggccaagttggtcatctggctaggaagtgtccacagcgcaaggggatgaaggcacctgcagggcagacttctaagtctgctaatgtgaccattggcaacactggagatggaagcgggtatggtaatttacctactgttttttcagttaatcaatctactaattggtgggttgatactggggccaatgtacatgtttgtgctgacatctcattgttttcttcttatcaggtcgcacggggttccaccgtcctaatggggaatgggtcacatgcttctgttcatggtgttggcacggtagatctgaagtttacttcgggaaagatcgtgcagctgaagaacgtgcagcatgtcccttctatcgacaggaatcttgttagtggctcccgtctgactagagacggatttaagttggtttttgagtctaataaagtagtcgtgtctaaacatggatattttattggtaaaggttatgagtgcggaggcctgttccgctttttcctttctgatttctgcaataagtctgtgaaccatatttgtggcagtgtggatgatgaggctaatgtttggcattcacgtttatgtcatattaattttg

SEQ ID NO: 29286 - DNA, 3240 bp, Oryza sativa
atgtgtttaattcctaagttttccattgtcaaaggttctaagtgctatagttgtgtgcaatcgaagcaacctcgcaagcctcacaaggctgccgaggagagaaacttggcaccactagaactcctacattcagatctttgtgaaatgaatggggtgttgacgaagggtggaaaacgatatttcatgacattgattgatgatgctactagattttgctatgtgtacttgttgaaaacgaaagacgaggctctagactattttaaaatttataaggcagaagttgaaaatcaacttgacagaaagataaaaaggcttaggtctgatcgtggtggagagtttttctcgaacgagtttgacttattctgtgaggaacatggcatcatacatgagaggacgcctccctattctcccgagtctaatgggattgctgaaaggaagaaccgcacactgactgacttggtgaatgccatgttggacaccgcgggactgcctaaggcatggtggggggaggcattgttgacctcaaatcatgtgttaaacagagttcctaacagaaataaggacaaaacaccatatgagatatggattggtagaaaaccatcactttcttatttgcgcacatggggttgcttggcgaaagtcaatgtaccaataacaaagaagcgcaaacttggacctaagactgtggactgtgtttttctgggatatgctcatcatagcattgcctatagatttttaatagttaaatccgaggtaccggacatgcatgttggtacaattatggagtctcgtgatgctaccttctttgagagctttttcccaatgaaggatacacatagtggttcgaaccaaccctctgaaataattcccagttcaatcacaccaccagaacaaactgaacatacacatgaacttgtctctgaggaggatgtcagtgaagctcctcgaaggagtaagagacaaaggacggctaagtcttttggtgatgatttcactgtgtacctcgtggatgacactcctaagtcaatttcagaagcatatgcatctcctgatgcagactactggaaggaggctgtccgtagtgaaatggattccattatcgctaacgggacttgggaggtgacagagcgaccctatgggtgtaaacctgtggggtgcaagtgggtgttcaagaagaagcttaggcctgacggtactattgaaaagtacaaggctcggcttgttgctaagggctatactcagaaagaaggcgaagatttctttgacacttactcacctgttgctagattgaccacaattcgtgtgctactttccctagcagcctcacatggtcttctcgttcatcaaatggacgttaagacagcttttcttaatggagagctggatgaggagatctatatggatcaacctgatgggtttgtagttgaaggtcaagaaggcaaagtgtgcaaattgttgaagtctttgtatggtctgaaacaagctcctaagcaatggcatgagaaatttgacaaaacattgacatctgcaggctttgcagtcaatgaggcagataaatgtgtgtactatcgccatggtgggggtgagggagttattttgtgcttgtatgttgatgacatactgatatttgggacaaaccttgaggtgataaatgaggttaaatcattcttgtctcaaaattttgatatgaaagatttgggagtagctgatgttatcttaaacattaagctaattagaggtgagaatgggattacactcttgcagtcccattatgtggagaaaatcttgaatcgctttggctacattgatagtaagccttctccaacaccttatgatcctagcttgttgcttcgcaagaacaagagaattgctaggaatcaactggaatactcccaaatcattggctcgttgatgtacctggctagtgcaactaggcctgatatctcctttgctgtgagcaagttgagccgatttacctctaatccgggagatgatcactggcgtgcgcttgagcgagtaatgcgctatctgaaaggtactgtggaattggggcttcactatactgggtatcctgcggtactggagggttatagtgattctaactggatctctgatgtggatgagatcaaagccactagtggatatgttttcacactgggtggtggtgctgtttcatggaggtcttgcaaacagaccattttgacgaggtcaaccatggaagcagagctaacggcactggatactgctactgttgaggcagaatggctgcgtgatctattaatggatctgcctgttgttgaaaaaccggtgccggctatccttatgaactgtgacaatcaaacggtaattgtcaaagtgaatagttctaaggataatatgaaatcgtctagacatgtgaaaagacgattgaagtctgtcaggaaattaagaaactccggagttataacgttgaattacatccaaacagcgagaaacctggcagatcccttcacgaagggactatcacgaaatgtgataaacaatgcatcgaaggagatgggtttgagacccatgtgagttatactatggtggtaacccagtctatgtgatcggagatcccgtgaattagatcctgggaagaacaaaccattagtaaactagaggagagtatcaatatatataccctctccaagtgaagatgcatgtactctcgtgagctgcaaggcaggttggctatgccttaatgagttctgttggctttaattagcgaagatgttgtcctgcagagcattcttgaaagaactcacctttgtgagcttgactgttggtcgcagtctatgaagattttgggtgaatcttctaggaagcttactaaagacctaggagtatgacctatacgctccacccgaggggtagtctacagacggtctagtaccagataagactttgagtgaaacttgcttgcacaagacttgcaattcaaggcgtagtccattgttcaagttgtgagtaagtgtagcttggagttctaggtggatgttcaaccttaattggtctccatcgaaccgctggtatataaacagtacattggaaaaggcaaatctcagtgggattttgagatttggtgggggattgttggaattaatgaatgggccttagcccactcgaagattaattctttggaaaatcacaaaagcccacctcatgggatggcatgcatgtggagtttagtaccatcttgcttattctaggagaggggga

SEQ ID NO: 29287 - DNA, 6618 bp, Oryza sativa
cggtcttttcgtcacctcggtacgtgttcaatatgttgcgcatatttgatctgttcatgttatactgtgtagtttacatgtgtagatctaatgatgcgttcatgctagttttcatctgtaatgtcatgatttatttatggaatagattaaatcattatatgtctataatctcaacaagaaatccgattaattggatcggcagctagaacagttaataataaggcgagaaaaatcctcgccgcacgcggagagccgaatcgtgaaagaaaaatgcagcgagcacgtaactccatgggttggaaacgataacgaggtgaagaaacgcgtatactatcttctcaacgataacgagatgcaacgatagtcaagcatgtcaggatatcaggactggagctttgggcatgccgcttccgtagcggccaagcctaccagggtgtgtttagttctagggtgtaaaaattcaaaagtatacagacacacatttgaagtattaaacgtagactaaaaacaaaacaaattacagattccgcatgtaaactataatatcattattagccgattggtttctactggattatattgttatttattacgttatcatcagccgaatgtctctagatcattatttacttaagtatcagaatatatatatagccgattgctcaaaaccctatcgacataggctagtattggcatcgtctgaaagtactccatcatcttgtcagctgatcggctctttggtgatcaatatatttatctatcttgtcagttgcaagattaaactgactggcagatccacatctcatcaagttttagatctacactggagctaagcagatcttccagactgttgtgttcgtcgacttagttcgcgcaaacacagttccgacaccatcaaccgagcgcggatttttaatgaaaagatatccccaaaagaagagtctgttcactttgatgccaaaaaaaaccttaccaaaatttggcattgccaaaattttgacaggatttcttatatagttaccaaaatttggcagtaaactaaatgtagctacttttttagcaactttaccaaaatttggtaaggttgaaaatgacatcaaagtgaacaggcccgaagcaagctgtacggcccaatccagcccattgggaggagtagagtagcccagttatttttttcttgacctggcccggcccaaaattgatttgctgtcttctctctccaggtgttagttcatccatgatccatctgtcgttcgttacagccaagaaagaagggatcgaatatttgcttgagtcggcggcatgatgcattgcatgcgactttgagcgcgatatcgtcatgactcatgagttgatgtctgctgatcgatcgagacgccctgaaaccgtgctttccctgacggttcagaattggcttcaggttaacctcagatcggggagtttcatcattactcactgacgatattaattaattcttctagattagatgtggaaatagtagtaggagttattttaatataatgatctttcctctaaaaaaagaaatagtagtaggagtagatcatttccttgaaattttctcatgctagtaaattgacatttttcacaggctgctttagtaaggattctgtcacatcttatctgaatcagcactagtatttcgttactgcttccttcactgaatggttcatctgtcactaagaagaaaataaatcaacaatttgttcagaggtttgaaaaaaagataagcacttgaaagttacaccctctctgaatttaccctcttgtttctttccccttcatagaagatgagatcatctcttgcggggacttgttcttcacgctgtcactgttatgtaagatggggcttcttcctcacctcttgcataaaaatcaaggaactcatgtgatgatggccgttggccgacacaaaatggccacctgaagcataaccatatgaaagcagagatccaggctcataagccctttccctttacagggcattttcttcaggtgtgtgctagcttaacactaaggttatcacataccaaagtaggttcaatattctgcttttcattgtcattgatgagcacaactcacatcttttgcctatgcctcccccttttgccttcaccacattcagaattccttttgcatcttgtttcttcagagttcagacaccctttcattgcagatcagaatgattgattggttggttaattataccaacaaaccctcaaaattcttatcaggtatacatctgagacaaacaggatctgtattactcttcccagtttacctccaaagtgattcttatcctctctataaagacaagagagaatctcagattgtgctacttgctgtgcgtcttgctcaaactttcagaaagaaaaaaaaaaggagcttaccagatcagaatatcagatcatatgctcttctcgtttagattcaaagcagtgcatctggagtccacattgatcaggacccccaaaaaattaagcacagcaaagaatgtaactagaatagcaaggttttctgaaaggcaaataaagcaaagcaaacacttaagctgagcagcaactacaactgccaaacttgaggttgaggacgcctgcattctctatccacaaacaaaaagtcctaaagaatgtgctctccacgtctcccccttttgatcactcctactaccgatcaagaatccttctcacttgctactagctgaataatacgggatgctcctgctgggcaagcaggatcaccactgcaattgccaaggcagattggaaagctaaggatgccggccatgatgccgcagttgcagccatccccgcgccactgctggccttcaagctcgccagccacaccgcatcttcgagctgctcgtggctcggtctccgtgatccgttctttgaattcccactgcaaacataccaaattcatgaaacagttaatcaacctgaaactgatgatgagaatttgctgttgcaagttccttccatgcctactaggaaattgcaactttccagtcaaggccagcttaggtacaatgtgagtgaagtggggacgaatcaaaggagaaaaagattgctcctccttttcttagcctaactctatcacatcctcaatgaacctttactttccccaattcatgttccacatcgaaatccccaattttagcccaaaatctcaatgtgctgcaatcagtccactatacaattctatcatacacataaaaatctcatactggtaatcgaaatctcaatgcaatggattcgctgcgattgatttgaagtgtacaaacctggatggagtggatcgggggcagaaggtgatggtgtaatcggtgtggttgcaggtgaaggtggaggtggcgtcgtcgtaggcgtagctgtaggatttagggcacgccgacttgaagagctgcgagtactgggaagggtggcaggtgtccgggttgccgtaggcgccattgcagcagtactcaggtcggccgaacgcctcgcaggcgctgcggcaagcgcggccatcgtcggcgcggagctcggaggggcagcgctcgttgaggtcgacgaggcagccggtgtcggggcagtcgggggcggaggcctggacgagcatggggaggttgtagccgtcgacgaggctgacgtcgtagaagtccttgccgtcggcgccgttgagggtgaactcggcgagcgtggcgggcggggaggcgcccgcgccgcggcactccacctggccggagccgcagtcccccgtggcgcaggagcccttgccggagtcgtcgaattcgcagccggagcgcgcccagaagcggcccgaccaccccgacggcgcgtagagggagcgcgacccccccggcgagagcgcgaagccggtggtctccagcggcggcgtgccggagcccgacagcacccccggccacaccgtgtccgtgcaccggttggtgaaggtgaaggtgattgcgccgacgccgaccgagcctgcgcgcgcggaggaagaggaatcgaatcccccaaaccccaagaaagaatcaagtcaagctccaaatcgcgagctccagtagatagtaacccagcaatggaagtgactgaccttggaagaaggagaggaggagaacggcgagcgatgtcggggagccgagcagctgcatcagcatcagcagcatccgtgaatccatctcgaaaatcgaatcaagaacgactcacacggttgattgaatgattgagcttgggggatctggtgttcgacaagatttgctcgctcgctcgtttggattgcttaaatcgcggcggcggcggcgatggcgggggagtgggcacgatcgatgcccataaccccgaatccgcggacgcgcagctgagctgaggtcgcgcgttgcgtggtggagtggaagggggaggtggtgctcgtgctcgtgctcgtggccgtgtaaacctctgggcgatggcggctgctggctttataaccagaggaggccgttgcttgctccgcaaattcgcgatgcttttctttcttgcaatcaatcttgcgacttgcgtccgctttgtgtactttttgctcgaatcatctctcaatcagcacgcgagtcaaatgcagcgaccgcgagattagtactccattttacagtgaagaattctgaattggaatccatctggtagcgcactgctaaattggtactccatccgtctcaaaatataatattattcaactttaacataatctttgatgtgctactttaaccaccataattaagatttttaaataaaaagagttgcatattatagtttgttcaatgataaatctactaacatcaattttatatgattgatcatttttattttttttactattaataacaaaagttaaaaatatttgatttagcactactttaaaaatatttatattttgggaagtattgaatacttttatgaacgtaattctagcaccggtcgcctgcttaattccggcttcggtgagccagcagctcgcaaatgcacaccgaactcaaaattcgagccggttcgttttggtaggattcgatgaaatttccagtgatttgcgacggggttcatgttctgaccagtttgaattttgtgaacgttgaggtagtgggacaaaatttttgttgtttgttttgttggtaagcgagtggcttttgttctgtttttttgcttgtcacgttgtgggcacagtgtttggacggtttggatcggcccagcgacgtccatcagacctccgcttttgcggcacaaaacgataggagaaaggggagcatgcaacatgccgtccgaattttcagccccagagaaaccgaaagctcttaataattatcggatccattctgatcaccgatctatacctgacataagattttcttattcagtgaaaaccagcatgttgtcatgttgttccaaggttgatgctcccttttctcccaatgatttcatcaccgtaaacgttgaatggatcacacacgtcttgagtagatgagtggatgacacatttcttgagtatatgaatggatcacgttgaatggatcatatataaatttattataatttctttttaaaaacaagttttcagctttttaatagttaatctgttcgtttatatttttcatcattctattacattcatcacaaaatcattcatctattcatcgttccattctattaaaaaagagcatactcaatcaaactttattcagctcgatcacactgtacctgtgtatacaatacagtactgtgcgtgtaggctaactcatagttcttggcgaattcttcgcacgtaagcaaacaaacgactgatcacgcagcatgcactaccatgcttctggtgtgcaagtgctactctagtactactacactgagtggagtaatcaagagaatcattaggcactaagtcttttaaaaaagagggatattaggcacttgccaggttaccaccgctgcagcctgcagatcactctcagcttcaaccttttctgaattaccactactttttagtactacgtgataacctttctcattcttctttcctaaaaagaagaaaggaatgcagatcagatgaagagatcgctgatcagtagccttagtccacatcgaggactggtttagttcccaactttttcttcaaactttcaactttttcatcgcgtcaaaatttttctatacacatgaactttcaacttttccaacacatcgttccaatttcaatcaaacttttaattttggcgtgaactaaacacaccccgagttaaaatgttgcttttctgaaatctgaatccgaacaaacgaaactattgcaaattaattggttcagatttcagactgttactagtactccagcctagtttagtttccaattttttcttcaaacttttaacttttctatcacattaaaactttcttatacacaaacttttaacttttccgtcatatcgttctaatttcaatcaatcttttaattttggcggtgagcgtgagacaggccagctccatggcgaagtcaagctgtgaaacgcaagcaggagctgtctgtttcagccgacgtgcaatctgacacgctgaagaatcagcatcgatgtgacggccggccatggcctgagggccatct

SEQ ID NO: 29288 - DNA, 8236 bp, Oryza sativa
cacaaacctttaacttttccgtcatatcgttctaatttcaatcaatcttttaattttggcggtgagcgtgagacaggccagctccatggcgaagtcaagctgtgaaacgcaagcaggagctgtctgtttcagccgacgtgcaatctgacacgctgaagaatcagcatcgatgtgacggccggccatggcctgagggccatctcatattagtagctgcccggttgatcgatcgaccagcctgtaattgatgcaaatgctgttctgtaattgatgcgtactatgctgttgtgctctgcttcagtttccttgtggttatacgtcactgttgagttcggctaatcctcatcgatctgaaagctactgctactgatcatctatctgaatctgatcgagataatttagctctctactcagctagaatatccatctctaaccatccaaccctgacaaaccatggcatctgcctacactgcttttcttgctcatctgataatctttcatgcttattagtagctcaaaagaaagcaaaagatctgtctttttcttttctttttcattcgcaaagcctggctgctaattaacaggtgacatctgctgctgatagctttcagtaaagggaagcccacgtttcatttggctgcatcattagcgtacgactcatagccataggcatcatagctgtagaatccctgtaagatctgaacaggagacagggaaccgatagatcagaatctgaacatggattcctgtggattcagaagaatcttgatccatgataagataggaccatgcaagttgcaacgaggataagatacgccttctgatcttcagatcccgttcatctttcgtcaagttcggtggtcacaggctaggctagtgaatcttgtcaaaatctttacagagatcatatcatctcagcttttttctgcatgagatttagagtctgaagctcaactgatgccagaactgatcgaccacctgtagtcaatcacccttacagaatactcctagctagaagtaatacagtagatgaattaccaagttttgcgagttttcatcttgtcacgttcttgcaatcacggaaagaggggaaaacctttcaaattcaaaccaccaaactcaaaacgaatgcattttaactgggttgattcaaatcacccagcaacgacatgttgggcgtgggcctcatgtttttgggccggttcgtagcaagtaggtgaaattgcatttgaactgggccgattgctaagttaatcttccttatcatgggcctgaaaccgactgctatttggcccacaagtactatgggccggcccacccactcgcctccttcctccatacgcttccatccaatcggatttcagcaactccactctactccgtcgccgccttctcgcgacgcctcctcctctactccggcgacggcgaggcggcaatgcatccgcctcctccgacgccgcgttcctcggttagctccttcaccggattccttatcccacgccctctattctgcggtcctaggtttcgtagttcctcggttagtcggctgctgttcgatcgtgaggaatcgctgtggcgcgggagggaggaaccgccgccggacttctgttcgccgacgaagcatgtgttttccgttcgccgtaatcctccctcccatcaccggcagtagccagctcgggtgtaaattatttttgtttttgaattttttgattggtcactgactcaagcgcaaacttgctttgcagcttaacttaattgtcgattagttcaacatgttttttgtagattggattggtatttcaggggatatactgttaaccatctgccagtttagttaattgtagggtataatcggctgatgccttttatttttaacaacagattcacagttgtactagtattaattgggttctgagtgtattctatcagttggttttacaggttcaggttggtgaatggggaattcgcacagctgtagtgttgttgcttgagcacttctcagaaaaagcatcccaacaaagcttcgagccgattacaagacagtgggcaccaaggttgcctattgctttatgatcagcaatgcagagaatgtgctcaagctaagatgaactttctgaaccttgcaggtttcatctcactttatgcgttgtgtaatatgtaattgttgcatgacactcttgctctttgccttactaaattcacctggccgtgtacatcctaagcagaagagaatgctggacgaaccattgatcagtccataattacccatgaatgctataggcagagcaaagtaactcgtgttggtgctgtgtcaatggtctgtctggtaagttgcctatcacacaaattgattctcatttatcaacaatgcaaattctacatgtcctcttagttgtgaaatacaaattctagcatttgttcgcatcatgtctatttcctagtacgatccttgcatatatcaatgtctgtgtacagtttttgtgctaatgttgctgaaataaacatgattttgttcatgtagaattttattgctagttctatgtgcaatccttttgggtgttcacgaaaattgctttacattagtgtcccttgaatatagtgttgtactatatgtcataccactcggttctcacccagtaaactggtatatagatatttgctgagagatacaatgcattggccaatcatatgaattgcgcaaattagtcaaataaaataattggcattaaccaacctgctataaaccgtctttgcttggattggagcaaactaaagtattctggaggcaagatcttgataacttctcctgaagtctaggacagacaggattgcattaggaaccaaacattggagttatttacacactggcacatgtagaccaggtttggtgcctcaatttaaattgacattgcagattgcatcagttcctgacagtgactagtgactacatggtctgtacatgcagctagtactactttgatagactagaggcgtcaaatgggccaatttgctgttgcggacattgtatcggtatcttacttggatactccctccgtcccaaaataaatgcagttttacactatttatgttcaacgtttgaccgttcgtcttatttaaaaattgtttatgattagtatttttattgctattagatgataaaacatgaatagtactttatgtgtgactaaatatttttaaatttttcataaatttttcaaataagacagatggtcaaacgttgggcacggatatccacggctgcacttattttgggacggaggtagtacaaggtaagatgataactacatgtcacagtgtcactgccaggttaaaatgatgtgttagaagaaatgtcaaaccaagatagtggcaagtttattccatcttagaaatcaataaggagggttagtaatctatatttcaagtactccgtgatgggcctcatacaagcaagaaagttcaagtagtttccttaggggaagaattcggtcagaatgatgattgacaatataatattctaggtctctgggatttttttttttgttgagaactattcaataaggatgactagcaatagaatgctgtgtgataaaattgaattctagatggacatcctgcaagcaatgaagcaagaaagttccaactttccaagtgtttaactacaggacatatgatccaaaagagctgaacatatacaaagttaacttgtcaagcacaacaaaaataaaacgcaggcatcaaatttgagaatcttccagtaaatgattgaactttttaatatacatcaagtatcagggtgaaatgagagtacaagatgctaaactccaaaggccaaagctatacatgcaaaccagtcatcattagtcaccaccaagggatacatacgtcaacaaggaacaccaacccccctacaaaaaccatttgatgcccgggacaaaatcaatctcttccaaccaaacatggaatccaactgattgcatcaacaattcaattcaagtcaaccaaaaaacacctgaatatatatacagtagtcagctggttgatgcaacgaagacgacgacgaagaagaagaagccggtccatcatcttggtagtatcatcctacatgtgcctctttctgcatcaaaaccgtgcatctcagtagtaaccttttgcccctctggattggtagagctccattctaatcttggcctccagcaacaagttctcgatcaatggatcttgcaccatggccgcttgctttgatgcccactcgagcaaggtgaggatctccgcttgcgcgagctcctcgttgtcggggacgttgtgcgcaatgtagcacacgaggaggagcgcggcgatctggacggcctgctcggcgaagtagacgagctggacgaggtgcttggcgccgccatggtggatgatcgccttggagtggtcgacatggaggtagttctccgtgcaggcgaacttggtgagcgcggcggccgcctcccggctgacgtcggcttccctctcgtcgaggaggttcaccaatggcccgatgatccgggtctcggtcgcccggaaggttctggaaaaggcagccgagcgaaatgatgcatgggatgaggagctcgtcgtagtcggccttgtggacgacgcggaggagctggtcgacgacggcgcgggcggcgggggatgtcggcttgaatgccgatcgccggaggtcggcgtttctgctcggcgaccaggcagatctccatgagcgccatggccgagttgtaccgcacgtcgtcgacgcctttctcgaggaggacggagaggcagagcagcgccctggactcggtgatgttcttgcacacggccgcgttgcccatggcgagctgccacagcgccttggcggcgttggccttgaggtaggctttcgttccgggtcctcgaactcccgcgccttggtgctcgtcccggacagcgacgcgttgtgctgcttcgtcccggcgacggtgccgccgacgctgacgctgctgctcgaggtcgtcccggttcctgctgatcctgcgcctgcgccgctcgagctggcggcgccgcctccggtgggcttggccgccatggcggtggtggtggtggtggtggcggcggcgtggtcgacggcgtctagcgcgtcgtggtggtgcgaggaggaggtggagccgttgttcttcttgtccatgaggacggtgtgtatggacatcttggaggcgacggcgtacttggagtgctcctggacggtctcgaaggcgaggtgggagacgaggaggcggatgacgttgctctggaggaaggcgtcctggcatttggggtggttggtggcgagctcggagacggcccagtgcgaccattccctatgcactcttcatggtgtgcgatcctgtgaggtatcttggtcgataggcggtcgcatgactgccgtgcgaggcaccatcgagtctcgtacgactactctgggagctcgtcggcgctgaggggtaggcctgtatggcgtaggggcaggcggtctcctggccctcggaggagccctccttgatgaggcggagcagcggggggacgccgtcctcctcgatgatgagcctgccgtagcggtcgttgtcgcgggcgagggagacgatgctggcggcggcgtcggcgcgcgcctccgggttgccggtgtagaggacggcgatctgctcccagatgaggaagaggatgggctcgttctgggcgatgggggggagtccgatgtggtcgtcgtcgaggtcgtcggcgttggagtagttggagacgcggaggatccaggagaggtcgccgagggagttgtcgagctggttggaggtcttcttgaaggagcccgcggggatgatggtgaagacgcggcggatgaggccgtggccgcggcagcggtcgaggagggcggcggccttgtcgagggccttgccggtgtcgtcgaggatgcggcgggcggggcgctcgtagaggtcggcgcgggcggcctggcggaggagggaggcgaggcgctccaccttggccttgaggtcgaggcactcctgccggcacgtctgcgcctcctccgcccacttgatcacctgctccgccaactggatcggccgcgccaagatcgccttcaggtcgtccatctatgatgatccccgccgacgatcagcaatggcggcgagacaggaggaggaggagcacctcctcggcttgggggggattccggccgtgctcctccggcggcggcggcggagaaaccggcgggcggtgggggtgggatcgctaattgggggaaggggagcggcatgtgcatgtgaggcgagcgccgcgcgagatgtggatgccctgccatggattgccgccttcggatggaaagggaagacgagaggtttccacgcttttcggggtttgtatttccgatgccgttggatcccccacctcctcactatctcctacctccgctcttctaattactagcattttagagtatattcccattggtagttatactagaaattaaggattttttttcctgaattttagatatagattgtaccaaggttttttttagcatgttttttataaaagccaatcattggttttagtaagaaaacgtttttaaaaatgttgttgtaaaaatactaccaccgtttcaggttataagactttctagcattattcatattcatatatatgttaatgaatctaggtatataataatttataacctgaaacggaggaagtatcaaatagatttattttttttaaattataataattaaaactcaacaaattatgtgttaatggttttctcattttacgtgatcttacttgatacagtctccatctcttgcgaaccgggcttattgaaacggattattttctccatgcttcagaaaaaatatgtttttcctttagaactttttacttgtttcttaaaatatttaatttttcctataataaagtagataatcgtcttgataatctaaataaaatggctccgagtaattttacatgtagttagatttccagacactatacctcatagatacgagcacgactcttaacttttggtttcatggatacaattggatttgatgttacaaataattcatacaatcgtattttctatacaatagatttttaaagtttacttacatcttgtatacaattgtgagctttatatccatggaaacatgtattccttcatctacaattgtgtaaatcattttttgcctttcaaatttgataatttctagatcctcaagagcgaacaatgacattcattttcgataacagatccaacaaatgcttgctacaattgctctttcatttgttgtctttctcgtaggttagtagccaaggcatgtctaacgtgagatatcatgtcctactcttttctcctatttaattaactctatgcaaatcaatagaaacctatcctacatctacatggcagcaaaataactatacataaacactatcctatccgtgtgacatcgaagcaaagtggatcccgcttttctccaccatactgtatacggtgtaattttcataagaactttctgcacgtgaattttctataaaactattttcataaacaattaacaatgtgatttcatttggccaccgccatcgacacggattgagacggctccctcctcttcttgttcgacttcgaccactgctatcggtgtagatctgggtgactccctcctcgtccgctgcccatgtcggcggtggcatcttcccgatgatggcctccaagttcctctattctgatctctccaaattgtcatcctttcttccaacttgttggactacacgaattggtttctctctcctagagccaccgcttcttctgcaagctcttctgacacactgcaaaaccactcctcccctccatgatggcatccaaaccttacgtggaggctgagaccccacgttggacatggcctaacaagtcgttctcgtccacaggaaaacgcccatggatgtatcaatgcatcatgcacgatcactctctttaaaccttgtgatccaaaaaggagaaaaaaagatcgtgtcatgttgacttgaatcacacccaagtactgtatattgaaactacaagttggcgttctatctgagttgccgcagaagggaacagaaatacagaatcactgaagaagatagaaatacagaatcaccgaatataattatacagtagattggttcatgtcaaccaatctactactccatccgtctcacaatataagggattttg

SEQ ID NO: 29289 - DNA, 7449 bp, Oryza sativa
gtcaacataacactgtgggtgtgtttcaataatgggaaatggagggtgagattgagattaggaaatgaatgaaaggttaggattaaatagatgagggagaatgaatggttaggatttaaagatgtgttggaaatcatttccctttcccatttgccaaacaccacctataagaataagattctctaaagattcttcagggcagacagtgtagtgttacgttttctgaatggttgcctgccctgcccggaagaacatcaacacagacaggttgatgtttttccatggaacacaagcttaagacaatttgaaggcgccatcgtaatattcatattgttgttccctcaaaaaaaatatttatatttttgcagactttccaggccttccatccaccaatcggcgatgttccctgtgttcgctgccgttgaataaaacaactcgtctgcctcgtcgtcatccagccatccacgttctagaacaaaaagctagccaaagtcgtcggcatatctcgccagaatggaaagaacgatacgaatcgaacacaagaagaagaagaataagcagaggcagggcatgcattttccttcaaacctcgcgtcaaaacacgctagtacaatacagtagtaagtacatattcacagtacatgatgatgattgggttaagtctggattcctaatacgctacctagtctcaattttgcattttacattcatacacaagggatcgatgcgaggaggaagattttactttttttttacataggcaggcatgggtgatcaccgtaactaaaaatttgtgaggtgagcggccatggccgtgaagagacagaaatcgcgtgtgtgcgctaccagcactggtcggtctcccaggtgcggcgtgggcggcggccgtaccagcgcggcgcggcggcgggagccgccatcgtccggtggtgcgcgccgcgcgccatggaggcgacggcgacgacgtcgcggtcgtagcgcgcgcggctgtcggggtcggagagcgtggcgtaggcgtcgtggagcctgacgaagtcgtcggccccggcgctggcggccacgtcggggtgccgctcccgcgcgaggcgccggtacgccgccttgatctcccgcaccgtggcgccggcacgcagccccagcacgtcgtacagcgtccccgccggcgccggcgcaggagccacggccaccgcgcaccggaccttccttgcccggtacgacccaaccgccgctgccggtggcggcttgggcgcgaaggcgatccccacagaaggcgcagaaatcatgagaaggaaggaagagaggaatggtgggcaagaagcagatctgggaagacggagaggggaattgggaagcttttatctaatacaagatgtggaaaaaggaaggagaggaggcaggtgagacgtcgttgggtggcacccgcggattgtgttggatttcggggtggaatcgccggtggtttagtggtattttaaggcgggtttggcgataggatcgttgcttgggtggtagtcagcatccggttgcgtcgacttgggtagtagtgctcttttctttgagcatgaaatgaaaatgaaggttaagatttttagaacaattaattaagatttaattattatagacttaaaatagattaatatgatattttagaacaatttttatatagaaaattttcgtatgaaatacgcagtttgaaaagcgtgtgttgtgaaaattattatcttcgtccaaggcttgatgaagaaatgaaggagacattggtgcatgcgtcgctgtccgcttccaaatcccaaattgagcatttttttttctccggtggattctgtgggtgcaggctgcgtccgactctgggcgtctggccccccggttgatgggaggattcggattctttgcattatttccttcctgccccccacggtttgtttggcgcgcgcacgctgattccgcccgccgtctctctctgtcgctgctctccaagtccgacatgacccgcgcgccgcggccgaccaccaccttcactcgctccttgcaagttgctgtagctctcggacagctcgccccatcagcacaaaagtcagctactactaaacttctactactactggtttcttccttttttgatagggagaagtttagcaggccgggccgcacttcgttcacgcgggctggtgatataggaccgaacaagtatggttgtattgtaccaaatgtcactcttcagagccactgcattgttcagtcaggcccaacagatagcacaagtatgttaagtgcaccgttaaaatgggctattttagttttttttttttgcctttgcttcgaataagttacaacagattattacagagtttattggtcaaaacgactgcgttttttcataaataaatacagtctaatgaaagcaagaaaattaactggaaataggctaaattttgagatgacaacctactgctaagggcttattcgtttcaaaggaattgcaaaggaaaagcataggaataggaatgtgttttaaaataccatatcataggaatgcaccataggaaaactttaggaaagttttccattcctccatatttgaaggaaaagcataggaaaaaataatccactctaacctaatgtttgcattcctttggttggtttgctcaaccaacataggaaaaatttctgtgtttttcaatccataggtttgcacatgtattcctatagtattcttacattttttatattcctacgttttgaaaatcctgtgaaccgaacgagccctaaatctttatctatagtcgacgaaaatctacatataatcggatatcgcgcactgcgcacatcgaactgaagcggacgatgctacaaaaagtgtcaacgagaagtaggtgaacttcacagcacgttacaattcgttgcggtaacagtatatgctacaccgttcaaacgtgctcatctgcacctgcctgttctgtctaggacaacgaaatttctttccaagacagtgcggtcttctagaagatgctacagtaagtgccaacaaaaatgttgccatccaaacatcaaagtatggaacttatagaaaaaaaattgaaaatatacttttatttttcatattttgcatttatatacatgtctgagattaatttgcaaaaatatacccaatccacatgatggttgcgtgagagcgccggtcccgcaggccggggatgcgataccgcaccggtcccgcaggataggcgaacggcaccacgggttgtttgcgtcacggtgcggacccgccgagctagagcgctcccgcatattggatgcacgggaccgccgctcccgcacccacatcgtttcctaaattgtgaatacatgtcccgcacggaaaacggaacagtacatcagcacatgattaattaattattagttatttttttttcaaaaatggatcaatatgatttttttagcaactttcgtatataaacttttttaaaaaaagccctatttaactgtttaaaaagcgtgcgcacgaaaaacaaaggagatgagttggaaaaattaggggaataaactcacgtaaccggagcactcccgcatagcggatgtgcgggaccggcccctctcccgtattccgaatgcgcgggaccgccgctccctcatggatgttgtttcctaaattgtgaatacatgtcccgcacggaaaacggagcaataaattagcacgtgattaattaattattagttgattttttttaaaaaaaatggatcagtatgatttgtttgagcaactttcatatagaaacttttttgcaaaaaatgcaccgtttagtcatttgaaaagcgtgcgtgcgaaaaacaaaagagatgatttggaaaaattaggaaataagacacggaaccggagtgaccacgggaccggcttcggtaccgcgcgttggagccgtgggaccacgccgttctgcggtactgccgcgctccgcggtaacgactcggtcccgcagtccagctatgcgggcccggctcagttgctcatccagttccgcgcgaccggctcaagtatgtggttcgccctcgctcccgcataaccaatccgcgggttaggtatatttttgcaaattaatctcagacgtgtatataaatgtaaaatatgaaaaagaaagagtatattttcaaaattttttcggaacttataggctacaacaggcctcaggccaccaggagactataaattaattgctttgaatttgaatgatgcaaccatgtaataactatttcacatctaatcaaatcatacatgggcgacaatgagcgtcttaaccacgacccaatgtagcggcatggcaaaggaagcacacaagtacagagacctgaacaatccaccagctcctgatgcttccatttcaccgatgacagaaagtatcaagctgccgctacttcttttaaattatacgcccataatggctacaatatgtagtgatgtcatgcccgggtgtcctgtgaagtaggaacttcagcactgcacatagggcatacctgcaaagcaatcaaggaaatttatcacctttcggaaatgaaaatgctttctccaataaacctaaactgctcccgttattgggtgcattgaacatgccaaatgatgtatcttcatagtcaggtggcaaaagaaaaacattgattcaatatctgacaaggaatagggatgtagggttcataagccgttgctttcattcatcaaggggttggtggatatgaagactggagatgctgttaattatataccttatttaattgcagccattggtttatgcattcagaatggtatgaatgcttgcaaggaagtgcaaccaatgattcaccttcctcaaattccacacggcaaataacacatctgcaaattagtttcatttatcagtacagtgccggttacttctaaaaaaggggggagatattaacatactgttccatgttgccgtcttgcttatcttgtgctcgataagttattgaaggtaatgaagcaagtgtatcagcagagaggcctctgctttccgtaccaactacttcacccaatgcaaccagctcctaagaacaccaacattaaattttagtagcagatcctgaagctttagatgtgtaccaaatgcagacagtaccggtcttttttaagggaacaaacaacttacctcataagaatattcatctggatcaacatcttcccatgcatcctaaagtcagaagtaaataaaaaagtcagacaatagctttattattggaagacttcaggaaaacaagaccacggcattaagaaaagtgcaaattgctcctagttgggtacattttaagccattacctcccccccccccccacacacacacacaccccatcccaattctcacatacaggaattggcattaaatttccattttcaaatgaacaatagtatacttatttgcaagcatcagaatctgatcagcaaaagcagcaggaaaagtcagttcccaaattataatttgagtatctagaaatggaaatggacggacaaaggtgataccgtgccattgagttcaacaaacctgtatcgcttttaacataagtagcacagcttctaacttctatataccaggaaaagaatgtagtatatatgccattaccatattagttcgatatgcacctaaaatattcacctacccattctgaagaatgggactacatacagatgggtatacttgaatttctcccataataatccaaaagttaccctccctttctccttgtctctcggaatccaaattattcattgaatggttgcatgataagcatggaacaatgaattggagatatcgtgcattccaaactcatgaaatggaagaaaatgtcacctgtggatcatccccgtcttcatcttcatcatcatcatcatcatcatcatcctcatcatcatcatcatcaacatcgtcatcatcatggtccatcactcgccctacaaaacaacaacaacaacaacaacaacaactgtaagctacacacaaaaatgaaataaaactatgaaaggaagaaaaaaaaaggatgggggataaaattctcccttgtgcactcacaatcactgaggcccgcgagcgccatgaggcggccggcgacctcgcgctcctcggcgtcctgcagcgcccgcgcgaaggcctcgtcgtcctcgtaccgcgcggggtccaactcagccgggtcaccggcggcgtctgcgtctgcgtcggccacctcctcgtcctcatccagcgcctccccgtcgccgtccccgtccccatcctcgtcctcaaaatcgctcccctccccttcctcgtcaaactcgtagctcccaccatcggaggccgcgtagtcgccgccgtggtgcgcgctgagcatcatgtacgcccgctcctgcgccgacaaaaaaaaaaaaaaaaaaaaacacggataagccaaacccccccgaccgtggtgaagcagcgagatcccgaggcggcggcgtacggcttttacctgctcctggaggacgcgggcgagggcgaggtcggcctcctcctgggtgaggctggtgaagggccgtctccccgccgccgccgccgccgcggagtcatcgggtggagctgcggcggtgggagggttgggggtagggttttggtcggcggcggcggcggtggtatccttggcggcgtccatgggaggagggatcggagaaggggggaagtggtggtgggagacaaggagaaatggtggagaaggaaaagcgaggcggtggcggcgtggcgtgggtgaacgttaagcaagcgaagcgcacacacgcggtggtggtgggctgggatggtttcagtaaaagaggaaaaggacgaggcgaacagaggtaaccgtttccgtgtttcagctttggaacggcagtccagcaccccgaatctacctgacctcagtttaggatgtaaacgcagccagcatgggcatggcaggtcggttccgtttgggtcccacaggtcagcctctttggtgaacttctcttacaaacggcccatcatcgtggaaataagcaaaacggcataattacaaatgaaaaataatttatgaataaaacttttatatacatgtttttggtgatctaataaaagtaaaggctgaaaaataaacttccataaaaaaaacctcaaaatcaggttcaaatcaaattcaagattaaaaattcaaattttgactgataagtataagtataaacgaaaagatgagatacgaagactccttttggtgaacttatgtaggttcattttggattattttaggagggtaacaaatcagcaattttgtttggagtctcatgaataactctgtttcgtttctaactctaccctaccaaaaatgacattttggtagtgcaaggcataagaaaaaaaaaagaacagcccgtaatccagctttgcttatgcccatatgtattggcaaaccatataaaagtttcatatggag

SEQ ID NO: 29290 - DNA, 5072 bp, Oryza sativa
aaatagctcacggaacggaacgcaatagaagttgttgaataggaattctatgttgcttagccggtgggcgaagagagaagcaggcggcatgatcacggcaagcaaggcatgctgctgcggcggcggccaacctcgtttcttctttcttgcacggatgcggcgtgtgccatagatgctttttcttgaggtgttccaagtgaaatgttaaaggtacagtagagaacaaactatacgtgcaaagtcttccatggcctgccttgctgcttcacccaatgttcgtatgcaattgcaatttgcttgactgattcagcctctagcacaaatgggccaacagtagttgctgtttcctagtttttgtatggtctctgatgtcacgtgggtttgcttctggcccatcatagatgctgactagagagttctgctagataaacaaactttgcacaccaacagcaggaggtgatcaataacgagatccaaattaggggaactatcttggtctatctattggggcctgcgacaactgatcgtatgataaaagctaagtagttaaaaactagtctctagatttcatcacggtctctggtaggtacatttttcacatgagcaatttgtaactgaaaaaaattatcaagcaaacaaggctctggtatccgacgatgtactaaacgtgcacaaagcccataacatgttgcatcctgctgcatttttacaccactccagacggaagtcgaaggacaagttgcccaccaaaaacactgcagcaaaagatcactggttagccaatcttcacaattttgccttgatgacggtaaaaggtagatttatgtacctcttcacatagtagtagcagaaatcagcaaggatgaacgtctgaacgatttcagagagaagcaccatcgaaggccagagaccatagcccagagcagtcaacaagcgaccacgggtatccaaaacctgcagattagatcacagcaaattgatttagatgggcttgctaaaaaaaatcctattctgtttacagattagatcactactaatcatgcatcagaagtaacagatttctcaagaatatatacagcttaaaatgcagacatttacatccaatatgcaacggagtagaacagtgtattccctatgatatgatgcatcaggaataagcatgaatgacgatgatacaacaggaaatacatatcaattcaaagatgttaagttccgcattgcttccagaaaatctactagctgcattgcagtgagagtctagatactcctgcgtaataaactagaacaagcaatcagaggcgttgtttatttttctaactgcacatttcgcttttcccccctgtttggtcgatctgaggagtctggagtgtcagctctcaacctcccatgttaatgttacatactgtaactggtctgaacaccatttgcattggttctatggtccaaattcaaaactacaacaacacttaaggaggaaggaggctgagaaaagaaccttgaaggacccagtgtgcgcagctaagaaaccttgcaacacccaatgcaaacacataatgagctgtaaatggttccacaatctgcaccccaaaaagaaacaaagtaagaaattcagccactggactgtgcattgaagatcatatgtatgtatctttaagatttacctttgtgttttgcatcaaacgcaactgtggcagcactgaaacagcttccaaataaacacagaaagcccaggagatcctgttgatgatgttatgcgatgttgaaggatgaaccaggagagctaggccagcacaaggtaacacctggaatgtaacgtctagtaagatagcatgtctagcaataagaagggggctaacaagatgaatgatcaaaacaagtacataagcatgtctggcaaaaaatagttagcacccagaataggtgtacagatcattgcattggtaatgaatactagtaaacacatgcaactgcaatatacaagcaggttatgatcttggcggtgggaacctggaaatttcaagtgcttgaactatgtctttagtctagatcaagcaggggaacatttatagaatttgtgttttgagcagctccaacagttatagttcacacaatgaagtcagaaagtttacacaaaacagagggcaccacaaactttatgtttaatagattcgaagagttttttagtctagactctagaagctgatattgcacttaccacgtagtacaatgcaaaattgtccttgtccagcatataagttgacctcagtttgaaccgaatcatgtagatgacaaagagagtagctgctagtgtagctgtatcaagtatggtatggatgtcatactccataacaaaactgcagtacagcctaacagccagaaatagtgctgttaaatcctgagacttgagtgagagtcctgcagtaatttagaaggtttaaacaaattagagcatgagttacataaatgtaggaattaaatgaagagagtaacaaaagggacaattaaaaaggtcccagagttgggggagggggtatgaggggtgagaggaaattcatcttgcaattgtaattttcaacatgcgattctataccagtctactccctgtcattcaagcagttaattcatcttattttattttttgagaaagggaggcacctccgttttcattaacgaaaacaccaacattacagaagtccttaaactgcatgcagttaattcattttgatgcatattaaataaaataattggtctatcctcaataaaaactgggaagtgaatgcagcatccactatctaaaaaaattacctgattaccatacaatttccactttcaaacaagtgattttacagcttgctaatgcatgcagataaacagctgtactgatgtagtgaaaaccagttcggttaaaaacttagaatacaatagaccaattgggattttgctattctctttccactcaagaagcaagaacaaccaagttgccacagagcaatcataaattccaagcaattatgcttttggaaagcaatggaattatgagatggaccatatcttggtaagttaattgcctaatattttaatgtcagaatcaccatctttatacccccttctaaattcttcatttgcacaaccaagcactcagacataatatgttttcagaaagtaaagcacgaaaggagatggaaaacaacaagttccatgacagagaaaggcgttctagtagggactgaagcagcaccaccaatctaaacaccataatctatgcgccgtccaccaggagatgacatactccctccaacaaacacttcaatcagctacctgacagaccagtactgctcaaaacaaactctgctagtgctaccctacaacacatctacatatagaatgtccacctcattactagaaaacctgtagttgcatacacagatgcagtaagaattgcgaccgagcaaggtgattggattgaacaagcaaaaagctgcttcctcaatttgagtttagaatcacccagcaatatcaccacatgacaatctcaccatgccaacctcagtgtgaacatatagtgtaaacttaccactaacatagcaatatacaagtcagcacaagttgcaggcagtattaaagtgtggaaacaaaacagtaaattccaaacctctctcggctctcgctaaatataacccaaattacccatctccgtaaacaaatcaagtcgaaaatatataaaaaaaattaaatacctccacgcgaacagtgaggaaattagcagtaaataaggtgcgtaataaataatcttatcggagcggaaacacatccaacacacaaacgcaaaacaagtcacaaaattatttctaaaaaatagggatccggagggggtggaatccagggagttgtgtggatcgaggggatgacgtcgggagggaagaaggggggaggatttttaccggcgcaggtcttctccttggtgagcttgtagatgaggactccgaggccgagcgcgtgggcggcctcggcggcgacgaagaggttgtcgtggtcgtggacgatgaagcggatgaagacgagcgcggccatcccggcgaccacggcgaggaacgccttgaccttgggcggctgcctccgcacccagctcagcaccacggccaccggcctcctcgaccccctcatctccggctcctcctcctcctcctactctccggagcctctccggccaccctagcgccgcccggcgacggcgagcaccaccaccgatcggggcgaggcgaggcgagcgcgttgtgttgcggcgtgcagtgcgcgtgagtgcgtgggggttctagttggggaggagacggaggaggtgaagagcagttaaggccgtatcgggtcgggttgggttggtgcaccagtctgcccgcgtggctaacgctgtggatttccttccgtttcagctcggatcacggtagattacgataatcaaagtgaggtttagtggtttatactatttttatactgtactgtagtatatgccaacttgctaagggtctctgattgtttctttttttttcatttagtttttgacaaggtatgtgatatggaagagattttttttaaccactcgcatgatacggtgcgatgttctgttgatagagcatgaaaaaattttgatagagcatgaaaaaattataagattacaaccatataaggtcgtaaccaggataaaaaaaataccaccacccacataccgacagcaccaacacacaggtccgggagaaccagagaagcctatcaccgtaccagccgccgctaagcgtgaccgaccaccgctagactaacaaaggaacacagaagagatcgccaaaaaaacgctcttacaaccaacacaaagcctaactttatcctaaagcgtccttgcaccaatttttatattgttatatacgtgttcaacgattatacttgtcggtgacatgggaccgggagtatcatgacttagagacttgaggcagacacgatcacccacgtggcctaacaccctcggggggggggggtcgggcccgaggtgatacggccgcccttctctttgtctccccgagggg

SEQ ID NO: 29291 - DNA, 866 bp, Oryza sativa
cagagagggagagagtaagagctctctggttctccagctcttttgtagcttcttcatacacagatccaccaaaacacaggagtagggtattacgcttctcagcggcccgaacctgtatacatcgctcgtgtcttgtgtgtttccactctcgcgaactttccacaggctaggagcttagaacctcacccagagcccccggccgaaccggcaaagggaggcctgcgcggtctcccggtgaggagccccaagctccgtcaatactaataaaactttagccagaaaaaaaatgtttttatgctttggtcatagagtcatggtgtggttttggggttacaaaatccattagctgaccagaacaaccaactcgctagtgttcgtgtagataggtacaagttgacgaactgacgagcgtttagatgtgtggtaggccggggcaagccatctgatctgctgattctctaataatctctactgtattgcctaatcaaggtctccggtatttgaccggcccggcacgtatcgtttattaatgcgcctcgtggagtggagaacggtgcgtgaccgcgcaggccacgacgacgacttgtgtgagaaacaacgtatcgcccggggcctcttgaccttgggtaatgggttccagcgagaggagagaaaaaaaaaaacgaaattccggcagcgagaatcacgcctgcacgccgccgggatggctcgccgtacgtcgccggcggcccccgccgcaaaatatatgacccgtttcgatctgggccgttcagatgagatcgagcggtccacactgggcgtcgtcgctgggcaagacgtgcggggctgtgggccccagtttttatgtgcagcgagggggtgcgtgg

SEQ ID NO: 29292 - DNA, 603 bp, Oryza sativa
tccgcctcatcaaggagggctcctccgagggccaggagaccgccgccctcgccatcggcctcctcggccgcgaccccgagtgcgtcgagctcatggtcctcgccggcgtctgcaccgccttcgccaagatcctcaaggacgcacccatgaaggtgcaagggatggtcgcctgggccgtctccgagctcgccaccaaccaccccaaatgccaggacgccttcctccagagcaacgtcatccgcctcctcgtctcccacctcgccttcgagaccgtccaggagcactccaagtacgccgtcgcctccaagatgtccatacacaccgtcctcatggacaagaagaacaacggctccacctcctcctcgcaccaccacgacgcgctagacgccgtcgaccacgccgccgccaccaccaccaccaccaccgccatggcggccaagcccaccggaggcggcgccgccagctcgagcggcgcaggcgcaggatcagcaggaaccgggacgacctcgagcagcagcgtcagcgtcggcggcaccgtcgccgggacgaagcagcacaacgcgtcgctgtccgggacgagcaccaaggcgcgggagttcgagg

SEQ ID NO: 29293 - DNA, 926 bp, Oryza sativa
gtctaccatgcgtcgcgatactggaaagtacccgaatagaggctgtgacaataccctctgcataacacaactcaccacagtgcaccattcctggatcataatcacccccttataaaacaaggcatggactccccagtgacccccgtgggcttatctccgccacttctcagtctggtgctccgcaatgaatcatgttatacaaaaggtaaagccgttgcccacgctggcttgtggttggcacggttaatgtttcacaatagtagctcgcgaaccggtccttaattgtcatgagcacgactctcaaaaccatgtgctcacaacccaccattatcaagttttagttggcaagtaattaattaaccgatcacgattaaccatcgtgaaccatcattaaaccatcattaaataataatgaatcatatgttatcccaatagtgtgctaatgtttctaagcatggctaagcaatcacatctaatatctagctgaaccaatatataaagctcaactagtcaaattataataacccaaggtatcaaggattaaagtaatcaatgcaaacaggccataacaaaggaatagattcacaccacccagtgacatttgaaaataaatgcacagttgaaataaatagagaatttaaatataggatcaacatgctcaaaggattgtgtttaggatctgtgtgacttgccttgcaataatcggtcttcaattaatcttcttgaatacttccgacgcactcgcgaaccttcgcaacgacggaaacgacaagctaacacgcaaaacgaagaaaaagactaataaaaatcaaataaacaatacataaaaagtaaacaaacatgtagatcataattttagatgaattatgagacttgaacggcctcattctgacttcaaatgaatttattatgaattttacaagatt

SEQ ID NO: 29294 - DNA, 709 bp, Oryza sativa
tcaatttggtacgtagttcgtacatatatgtacaaaatttatatatataataaaatgattttatatatcagaagaagtaggagtatattttttagataatgagaatttataaaacccggcttctacaccaacgggggtgtatacagccacagaaaatccgagcaaacaagctcagttcatacacacaagttcacaaacaaaaggagcacaaaggttcaagcaccttacataaaaccaaaagagcacaaagactcccaacgcctttcaaagtgaaaagaccttccaaacaaactaacgaccacattcctcctttaaccgctttctcatgttccatccatctttaccaaagaagtgcatgacagatgtctctaacagtttgcatccttccttcatcacatcacactcatcttctttaagcagcaaggaccattgtcgagcccaatacgtccccctgaaaataacctgcaagtaagagttaaaattggagtcattgaagaccacatcatttctacaaatccacattgcccacaacaacgccgcaatccctataaagatttggtgctttagcctagattgtaaaccctttagccaaatcccaaacatattagcaacattgttaggcggatttatcccaaatgttataaaaaggatactccaaacaaatctagccacatgacaatcaaagaagagatgttgtatcgtttcattg

SEQ ID NO: 29295 - DNA, 9944 bp, Oryza sativa
attgtccttcgtgagaatcactcccttctttaaataccagaggaagattttgtttttcaaaggaattctaagcttccaaattaaatccttcattggcactacattctcatacataatcattttatacatagaactaaccgaaaatatttcggttttgttaactttccaaataagcttgtctctatggtttgagagcctaacaagaaccactttagccactaggttaaaccatgcaaccaaattctcccccaccaaagcccttctgaactcaacatttaacggcactttatctataacatccgcaacaatagcattcttattccttacaagattgtataaattagggtacaacttttcaaaaggtaaatcaccaatccagcaatcctcccagaatcttatctgataaccatcccccaccttaaaggcaccgcctttaaaaaagacatccctcacccccattagcccagcctagaaatgtgaatctccagggtgtttctcgatttgtgtgatggttttcttagtcaagtatctattcctaagaatgtcctgccaaaccccttcttcattgatgagttgtacaaccatttgctaagcaagcatttgttttgtatctctaagttttgtatacccaagccactacattcctttggtttgcacaatacactccatcttgctaacctatacttcttatgttcatcacattgctagaaaaatctagatctataatagtctagctttttgaaaatacccttagggatctcaaagaaggacaacatgaacatcgctaaactacttaacactgaattgataaggaccaaccttcctcctaccgagagaaattttcctttccaactactcagtttcttttgaatcctctcctccacaccctgccaatccttattgttgattctcttgtgatgcattggaatccctaattaagtatttaaaagggtaagccccggtatcacacccaaataatttgacgtactcatgctccacatcttttgcctgccatagcaaaataactcactcttatggaaattaatctttaagctagataatttctcaaatgcacttagtacaagcttgagatctctggttttatcaagatcatgatccataaaaagaatagtatcatcagtgtattgtaaaatagagagaccattatcaactaaatgaggtaccactcctttgaatctgccttgatctttcgttctttgtattaaaatggctaacatatctgcaacaaggttgaacagaataggtgacaaaggatcaccttgtctcaaacctttccttgtttgaaaataactcccaatctcatcatttactttgactgccacactcccacccctaacaatcgagtcaatccaatcgcaccacttagaagagaaacctttcattcgcaacgactgttgtagaaacttccaatcaactttgtcatatgctttctcaaagtctagctttagaatcaccccattcttctttttcttgtgcaattcatgaagtgtttcatgcaaaattaccactccttccataatgttccttcctggtaggaaagctgtctgcaaaggtttaatgaccttctgagccactagggctattcgattgtctattcaattggccattacagaagtaggagtatatacatataaaattatatatatatatatatatatatatatatatatatatatacatataaattcatatatgcatatatttgtataaagtttatacgcacatatacgaactatatacatacatatatatgtgcatacttcctccgtttcatatattataagttattttgactttggtcaaaatcaatttgtttcaaatttgatcaagtttatagaaaaaagttgtaatatttttaatcaagataattatattatgaaaatatatttaattatagatttagcgagactaatttaatgttgtaaatattactatatttatctacaagtttaatcaaattagtttgactttacccaaagtcaaaacgacttatagtccgaaatggagaccggaggggcaaactgatcgagtggctgcaccaacatgtggtcagcagcatcagcgcccgctaattgcgatggcatgaaggagatcagcgattgttgcatgcaaaatttaaactgtttgattctgagttttttcgttcatgatagtcttatagttgccatagcgtgaaggcgaacaacgattgttgcatgcaaattttaaaccagagtttgattctgagttttttctttcatgatatcgtttgaactacgaataacatagtgtcatcttggtttaaagtaattttggttgtttcaaatcttgagtaagtttccatactaccaaaatttttaattggattccccatgtgatttggcacactttggctctaatgagaaaaactaccaaaagatttattcaaattatcaaaataaattaaattggtaggacaagaataagcacaaaaccaaaaaaataccaatagatacaaaactttgagcaaattgtgttaacgataccagaacttggcgagtgggttcaattaagtgcgataacttaaaaaatgacataccaatgcaacaacttggctaggtgggtgtgtttgtggttcaaaaggctaccacataaattttgccatgtcaactgtccatgttggacaaagtctacatggaacacccttcacacatcatgataaatttgtacaaatcctcttatgttattctcatttgaggacttttttctgtacagatgaatcaatcaccaagcccatagatgacgagggatggggcttcaaatctgtagcgttgggcttcttgaagcttgtagttgatgtcttgaactagccgccatcgatgtcctcgaagcagccggtggtggtaggtaggacttgaagccaaaccatgttgacgtgtcaaattgcaagccaaacctatattgtaagacaaaccatgttgatgtgttaaattgtaaagtaaaatcatatgtatctgatgtgttatcagagccgtctctagatatttggggcccctgaacgaaatgctaattgggccctaaattttgaaaattttatataactaatataaacaaagcatactttcaatcaactatataactttaatatgtgttattttatacaaatattaatgctaaaagagaaaaggtagtactactgacctcatgttgtactgaaaagtgaaaagcatcatccttctagtgtttcttgaaatgaaatctttaattatatcttcataattaatatcgagattgagctgctgcatctagcctgtctcttcttacgtttttcagcacctgaatcatgctttctgtttctagaagtgacgaggaactgaagcaattgaggaaataaaagccttcctgagttcctgttttataaacaaaataaagaaaaggcgtgtttgattcaatcaatcattcaaaaaaaaaatcaaaatactgtatacatacatacatacagtatacacactaatagagaatcagagatgactagatgagatgatcagatgaaagtctagttcgttcgtcaaattacttgatgatcaaactctcagtctggttgcccggcgcgccctcgccggctcgcccttgctggttgccggcttgccgcgcgcgactgccggagttcgccacgccgccgctgccgctcggcgctcgcccgctcgattggccggcgattgttgtgctgtcagctgccatgcgcgtgcgctgcctcgcgttctccctgcctcggctgctcagtccattgtccacgcctccatggccatccaacagaccaacacagcaacactaaatactcgcgagttggagtcggtgaatcgcgacgcctcgactgacgcatgctgcgcgcgatcaccaatcaccgcttgagatgaaaacaacgcaactacgctcgcgagtcgcgacgcctcggactgcaaacttccgccgttctgcgctcttggtagcgggcaagcggctgccaggtatgtcaagaactattcttgaagggtacaattatatcacactcagccgtagaaaacaccaacacttacagtacaatcgatctcagttaagaaatctagtgtgccagtaattagactacattgccatgtaataataaacatcacaagattcaagcagaaaaaaagacaaacaggcaacaaccggtccaaatcaatgaaaccctaagtatataaacaataaccaattgaacaaaaataaaaatatgaaaccaccaggaagtgatttaccataaggaggggataccccaagaattcgccgagtcggcgccatccctgcgcatgcggttattacaccaccagggacagttcccaggtctgaatgagtaagggcaccagtttgggataatcagatctgaatcagtaagggcaccggtttaggataatcagatcagtgtggctcacgatgccctcacaactagcgcagaagcaatgtcgttttcccttgcactcgctgctaaccgtcgttgcctctcggtctattgaggtcttgaggaaatcacgaagagaaaccgagaagaaaggcacatatatttgttcattgtgatataacaaaagaaacaattggaatataagaattattaggagactttttttgtaaaattagatgggacctcattcctatgatgctgatgttgacatgggactttgtccaaggtggacagctgacgtggcaaattttctttcgtggcagccttttgaaccacacaaacgcacccacctagccaagttgttgcattggtacgtccaattttcaagttcttgcacttaatcacaccccacccgccaagttcttgtattgtcaacgcaatttactccaaaactttacttataaattattttagttacttcattcatatttatacattgagaccttttatggtgctcaacctcttattcacatccatcgttcattctttaaggggtaatttagggaaaaatataaacaaaggcgtggtaattgtttaagccaaaccatctttaattaacttctcaacctttgtttaccgctaccctctatctaacttccctctgctagccatgagccatttcttgtagttctcgcctacagcttattgcttgggtcactgtattttatcaatttgtacgtatggacagctaccactaattagggttgtcaaaaaagtttgaggctcacgagctactcgagctcggctcgttacaaacttgatttgagctcctctcgtttaagattaaaatcgagctcgagcttcactttaagcttgcgagccttccgagttgagctcaaataacttgccgagcctcagcttttactgtttcgtttcccctctctctctactagtactagtactataggccactctagtatagtaggtacaatagcggactataaaccagttataagcacatttcgagaagataaaagaggagagagaagagtagcaggctatagatttatagtcagctgcagcacagactccaagatgcaatgtgtgaatgataagtgggaccaggtattaatagtgtatagtagatgttgatagataattattatataaattggctattaaattgactataaatgatttggagctagtagatggttatactattaaacttgctcgtagaggacagccacacaactactatttgctgtcccatttcccaacaagagagcatggctgagtatgtgcattgatgtaggagcaataatactgctttttcccgtctaatcattacaatgtcacattttctcatgaatggagatgaatctgttccacttttgcatgtagtccaagcaggttcacgaaaaagctcgaagcaacgcgagccgagtctgagctcaacttcaagctcgaggaaaatctaggctcggctcgagctcgacttgagtttatactaagctcaagcatacgtagggaagtttgttcgagctcggatcattgatagccctacactaatctaaaactattattctcatctaatttaaactttgattctttataatgattcctctgttgtaatccatacgtgtgcgagaggtagagtttttttttatccatcttccttcactatcatcagtaactatggtggaaattaattaatcctaacccaacccaatagcttgcttcttttcttccacctccaaataaatgattttaaagacccaagtaaaacaacgtgctaatgtaaagtgatcataacaacgcagaaataattaataaaccctagaatatactgatcggcccttaaccatatgatgatacgaagtgataataagagaatatataattgccagtataacctttcaccttttatacctggcccataatttttaagtacccttccaccggtaccttctatctatcttagttctaagagcgctctaagatatgccaagcaccataggaagtctattatatacaatcaacatacctcatctaatcaaaacttacgtagtcccgtgcaaaaggcatcgtagtatcgtaccatactcttctaacctactcaatcaaacgtttgattgactagaaaggtcaaatgatggttcatttttatttatgtgaactattgccattgaacgtccaacaatttaaatttatgtataatgatgggaaaattacaatatttatgggcaaatagttacaacagtcgtaaccaataagtagtgttctgcataacaatagcgcctcgtggtaggttagattagttagcatgctcccatttttacttcttttgtactaggtgtaatacaccgaggagttgactattacccaactgctatataaaaatctttgtccgctgcttggtattaatcataccctccctacgtccctaaatgccgtagtcaggtataacccatcggtagatgtaaatacatggtcttcttggaggggagggcatcgaattataaaccattacaccacgtaacattgagtctacactaggagaaagccttttctgctagccgtcgactacaacccaccgctttgctcgccgagaatagattggtatgctagattagctagcttactcccctttatattcaatgtgatatatttcatatcaatacatataaacattgtcacaccctgattttcgttttaggatttataaattatttaataaattattaatagaatttatattaaatgttcattaatttacaagtgaagttaaatgtgggaaataaaatttcctaaatttaaagcatggatggatttaatttttattaaattctccatgattaattatactctcttaaattttctcggatttttcagagctcaattcctaaatgatacaaagaacaattcagtaattagttaatcaattaatgatctaattataattatgctaagtgcttttcttgtttaaaaatccttaaattataaatttttgtttaaaaggaattattagaaatgatcttaaaagcctaaaagagaagatctaattttaatttgttaaatctcaatataaaagtgggctagataaaattttgttaaatacttctcttgtttctatagttcctagatttttttgggatttatttgagtcaaggaagtatttttaatcaatggaatatcatttcatgaataatttaaatagaaaaggttttaaaatccccctttttggctttgggccgaaagtcggcccaagtctctctctctctctctcctcggcctgcttgcgcccggcccaagccggcccagtccgccgcgccctccctcctctttctcagccgctgacaggtggggtcgtcttcctcctccagccgccctagccaagctgcgcaaaccgccgatccccttccaaaatccggccgccccttttcttctccggccaaatcaattgagggggaaataatctcctcgatctcctcttccttttctctttaggaaacccgagctaattcgtttggaaatcgtcggattcaatgccgatttggttagcttctctttccaaaccctaaaaccttccatctcgctgccggtcgccgtgggcctccgtcgccgcctttgccctagcctgccgccttctctagcgtcgcctccgcgtggttctttgtgtcgccgcagccagtgggtgtccagtcgggcgccgccgtcccttcggtcatcgccgtcggtcgccgtctcctttaccagcaatgtgaggtcgtcgccgtccttgtctcgtcctccgtttccgccgcaggtcaccggagcgccgccgacaccgtcgacccgaagctctccaccgccgccatcagtccagccacgccgtgccgccgttgcagccaccaccttcggtcgttgtcgccaccgtcgggatcacgaggaggagcagcacctcgtcgaccccttcgttgctgccgtttcccgccggagcatcgccgtcattgccgacacgaagaccgccgccgcctcaacctcgccgctgtcgtcatccgtcatcgtttgccgccgttcgagtgctcggtgagttcgccgcgtcgagctctacccgttggtgccctccgtttgcaccgccgtaccgtcgttcgccggcgagcgcgaggtgccgagccgccgccagcgatgacgtcatcgtcgacgtcagcgccttgtcagcgctagacccgtggtggaccagatcgatctcggccgtccgtttggcttagattagatctcggcagttggtttcgtagaccgcctctgtgcacccggtctaccgtggaccgtctttgatgacgcaataaatccctttttcctttcaaaaataattctttattgcgtcataattcaattaaaatccatataaatgctttaatccggtttaatctttaaaaattcataactaattcatcgtaactcggtttaatgtggttccggttgcaaaagttgtataaagatctacatattaaaattacccataaattgaattaaatttatttaattctttttaaatgggttttaattagattaaatcttgtaaaattcataattaattcatatgaagttagaatgaggccgttcaagtctcataattcatctaaaatcatgatctacatgtttttttactttttatgtattttttatttggtttttattagtctttttcctcgttttgcgtgttagcttgtcgtttccgtcacttcgaaggttcgcaagtgcgtcggaagtattaagaagattaattgaagaccgattattgcaaggcaagtcacacagatcccaaacacaattcctttgagcatgtttatcctatatttaaattctctatttatttcaactgcgcatttattttcgaatgtcaccgggtggtgtgaacctgttcatttgttatggccaatttgcattgattaccctatgtcttgatcaccttgggttattataatttgactagttgagctttatatattggttcagctagatgttagacataattgcttagccatacttagaaacattagcacacaattgggataactaatgttccactattacttaatgatggatatttaatgatatttcacgatggtcaatcgtggttggtttattgtcacatcctgatttttgtttcagggtttataaattatttaataaattattaatagaatttatattaaatgatctttaattttcaagtgaagtaaaatgtgggaaataaaattttcttaaatctaaagcatggatggatttaattttttattaaattctccatggttaagtcaactctctgaaattttctcggatttttcagagctcaattcttaaataatacaaagaacagttcagtaattatttgatcattaatgatctaagtataattgttaagagcttttcttgtttaaaaatccttaacttataaattgttgtttaaaaggaattattagaaatgattttaaaagcctaaaagagaagatctaattttaatttgctaaatctcaatataaaaaggggccagataaaatttcat

SEQ ID NO: 29296 - DNA, 9430 bp, Oryza sativa
gctgcttttgcaaatgagcctaatattatgccatcctttggtatccttgtgcacttgcatatttgctgtgtggcttgctgagtatgtcatatgctcaccttgcaataatcaatcaacctcagttgaagaaaaaggatccagaaggagaagacgtttggcttataccccagttgagctgcctgtgggagtggagccggagcttcgctagattttattttccgctgcagttttcttcttggtgaggacttagtgcctcttaagtaagtatttatcgttttagttaatttgatgaatctgtatattaaattgtcaatttgtgtacctcggctgattcctggacgaggatttcatgcacaaataagttcggaaattactagtgaatttcgggcgtgacaagttggtatcagagccatctcgactgtaggataagccaaatggtcaaaccttaaggactaattttccgaaaacatgatttgtgaaaattttcctttcttccttctctagaattctctataaatcattttatcatcctctcccctcctgctttcaacttgagtagttctaagacattgaaacttgaagacgccaatgtggtcaacttatggaggttaagtcaagtggatcgatgaataagaaggtgatggtcgatctgaagtgccaagtggtcaagaaggaatgaagtttggatcctaccttagaacctatgccgccaaagtgtctttgaagaatagttagtaggatagaacgtttgttgtttgctttgtgtgtaggtatggttgcattcccatcattggagtagttcattgatgagtgtgtaactatactaggttgcttgcttaatcaacttgaacaatataatggtctacacacatcagatcagtggtaacctggttaaggtcttatctttagtgtaacacctctccttctatcttctctaatctgcaacggatggtgaacactcacgccaataaaagtggaaataataacaatgaagggaacccaactcttgctcaagttctggctcaacagactcagttaatgaacatgatggtacagcagatgcagaaccagctcaaccaagggaacaataatgctccaccgccgcagaacaagttaactgattttcttcgtgtgaagccacctaccttttctagcactaccaacccagtggaagcaggtgattggttgcacactattgagaaaaagttggaactgctccagtgcactgatcaggagaaagttgttttcgcttcacatcagttgcaaggatctgcatcagaatggtgggatcatttccggatgaacagagcagaaagacaaccaatcacttgggcggagttcacggaagcattcaagaagacacacatacctgtaggagttgttgctttgaagaagcgtgagtttagggcattgaagcaaaaggatcataccgtggcagagtatcttcatgagttcaatcgtctggcacgttatgctccggaagatgtgcgtactgacgaggaaaggcaggagaagttcttggaaggcttaaaggatgaactgtcagttacgttgatctcccatgactatgttgattttcagcagctggttgacaaagcaattcgacttgaagacaagaagaacaggatggataaccgtaaaagaaaaatgactgtattccaggaggcacaaggtagtagccagagacagcgtatcaagccactccaaattggtgaaccttcttccgctggtcaaggacagtcgcaacagttgaatatcggtggtgagatcaaatcagagactaatgaaagcaatgaagttaacatcgagcaagctaatcagccggtgccagttcagcaggatcagtctcaagtgaataacagtagtagaagggagcagcaggtatgtttcaactgctacaagccgggccactttgcaagagagtgtccgaagccgaagcatcagcagccgcaaggtcaggtcaacaacattgttgtcacaggagccaatgcagtgccagttgcgtcttcaagagttgtgtcttcaagtgttacaactcagccaccagtttcaaggcagcagtagttttctttaaagccttagaataattatcggagttatggaataagatagactgcagtttacctattccctttttctttctagccgttccgaatctcgggacgagattctttgtaggggggtagatctgtcacatcctgattttcgtttcaggatttataaattatttaataaattattaatagaatttatattaaatgatctttaattttcaagtgaagtaaaatgtgggaaataaaattttcttaaatctaaagcatggatggatttaatttttattaaattctccatggttaagtcaactctctgaaattttctcggatttttcagagctcaattcttaaataatacaaagaacagttcagtaattatttgatcattaatgatctaagtataattgttaagagcttttcttgtttaaaaatccttaacttataaattgttgtttaaaaggaattattagaaatgattttaaaagcctaaaagagaagatctaattttaatttgctaaatctcaatataaaaaggggccagataaaatttcattaaatactttgcttaattctataattcctagatttttctgggatttatttgagctaaggaagtatttttaataaatggaattgcatttaagaaataatttaattgaaaaaggttttaaaaagtcttcttttggctttgggccgaaagccggcccaaaacccttctctctctttccctcggcccagccggcccagtccgccaagccgccgctctcctctctctctctcagccgctgacaggtgggccccacctgtcaggttcgtcttcctcgagccgccgctgccgcctgaaaccctagcgcgccgccgtcgccgtttccttccaaatccggccgctcctttccttctccggccgaattgattgaggggaaacaatctccgggatctcctctaccttttctcctttggaaacatcggctaaatcgttttggaagttcgtggaaatagagttcgattcggatcggcctctttccttcaagccgcgagctttccttctcgtcgccggccgccgtgggcctttgccgccgcctccttgcacctatataaggacccccgagctcccctctacccgtcgcctcctttgccttagcctgccgtcgcgtctagcgccgcctccgcgtagccctagttgccgccgtcgttgccgtcggttcagccgcgccgcgccgccgttgcagtcgccgtcgtcggtcgccgtcgccaccatcgggttcgccaagtcgtcgccgtccccgtccactgcttcgccgccgccgaagaccgtcggagtgccgtcgccgtcgtcgacccgaagagcttcgccgcttcctcctcgtcgccgccgccgtccgttggtcttccgccgccgttttggtcaccggtgagttcgccgcgtcgtcctctacgtgctggtgccctccgtttgtgccgaagtgccgccgttcgccggcgagcgtgcgccgcccgagctgtccgctccgccgagccgccgccgctgtcggtgacgtcatcgctggcgtcatcgtcccttttcccgtgagccggtcgtggaccgatcgatctcagccgtccgttttggatagggttgatctcggccgtccgttcccgtgaaccgtcgcccgtgcgcccggtccaccgaaaccctagccgctgacgcaataatccttcttttccttttcaaaaataattcattattgcgtcataattcaattaaaatcaatttaagtgttttaatctgatttaatctttaaaaattcataactaattcatcttaactcagtttaatgtggttcaagttgcaaaagttgtataaaataaagatctacatattaaaattgtccataaattgaattaaatttatttaattctttttaaatgggctttaattagatttaatcttgtaaaattcataataaatttatatgaaatcagaatgaggccgttcaagtctcataattcatctaaaatcatgatctacatatttgtttacttttcatgtattgtttatttggtttttattagtctttttcttcgttttgcgtgttagcttgtcgtttccgtcgttgcgaaggttcgcgagtgcgccggaagtattcaagaagattaattgaagaccgattattgcaaggcaagtcacacagatcctaaacacaatcctttgagcatgttgatcctatatttaaattctctatttatttcaactgtgcatttattttcgaatgtcactgggtggtgtgaatcaattcctttgttatggcctgtttgcattgattactttattccttgataccttgggttattataacttgactagttgagctttatatattggttcagctagatattagatatgattgcttagccatgcttagaaacattagcacactattgggataacttatgactcactattatttaatgatggcttaatgatagttcacgatggtcaatcgtgattggttaattaattacttgccaactaaaacttgataatggtgggttgtgagcacatggttttgagagtcgtgctcatgacaattaaggaccagttcgcgagctactgttgtgaaacattaatcgtgccaaccacaagccagcgtgggcaacggctttaccttttgtatagcatggttcattgcggagcaccagactgagaagtggcggagataagcccacgggggtcgctggggagtccatgccttgtttataagggggtgactatgatccgggaacggtgcactgtggtgggttgtgttatgcaaggggtaatgtcacagctcctttccgaggtaccgtggtggtactgaggcacatggtgacatgttgtggggctgtgtcttgtgggtacagtggtacacctctgatcagagtaaaactattcgaatagccgtgcccgcggttatgggcaggtctaacaatgtttttcgtgattagtctcacacctctcacaataattattgatgctataactggtaataatttgtttagctcctggtttggagttagatctgtacagccgggtatggttgttcaggatggttgggcctgtgcagcatgggtgtgctgttcagtgttgattaaaatttttgattaactactccactgttttatttctcttaaatgttttgctaaatgctgcttttgcaaatgagcctatattatgccatcctttggtatccttgtgcacttgcatatttgctgtgtggcttgctgagtatgtcatatgctcaccttgcaataatcaatcaacctcagttgaagaaaaaggatccagaaggagaagacgtttggcttataccccagttgagctgcctgtgggagtggagccggagcttcgctagaatttattttccgctgcaattttcttcctggtgaggactaagtgcctcataagtaagtatttatcgttttagttaatttgatgaatctgtatattaaattgtcagtttgtgtacctcggctgattcctggacgaggattttatgcacaaataagttcggaaattactagtgaatttccggacgtgacaagttttctttgcaactgcttgaatgaaaagacgacgatatcgatggatattagatccaacgcttggcataagaatccatgcgacgcggtaaggtcccaaaggtagggcgatatcgatgaggagttcaggagcggcgcatggcgcacaaatccatttggcgcagtagggtttcacgggtcgagatagaatggaggataattgaacttgtgtatgacaaataaattcgccgaacaattttagggttttgagcgagtggccaaactcggtaattttgagcagaagggatagggaagaaatgaattcggggagagccgagtcgaatagacgagatggctcaggttcaactctagtgttcaatcggtctgaggaaaagaagatgttatgacaaatgaaaggctttcggagattcgattagcttcaccgaaacgcttaacaaatcagtcggagaggaaagacgacaaggaaggatgtcgattggagaacatcctttaggtggatcggtttaatcgcggtattccaacgattcaaggaaatgatggggtattgcaattgtacatgagagttgagaggacagagaagggattttaccctgacgggcgattctggaagaactattgagttcgagtaattccagacgctagaacaatcggttcgggaggatccgattgagaaggaggatcgaactatggaatttgattccggaggaaaggtacgacaaggatttgaattcacaaggatgaattaaccgagatccttggcataaacaattaaatgcacacaaataacacaaatcccattgtgcaggtcggctaggcctttcaaggaggaaaactagacttttccgtgaattcttttgaaataaactctttttagattttagttcgtaaatagagttttgctagtaaattccttctagtatttatttgtaaaataattgccaaacacttatagtttcaaaatagggttttcagaagttaactaatattagcccgcatttgtaaaaatagttttctcagagaaatatctctcaaagtatgttttctaaatatttagtatttgtttttatttatgaaacaaataccccaaataggttttacttcatagaatgggttttcagaaagacaaatggcatttgcaaacattttctaaattaatatatttcataatcatggttcttttagcaaataatatttgaatcaaaaatagattttgtttctagatttccgtcctcgtggtccaagcgtaacccaaaaatgggagatagaatccaattaagaccagcatgatggattttggaaaagatttttgattaacacgaaattttgatttcgcaaatcaggacagaaattttcagggtgttacatagatcaactgaattccttatgattaagataaccttcccatttactttaggatatatcgtatttgcgtactatataatataacccaggatataaggtacttcctccgtttcacaatgtaagtcattttagcatttctcacatttacattgatgctaatgaatttagatatatctctagattcattagcatcaatataaatgtggaaaatgctaaaatgacttatattgtgaaacggagggagtatgattcattcataacctgacaattactccgtgtaatctccctctaaaatttatttttgggaataatataggactgtttggtgatgctcttagcgatctcgtggcaagtgtccaagtgacacccatttgccggtggcgcgcctttgggcccatggccatggcgcacatgcttggatgggccggcccgtcgctccacgcctcggatcaccactgtcttcgcccgcggcggcgcacgccgccgccggagcccctgccccctctcgggcggcgcggcggggaccggggctcaccgcggccatgcgctgttcttgctatccctctcgtcagtttgtgccctcaccctgatgatttccgtttcactagccttgcacttcttgtcttcttccactcaacaggttggcgctaggttttgccgattggggatgaactcgtgacgaaattgcaatgtggggctctctctcggtaatggattggaggtaatagtctggggcttttttttttctccatgggttgctggtaaatgtaatctttaaactatcggtgagaggctatccaacaaagataaactaatgcatccaagggttcggtttgcttgatcatcagttccattttgtaaccatgcactttttaaaatctgtactccaatgctagctctgaacttttttttttctttacaaaaataccacggagcatgttctttactggtgtactgctgctgtccatgttttgctcatggtgagcttttgtaattctgctacatgctattggaaacatgggagatgaaatttgtagatacacagggcatatacgggttatcagtgactccttaacaagggctgtatgggctatgaaatgcgcactgtcttctttttttcggcatgaagtttctaacttcttagcaaatgggaaagaagatgatgaaccaaaggtaaagaggtgggacaagagtcttcatggtgagtgaaactatataagggaaaatttacatatggtgagttaaactatacaagggaaaaattatatgctagcgtaggaatacctcatcggcttggtcatgcagaagaaaacaaatttacaacagtttggtgagattttaattgggaactacaagtattggagtgcagatatcacctaagtataccaaagcaaaaatccgtcccagttgacgagtgtccgttcttgaaagcctttctccttactcacttctgcctttgtcaccctcctgaccttttatttagtacactgaccccttcgaaattgtaaaaagaacccctttcttccttaagaacccctttcttcctttcagaaactataataattgcaatatgtgttgtgtagagtgtagacctataactaaaaatataagagtagtttacactacatcccccaaaagctctacaacaaagctttatgagaaagcgttatttctgggatatactgtacccaggaaaatgatttacttttggctaccatcaatatttttatctttttttatgctttcctttgttctagttttgcatataatatgcttgcaaagatttcttatcccatacaactataaatgccaatataaaataatacaattatctttatgttctaaacaagtagtaactatgataagcaatatggcatgacaacatttatgcttagcctatcaccattccgttcccattcgattttagaaattaattaaagttggcagtgaagtggcatgacagctggcatctagcaagtcacctcacattctcctgcctcgtatgcccgtccagatggatggacaagtgcccgcaagaatgcaagcctaaggagcgcatcctgccacgtgtttccttccccgtatttccgcagaaaaaacagtttcttttacaccctatttaaactattctctggagtccagaccttgcattccctgctaatggagtggtcttagaatttcaagaaaaaataggaactaaggggatagaagcctttccacttctcatctctggccatctctgttgaagtaaagaggtaccttcttgtttcaatctcttatttggtttgtgatgatacttttagttggtgtttggttcttaggaactgatggggatgggatagatctgtttcagggaaaggggttatccctggacgaaaggtctatccgccacgctactcatttgggatctttttttttttgtttctgtgtgtttagcagatccatttattgtttga

SEQ ID NO: 29297 - DNA, 19750 bp, Oryza sativa
tcccctccaatccctccctcttggggattaaccgaataagatcttagtaagtgggggaagagaggtcaccataccctggcaacaaccccagttactgtggataaccgcggtaaacgtgaaaaacaggaaaaaaaataccaaaaaaaaataatttttgtttaaatatttttgaacttggtggggttattgggcccttaccgttaccggaccctggcggtcagggaaaccatgggatccgctctgttattggttgttgccccttgctggctacggtgctctgcgttagttccctgtgagacctttgatctcgacaccaagtcctcatggtctcgtgcagcagagtcatgctgaatcggtcgatagatgcagtcatgaagagagtagatagaaagagagcatggggggaggggattagctaggccatatactgttgaacactaggggaattggagttcgccctaggagattgataaattggtccatccttcccgactgcacaagtgcattacctgatgggaattggagaatacgatttgagatggatatatactatacctagtcttctgtcgaaaatattgggggtgcagtactacatagctctgcccctgctaccaaatatattgacactgactttttgtgaaaccaatgatgatggtggaaatactgccgatgactcctaaacagcatcaaacactaaatctctcttgtagaacaaggtgatgcgattgtgtcttgcaggtaggtaggaggaatatagaataattggcgaaggattgtagtgggtctacctaaggatttaattctggaaaaccatctggtaggatccgaaagaggaacacctagaccttcttctgagcaaagttttccatgaccaacccattctgtggattatgtggcaatcggtaccatcgttgaagttgatgatgttgctagccatcacacatgccagtctgagatgcccagagggtttgacctagactttgtcgagaaattgaatcttctctcataccatgcgagtgagcctcagtggacaaaagtttgctctttatcctgttgttcaggatctcgcaaatagccccagtgataaggtcagctaggcagatttcagggggcctatctcctgttatgaaacctgactttgaggtgtagagaaccataaagagctatgttatatatgatttcttaataaataagtcagtagtgtagtatcatcaatgtgatatctaagacagcattatatgtgcttatgaataagttacagcatactaaactctgaaaatttctgcttgcacactgcatttacttagctggtcatggtgcaatggtgttaagtgatcatatccattacattcagtcattggcttaattgtatgaaatagatcattgatgaaaagatcgctagtgtttgttttttaattgtgcaaaagtttacatacaactatctgatgcaaatgtttttttttctcacaaaaagaagaatttccaccgttatgcatcctaaattctctaatatttttatcttgcaattaattagacatacttctctaacatccgtttttgattttcagaagtgatgaacggcgagcttaaacttatggcttcctatgtgagcaagcttaagttcatcttgcaaaaagatcagcagcaggagccccatactgcgaaccttctagtcctacttgggagtagcaatcaggacaaaagaaatggcctctcacagggagaaaacagaatggacacttgtaccagaaagaagccaagaagataccaactcctcaccatgcaacaaaaagaaacgcttaatcggtacgcagtgcagttagcaaaatcagcctgttatgtactgtctcaaaatataagagacgtgatttaatataattagtttgtttgctgtttcgtcccagtgcatttcaatcatgtccgaaccctgatagaaatgacttgaagaagttggccaaggaactaaacatgactgagacccaaatcaaatattggttccagaactgcaggacaaagatgaaggtatattgtgtataaacttctctgttttcaaaataaattgctccctgagtaaatcatttatcttcttgatgtagaaattcaagaacaatgaggagcgcaaactactgcagaaggagaatgaggagctaaagaaggagaatgcagagttgagaaataggatgaagaactcaacatgccgcgcttgtgacctccctttgttccatatagattgccgtcattgggagaatccaatgctcaacaagggtaatcatggcgttacaagtaatctcattcctcaggcagtgtcatccttgctccccagctcaagtggttttgtagcttcaggctccaatcttagtagcaatgctgtgctcatgcccgtatctgccatgccatcatcagttttgcagcctgctccagccgtctctggtgccaattttcccatcttgcacaatctatctgccaatgcaaatgatggctatacggaaaaaaacgtacttcttgatctggcgaaccgtgcaatggaagagttctttagtctaatgaaggagaatgagtctcttcttgtcaaaaaaaaggagaatgggccttctggctcccacacatggatattctgggagtcgaatcacttaactaccaggaataccttgcaaaatccaggacgattggacaaaaacctgttgacttcaaagtggccgtcaccagggacactgccattgtcaatggtagctgtgttgacctcgtcaaaagccttttggatgctgtatgtatgcaactactatgtgctgcatatttaattagtatcatggtttgcctgcatatcttaaacatgttctttatgcagaaccgctggagagagttgtttccaggcatcgtggcaagtgcaaacaccaccaagatcatctctactgggccctctaacttgcacgacgggttgcttcaattggtgggttacatatcataatctcttctgatgtggttatccatatactcgactgcttgcatgtggtggattgatgtgcagaaaaatttgcagatgcgtgcagagctccaggtaatgtcacctgaagtcccagtttgcgatgtgacattcttgaggcagagtgtgcagtttggaagtggactgtggtgtgtggttgatgtgtctattgataccatccttcctggagagagtaaaacagctcagtccagtgtgcagaccagcagtacagctgccagacgcatggaagtcaggctgttgccatcaggctgtgttattgaagaaatggagaatggctattccaaggtgctttgcttcctcattgactcaatcactggtacaaggtgttaattattgttggtttcctcagtcactgatgtgatgtatagaaatttgtgtttgacaactattgaggatgtttaattctcaggaacatatgaaatgagaatcagtcacataacatgacaaaatgtagcagtagttttgaacactagtatagatactaacgtttgtcagagaacccactctattatcccagcatgtaaagcatgtaataaaatgactaatatacccacctgcatttgtgctagccataccattgcattgcaaaaggaagaggaaacaggcacactaaccaacaagttttcagtagaaaacagaacaaaactacattcaagcatcacttaaaaacaacactgtagatatactgacaaagatggctgtagtttcctgttttaggggtgccttactagatatggtcttgttcttgtagaatgaagtcactactatcggtctctggcccttgttgaacattgtacgaacacactatcatgtcaaaaaatctctaaactaaagtacattcatttttttattttattattattcttgacgggaagtgcattgaactcatatttcaaacaacagaatcagctaacctttttagcatcatttttcgtgggcaggtgacctggatggtgcatgcagcttatgatgagagagcagtgccagtgctttatcattcacttctccgctctgcaaaagcccttggtgcgtgccgctgggtagcatcactccagagacacagccagttcctttccggcctgcacaaatacatcttttgtcctgacagcacaagtgagtgaccgactggtgctattatatatgcaaaagaattaactaatctgcacatattgatattaacagtcagttaacactatgccacatcatgttttttatataggggattttcgatagtgacagcaggcatgatgcgaagaaaagtcctgtacctggtgaagcagatgacgagcagcttcacaggcctatttgcgtcgatgtctaaggccacgctgcaagatggtgatgatactcacttcgcgcatcagatagttggtggtgcaacaggtgaacctgccggactgctgctgagcgccaccacaaccatatggctccccggcgtgaacccgaggcacgtgtatgaccacctgcgtgatgagcagtgccatggtgaatggcgctgcctcctcggtgagcagctgcatcagggcaatgccttgccgtatggtgcccccctgaatggtgagaccgtgccagagttctatcgcatggtgaacgggctgcatgaagggcatgctatctccctgatcagccccagagtaagctccttactagttattgtttccctgtaactattaagttgcatacttccagtacagtgcagttttagctagaaagaaacttccattgattgttactccctatatcctacagtaatacagtctcgagtgcctttcaccaaggaatatgttgctgccaaaacttttttcatctttgataattcttgttcagtgaatcattgatcacattaaaagtcattaaagtatgcttatataaggatattatagtttgctcagacacactttgatgaggactaatattcaactttaatctagaagataatatcaagttcctgtgaccaaaggattaataatttatgtcacgcgtaggtgctgcattcatccaaaatccagttgaggtgccagcgcccataaaaatgtattgttgatatatcagtaggacagcaatgtgataatctagacctcctctggttttttcttgaaaagtcacttttgagtcttgaccagtaggatgtttttcgggaagttggtttaatatttagcgaattcctttataagttctcataaagaattaactcttatctgcaaaacaattactttattaatactctgcatcgcatgtggtctttagtttactaaacccctattttacacatgcaggaaatgggtggtaacataagcaacactctgctcctgcaagaggcaagaactgatctttctggctccctcatagtttacgccaggacagatgtgaacaccgtgcattccatcatgaacagtggcctcaaccctgccaccgtcttcctcgtatcctctggatgtgccattcttcctgattgcctggaatcattccctctacacccagctgcaactgcagatcaggccggcacctccagtgccgctatcgctagcaggagcgaaaccggtgggtcattcgtcaccgtcacttaccagatgtttttcagcagccaaggtggcgcagcacctgccagctcatcaattcatcaaggccgtgatgcgctcaagaaagccaccgacattttcaaggtggtcctcgacactctcaccgtggcatagcgcaataccccaggggtagcatttgcatgcgaaagtgaaatccagatcgagttaaatttcagtgtttaagactatgttgtttctgttgttcaggggatggctttatctctgatagacccgtggatcatgctgtttaccttgtttaccattttcagactatcgatttgaaatgttgatcagacatttataataattggaactttgagacatcaatgtttctctggtttctgctttttatttttatttttttacttttttgcaaagggaagccttcagtttctgcaatggtacaatgaaaatggtaagtttacgtccaggttgtttgatgatgattgattgatctattggtgtttcttgttatgttcagtagtcagactgagacgagcggcaacgcaatttgaaaatatgagaattgtatctatatggaagcaatcgtcatcccaccacaattgctggggctatctagttgacaaatgaacgaaaataatttttcaatcgatcaattttttgtagtcagatcccatattgtttctgcagagttttcggttaggctgtggtatgtatgtggttaatgtctgtttagaaacttatttatggcacatatatcttccagatagagagttgctatcttgttctattattattgtatacgtgaagtttctttggacttttggcctcccaattcttgctgttcctttgaggcatagaaaaaaaaaagataaagtccatcttactcctcaaatttaaagcctatttttcactcctaacttttggaaccggaatatagcctaaatcatagtgattttcgctatcattaacttcaattatataagtgttgttgttgtagacctttgagtaacttttgcatcgacaaaaacatgtatagcggacggtccataaccaccttcgattaaatagcagacaattaatatgaactaatagagcaattaaattagtagtcttgttttcaattaaactatgattttttaatttacagttattcaacctataatctttacaattattgattataacttcatgaaacaaatgttaataaaatttattatctaaaaaactaattgtgcaatcgtataagcccaatttcatgtcctcttagaacaagtttaatagtagagctaactaatagctataagttaatctaaaagttaacatatataatagattagctataaaagcaagtttaatagtagatatgttactcaatgttaaaatcaatattgattcaaaggaaccataggaattttgaaggattttattcttgtaggattttttttcctatatacccctttaaattaaaggaatgaatcatattgaatactatgaaatttctacagaataactcattacatacaagttttcgaggaaattaaacatgaggtagaacctcatggaaagttatctttgagtctttatttcttctcaaattcctgtgttttttcctacggtctaatcaaccggtcattcctttaagtttttatttttttccattcctacgatttaaaggaataatgtattggtcttggaacatatgtaaagctagcttttgcatgagagctaacagtctaacacctttttttttgttttctcttttatccacataagtttttatagttggtttatagttcactattatctttgttctgtggttatctctattttctctctatatataaataatgcatttgcttagaagaacgtactccctccgtttcacaatgtaagactttctagcattacccacatacatatagatgttaatgaatctaaacatatacacatgtctagattcattaacatctaaatgaatgtgagcaacgctagaaagtcttacattgtgaaacggaggaagtatatagctagctagctcctgtatgaaaggtagcactcactattttttttctcaactccaggtaagcatgctattgaacttgctcttaggtaaaaatcgacaaccataaaaaccgcctggcttttctctggtttttcgggtcttttttttttttttgctagagctactaggctctccgtcctccgatcctccatccatttctcctctctctctctctctatccatttcctatctaccgcctccgggcgagattgccttcccacgggcacaacctcctttccagtgcggcgggggcctccacggggcgcgtaggtctgtgggaggaggcgacatggaggctgacttctcctgcaagtagtgccacctacctccatctttgctgcaatcgagctcaaggtactcaaggtactcctcattctcccctcgtttccgcggcagttcatcagccgcacttgagcatattggaaatgtatcccaaattgaatccccttgggatagaaaaagaaacaaaagggaaaagagagagaagtttttaatcggtttacctggtgtcaattcatatttgttgtgtgttgttaattgttatgaattaaagtatctgcgagaattggagtattttttttagtttgaataagtggtggacgtaggattttataaatgggggtacgataaactaatttatttataaaactgtttgatgaaaacaaaacaacaaacacatggaaaatagggaaaccttatattttattaatcatgattcattaacatgaatgtttatagatacatgggggctcccgtaggaattcgccttttgccttcgtgaggaatgcttaataaaaaggtatgctgactggagattgcttgtagtccgttgattcccagcgcctagtaatgaggctaccggttaatttcatccatagaacgagcctatggaacacctccgattaagctgtgcttgtgatcgtcgtcttcagaattatttgctcaccgagggttgaggttggtgcaaatttaatggtgaatatagtgaatgtggaacgggtggctttgtttcgccaaaacctggtcacggtacactaccatcacgtcggcgtgaagagggaatttggtgaagcggggtgacctttgcctcatcggtgcccagtcatgaaccctgccttcatcaaacatagattttgtgggtgcttttgcctcgttggtgcttagcaacggtgtctccgattcccatccattttagacgtgttaatagtatagtgacctagccttgttggctctatagtttcgtctagcctcgtcggtcatagacagatggaatgagtgaatggctagagcgttgttagcttttagccaacatgtcgtccagccttggacgcaacgccttcgtagttggtgtatgcatgagtcaagaacagctcccgtgcatatgcatgggtcaaaatatattttaattatgaaaacaacgcttagatagtccgatcgtatgagggccggacatatctagtaccattgttattggtatcatagtaattgatagacgatccgatctctaatgagggctagacgcctaattttaatcatagaaaatatcaaatggcacttagatgatccgatcgccaatgagggccagaccagcctaataccattgattatataaatgcagtctgatcatagccgtgtttcggctctcatcgatctgactttaatcatggtgacagattaagaacacgtagatgtccaatcgccaatgagggccgaacatcgtgtttaatctaaaagattaatatttattcaatgtacccaccgtccagcgcaaatatcctgaacggtggcatgttgtggataaataaaccaacttgacaaaggacgccggctgtggtgtttaattttatccgcaatggcgcaggttctgctatcaccggcaggcttcgatcttttgattttcctaatccaccaacaatcagagagatgagacgaatgaaaataatagttgggtgcctcctgtggcgtcttccacgtctccggctcgagatggggtctgcgccttttatatagaggcagaggcgacggcggcctcgcctaatcacagcgaatgtgttaatctaccgacctgctgcagataaagaaagtcatgtgcattgctgattagatgatcatgggattaatgatgcttatgacaggtgggtcccatgcatcacacgcgtttgccgatgtttatctcctagttacagataataaccatgtgcttaactttagcgacaaacaaaaacaacatactgcatgctagctagtactagttaatctcttctcttttcaagcgcatatctcttcaattgtgcattaaatttaaattctatttgaaccattattttctgtttgaaatatacaacaaaacaagtccaatattgattatatttggacatcgtgtgatatttgaatcttccgggtccacacgtcacagagacacgcctcatatgtattcagtaaaattgggctgcaaataatattctcatataaaattaaatacccaataatttattatattttctatgatttttagaaaaaaaattcatcaaacaaaaataataaattatctaattattatataatattatttctaaagaaatgtaaaagatccgatacatcataaagaaccagactagaaataaactaaatcttatttttatatgtagatgtcattgtaatgcataggcatgtaactggtaaatagtgaatttcacaactcacttgaacaatatatatagtgcattatgatcattggattcattacaagtgttgatcactagttcatccaaaaaaaattatatgactatatcgtttaatattaataacctttatagcattctagattatatttagcaaaaatatatttctcttaaaaaacctagtcatgtaccttttataaatacaatatcattaaatttcctcatgtaaaaacatagataatatatattacggagcacacacacatgagctagcttgcttagtattcatatgcaagtaatagtgttggctgtagcaatattataataaaaaataaataagaatgagaaaacaagaagaagatggaacaacagaagaatataaggttaaagtttttagtttcacaccatttactacaatgaacaattttaatactattagtatattatcgattaatgtgtgtatatatcataccatggatgtgagcaaccaccctcatgtgtttgggctagtgactaacctcctctttttcttacttctttcgaagttctctgaacgtatttaggtaaaagatgttttggtttcaataaaaaagaaacaatttaactagattattttttagagagaatccatcctgtgccgctgactttgtccttgttctataatatgccactgagttttgttaagttctacagtatgtcattgtatttttcttaaattctataatatactatctgtaacgccccgattttcgttcaggattaaaaatcaattaataatgcattttctagaaattaaataaaagttaaagcaatttaatcaagtgaaattattgagggaattaaaaatttcctttaaaaatcattggccggaaatattttgtaatattctccgtgccctaaaatactctccggattttttcgcgaatttttggagctcaagaagtaattttaaaatcacaaagttcatttaaccaattaaaatgaaaagaaaacaaataaaatccccttcccaccctcttgggctcggcccaagcctccccttccccttcccggcccggccgccccctctctctcccaggccggccgtcccttcctctccctcagccgctcggccctctcctccccttccccgaagtccactttgcctccccagccggcctccctctcccctttggccgataggtgggacccgtgggctccacctgtcatccccgacctcaagcctggccggcaaccgccgccatggccgcccactccgccgccaaatacgcctcgtcccgcccgcgcctctcatccaaaacgtgtggacatggatcccctccacctcctccaccaaatccccactcgtcccgcaaaaatcggcgccggttaaccctacttcctccccaacgtcggtgtcccactccgccgccggttgccacctctcccgggccgccccgtcgccccgagccctataaaaaccatccacgtgccatcctttctcgtttcccctcctcacccaggctcatcgcgccttcccccgctctctccacgccgcccccatctccgcagctcttcggcgagctccggccgcctctagccgccactcttgccgtcgccgcgctgtgctgtcgccccaccggcttcgccgctccatgccgcaccccggcctccacctctcctcctcaaaccgccgccgaaaccccgccgccacctctaacccgagtcgccacctcctccatcgcctccagccacgcgccgctgtcgcatggcgccggtgccacctctgggttcaccacactgccccgcacgtcgtccgccgctccactcccctaatctgccaccgaaaccccgccgccaccacaccacccgaaccaccaccatagcagccacctccagccgcctctcgccgccgtccttatccaccccgtgctgcgctgtcgccttcctcagcaccgcagccatcgtgcgcagcccggccgcccctctacattcgccaaaggtcgccggaactccgcttcctccgcccaagatcgaggacgagcccgtccgcctcttcctgagcgccacccgccgccggtgacgtcgttccaccgtctcccgtgccgccgccggttgcttccctggtgccgtctcaccgtcgccgccctcgcgtgtagaatccgtcgtttcggaagcccgcggtcgcgaggaaaagagttcagaagattgtttgaagaagcaaagcaagtcacacattccccttgagcatgttgatcccaatttacaaatgttttaccgtttgcaaataaatatgcatattttgttaattacatgggatcagggttttcctatctgctcgcttgtaccatgtttactatatctgtcctttgtcaaccttgggtgataaatcgactagatcgtgttacttatgtgacctagctagaattatttgcttagccatgcttaatcatcactagctcagttgatgggataattgcagtattagaccttctagtatcttgacgagctgcgtgctcgagacacccgaccatgtttcattggtcgtaactatccaactaaaatacgactgaatggtgggctgtgggtgcgtggttttgcgagtcgcacccatggcatttaaggaccggttcacgggaaaccctggaagacttaccgcgcttgccacaagcgggagtgggtaactacttgatttgaagtatagctcgaccctttcctaggcaccggtggcgagggtgggcgtgatggagttgggtcggccggggtatccggttgtccagctgacggattcaccgtggcgcacgaggggactgcccacctccggggtagggggtgggggtgaaaccttagcgtggtgtggatggttaggggagggttatgcggagggtcttgtcacaatcactcgacatggtgacgtgtctgcgcaggcacggtgacatgccggtggattgtgttttgtgggtatagttgtgcacctctggccagagtaaaactattcgaatagccgtgcccgcggttatgggcgatcgaccggattcaccgtgattagtctcacacttaataaattgacccaatgtactgtagttcaggagggttggttgggcctgttcaacgtggtgtagcgttgatcagtggagatttaatattaccttaattacttaactgttttactgttttgcgcaataaatgttttacaaccgcctttatgcaaatagccacaaacctccctttgtgtccccttgcatgtctgcatcgttggtgtggcttgctgagtacgatggttgtactcagccttgctatttcccccttttcataagtgtagtgcttctgagctgaagacgaagttagaagaccaaggctcagaccccagttgagttttgcctatggagtggagctgaagccctgctaggatcgcctttttccgctgctgctattttcttttcggtgtaaggactaggtgcctcttctgtaagtatgtacgctttatttacgtttggatttgtttattacttgtcgttttgtgtaccctggctggtcctggacagggatttaatacacaaaatagtctagaaatttgggctaaatttctgggcgtgacactatcgctgtccatttagatcccgttagtactgtataattttgtcctaatgattgaaatatccctaggacaaaaattttcaaaatttggctaaaaattctaaaatatcatattataaattaggcagagaagttgtccatctcaaactctttaagttttacaatctgtattataaaattgtacaatgctaacggaggctaactagacgacgatgttatattatagaagttaagcaaaatgcgatgccatattagaacttgacaaacccaatgacatattgcagagcagggacaaaatcagtgacacaatggattgtctctgtttttttatggttgttcggttaactacctatctactgtgatgcggcatttttagaaaaaattaaatcttatactataagtccatatcttacacattaaattgcatactgaaagttcaagtgccattaatttggttttgatgattaatggcaaatccaattacatgagactaatattgttataagcatttctttgtctactagtctcatatggatatgaaagtggaatatgtgaaaggtgatttctggacttcatatgagttgagagagaaacgttcattgatggtgtacctaaatcacaaggatgaaatgcatggagatcaagctatatgtatcactctttctatccatgcacatattgatatattcatatataatattttcatgtgattacataagcatgtgagactaatgttttgtttgagccatatcttgtttagtctctttacattgagaacatggagatgatgaaggtatgtttttattttattgtctatatttgataaatgccttctattcttgtataggataagctctcaatgtttaatatcttattatgcatacttttgcttcacacaaatattttgtattcatacatttagggggagcaaatcctatactttagttatgcatgtaatcgatccaagttattcaccttcatttaattgggatctttacatttgaacatatatttgagtatatgacacttgtggtgttgattaatactcatcatttattcatatccttttatacatgcgatcggttggtcaacatatggaggttgacaaccggatcattgggactaataattttattgagttaaatgaaagaaataggtcccaaggattacaaaagtgtttatgctcaagtggtatcattacacctaacaacaccaagaatgacagagtgaagatattgaagatgtgtgatacgaagtggctattatggcaaagacggtgaagggcaagcgatgctcggtcacgatggaccatgcggcggtgaaggacaagcaaggggcttggcgctaaagaaccaaatctggtggtgaagggcgagcgacggctttatcatgatggaccgtgcgagacatttgaagctacaagtaaccgcatcaatcatttgaagaatatatggtgaaacggtatcggcattggcgtccctcaagacaatgaaagaaagatgaaaaaaagacattcctaatggtataattctcttcttatttacatttgagtttaggaatgccgtattattaagagggatgcaacgtcgaggtgtttgtgtatgtctcggtgctcaaagtgacctatcatagtgctaccttgagagaaacccaagctttaacctatcctttgagtggttttagaccttgtttttggttgagttgggtagtcctctgggtgagctttccatagagtccaagatcatcaaaaaccgactcctgagcgaaaagttatagtcgttttactctgtgtttttcggaaagtccgaaaaattatcggaaaattcgaaaattttcggacattccgaaaatggctgcgaatatgatatttgcttctgtagattttcggacttgtccgaaaatgcttttcggaaactccgaaaattacagtcttggtctccaacggctagtttttgaggggctcgggtatataaactcctccactcctcctttgagtggctagtgttcttaggcaacattagacacatccaaagccaaatagccatccccattgccttacctttgtggtgcctctttgtgaggggggtttgagaaggggagagagttggattgagagagtgaggagttgagagctagtgagattcactccatcctttgtggtgcctctttgtgagagggatttgagaaggggaaagggttggattgagtgattgagaagttgagagctagtgagcttcactccatactttgagcacttgagttcatagcaagcaaatcttcgattgtgtttgttactcttggggactaaggtctcctagacgtttaggcgttgccggtgagcacccaaggttgtggtgtgctacggaaagtttgtgaaggcttcgatttcgcctccgcaagggaagaaatcaagagtgaaaccgaggagtgcatttgtgcaacctcgtgaggaaagggttgaaataggcccggcccttgtggctcctcaacggagacgtaggatccgtggatccgaacttcgggaaacaaatcatgcgtctcctctcttggcttgcccatttgtgcattctctcatattgtgcttgagcttgtttttacccgatctacttgcatgcttaattgatttagttggtgaccttatatcttgtttagataccttatttgtcaccttttgattcgtatacattttgtttatttgagctacaagttcataactagtgttttattccattatccgccgaatttttcggttgagaccggaacttccaatctgatatcggaagttcctatttgaaccgaaagttctcatcattctaatatgctatgaagttgtgataatttttaggaacgcctattcaccccccctctaggcgacgttaaggtcttttcacatacacttataatataattttcaaattataaaatgccctattctcattttataggagaaatatggaaaatgatttattatctatttaattacgaaaataatattagtccaaattaacatatatgtagaaaataaaaaacaatatgaaagaattacggaaatacgtactaatgtagtcatcatgtataatgcaatgagaaaagaagaccatagtcgaatgctttattattgagcaaaaatgatggtattatttttatcatcttttagcggaatctatctaaccataattaataagcccgtgttagtagaagtctatgtcgtcatgcatcaacatatcatgagactattagttgtagctaagtacaccggcccaaccatacttagcatatcacaagactatcgggtaatggacaattatctttaattgtgctagagaaaaaaaagtactcccttcgttccataaaaaaccaatctaggactggatatgacacttcctagtaaaacgaatctagacatgcatatgttcagatttgttgtactagaatgtgccacaccagttctagattcgtttttttttgggacaaatggagtgaattacaatccatactatatattcttgaaaatttttaaaagttttcatataatattatcctttaaccattattttcatttacacaatagctaactttacattcaatttggaccaccatattctatccatatccaaatccggtgactcagtaatcactctgcatattaactctctctctctctccattttctttttccctccgatagttggataaccgatagatctagcaagaaggagcctggatatatagcgccttccctcttcgtcaggtcagctcctgcctcctaaagtccctgcaagcccgacatccctgacctcaacggcaaccataacaatagtgcgcatcatgatagggaaggacaaaaagacatgtttgttactagagggtaagtatgcgcatgtaaaggcaaatggaaggaacgatggtggctcatggagaaagagcggtgatagcggtgcgtagagtggcagttagcggttgctggtggtatgaggaatttgttgtcgacacaatcacttaatttttccctaaatattgattatacgtgggttaccagttatataaagaaatagcactagctagttttaaaatactacctatgtcccaaaataagtgcaaccgtgaaaattcgtgtcgaacttttgaacgcccatctttgaaaagttaatgaaaaagttaaaataaattagtcaaatgtaaaatattattcatgttttatcatctaataaaaacaaaaatactaatcataaaaaaatttcaaataagacaaaaggttaaacgttagatatgaaccgtgtaaaactgcatttattttgggaggaaggagtagttaataaaaatagggactgtctaagtacaatccggtttaaaaaaaatttgtatctcagcggcttttttttggtactaccgtacaaagggtctctgtatcgatgacgctagatggcgtcatgcacaaaaatattgtctctgttttttgtccttttttttgttgggccacagcccacatcatcttatttgtgataacccagaaacccttgtagcccacaacccactggttcgtgtgctcatatcccacaacccaccacatgattgaaaaaagcccaatactagaataaatcaattatatcagtgatacagcccacgacagcccatggcccacggcttttataactattaagtttagaaacttacatacaatacaaatcattcatacagactgttttgtatgcatggcatacatacaaatcattcacgcataagtataatcataggctatttgttttctgggataaaaacactgctacatatgctacagtataatcatagagcacacacatttacaaaatccatcaggacacacacatgcaaagaaaagggtgtacagataggcatatgtacatggtacacacattcataaatccatcagggtgcacacatcagggcacacaaaaatgtacaatgtagtgatgcattgcagagagccccatcaagcatcagctagcaaaaaaaaactcataaaaatcgtccaacatattcagagtgataaaaatgggcttcatctctgatttagacgccctgccagcctgcctgttgcatggctgctgcaatgcactgctatgcatgcttaccaaagctaccaaatagaaatctaaaaacaatgtgtaacttatgcacagagatgcagtagtgaaaaatttatcacaaaaccaaatagtggtgtttctggaggagtcaacagcctgtgaacccaaaaaaaagttaagatgacagaactataattattgaaactgaaaataaatgaccaatagaactttacatacagaggtttacatacagataagcctataggagcatatagtataggagctatacaataaaaaaaatacaaagctatagtataggagcatcagaagttcagaccacaaaaatatgcatcttacaaggattatttgatatatgaattagataccaaggctttttctgtcatagcattagataaacatgcaccttataagtattatttgacataagactgtttttgacaaaagcatggacgttagaattgagagatttttatggcaagcaaacaacggaattttgaacgatttccagtggttaggctatgacctaaataagcgataaactgattaatatgtaccaaaattataaaaatctaacaaagacaaaaaaaaacaaaaatatatacaaaaacaaaaatacatcatttctgaaactatactgatttcttacaaagtaaaatttttggacaaaaacaaacacaaaatcaaaaatacaaaaaaacaaaactgagagagtaaacacaacgctgacacaacataacttcttcagacaaaactaacaaaactaagtgatattcactaaaattatgaggtgatgcagtctt

SEQ ID NO: 29298 - DNA, 637 bp, Oryza sativa
cacccctgaactagcctaagcaacaatccagtaaagttccagcaaaactactgctaatgaacagagatgacgcaatctattgcaaattgcatcagaaacagccctacagaagcgaaactcgaaatatctacacagcccaagtataatcaagaaaagaaacctttaggcaccgccagtaaccacagaccaaagatcagttcagtcagactcacggtcgcaccgcagctacttagctaattaagacgatacacgcataacatagtaacacatagagatggagattccgttagcagtagggttgtttggtctgctggtggcagccacggcgccggcagatccaccgctcccacacccggcagtgatggaaacggaggtcggcgcggcaagcggcgaggggcgagcaagccggcgcggtgagcggcgacggagaagaccgccgctgcaggccgtcgacgctgccgcacggtgtcgccgagccgcccgaggactgccgccgctggccgtcgacgcagccgcacgccgtcgcaagccgcccgaggaccgccgccgcgcgatctggccgccctagtgtcgaaaccagatttcggcaatattaaaaggggtggctatcaaactgaaaaaatagatgggtttagag

SEQ ID NO: 29299 - DNA, 541 bp, Oryza sativa
agaaacagccctacagaagcgaaactcgaaatatctacacagcccaagtataatcaagaaaagaaacctttaggcaccgccagtaaccacagaccaaagatcagttcagtcagactcacggtcgcaccgcagctacttagctaattaagacgatacacgcataacatagtaacacatagagatggagattccgttagcagtagggttgtttggtctgctggtggcagccacggcgccggcagatccaccgttcccacacccggcagtgatggaaacggaggtcggcgcggcaagcggcgaggggcgagcaagccggcgcggtgagcggcgacggataagaccgccgctgcaggccgtcgacgctgtcgcacggtgtcgccgagccacccgaggactggcgccgctggccgtcgacgccaccccacgccgtcgcaagccgccgaggactggcgaagcgcgatctggcccacctagtgtcgaaaccagatgtccgcaagtattaaaaggggtggttatcaaactgaaaaaatagatgggttta

SEQ ID NO: 29300 - DNA, 7934 bp, Oryza sativa
tccccctttttggtgattgatgacaacatggttaaagcttacaaaagattgaattaaattttgttttgaatggttagaggtgaatgaaactcccccttaatgtatgcatatggaagatatgagtggagctcatatgcatatatataagggagcaaccgaggagagtttccttcatccctactcattcgtgggatgcaaaaagcagtaagaatagatattatatgcaaaagatacgacgtggtgagcactcaaaaggataaaatcaacatcacatcacgaacaacaaataagacactcaaagcataaaagaaatgcaatatatataaagagcagctaagagcatctaacagtcattacatccacacaattagagaattattacatgtccataagttcttaagagtagaggccaaaggactgccaggtccggaacttccggataagatacccggaacttccggacaagcagacaagacaataaagcaaggaaactgccaggtccagaacttccggataagaggatccggaacttccggattaaacagacagagcaggtagcaagcatcaaaaacaaaattttgaccccccttaattgcaattttctccccctttggcatcaaggcaccaaaaaaagacaaaattacaagggaagaagaggatcaagcctcatcattatcgccatcagaaggaatgatctcagtgtcgctggagtgaggagagtcgatgtcttgctcggcggcgtccactgcctcatcgggatctgtaggaacattctcggtaggggcatctgactcctcatcatcactgctctcctcgagtgagaggactcctcattgaagaaacgagaagtgccagagggaccctcaccactagcaatgtctcgagcagtctcataagcagcaaaaggatcaacaaactcatcatcagaaatcaagccttttcttggtggtgccaaagaaagcagtggagtagaactatccaatcacttcctcattctaggaatactgcaaggccaacaaatctgccacgtgcttgcgctcacacaccttgcgtacctcattgaagactatgttgttctttgaggacatgtactgccaatctagccacttcatctctaccactggatgagatcttcccatgatcacagagttataccaatcaacctgcaccaaggtcctgaatctgtcatcctgagagtcagctggcagagtatcaggactaaccattctgtcctttccacacttgagtagatttttcagatagttcactcttgggcgtttaggatcaggatcaacagcccttgtcttgtacagcctcaaaggattgctttcagaaccaggctcatcctcattgccaccatcatctgactcagatgcagctggagagggagagcggggtgcatcacgaatgacaatgctaccagccctcctggaatggatcagaatctgactcccattgtaaaaatctccaactttttctttgcccaatctccccctaggaccacgaaccggggggctcgagtcaccaggaacatcttgagaaagcttctgtctcttctcacgaggcataatgaccactgcaacaagaatcaacaaggttggagtgcaatggttaaatgaaacagtagcagaatcaaggttactggctggctggacagagaccggaagttccgggccaagaacaccgaaacttccggcctgcaaaattgaagaacagaggatttaaccaggccagtgcatgtgacaaaatcctatagatcggcaatttacaaggtagcaggaacaattctatccaaaaggttttctccctaggttcacatatttagagatcggggcaaaaacatgatgaaccaaaggagaagatcaaaagtgctaccttgagggaaaatcgcaaatcgatcgcgggatgaacctcctagccaccaatgtggttgattccacggagaggaatcaaatttccacggttggaatagaaagtcgccgagaggagcactgtagcggcagctagggtttgggaatcggggaggagaagaagtaaggagagagaacaagctcgggctccccctgggtatttatacccccgacccccggaagttccggactgggatgaccggaacttccggcctgacagaacagagggcagtcaggcccaagttcaaaggaatagatgagaattcaatgatttagaaatgaaaacctatggacataaagagacttatgatgtatatgaccagccaacaatcaacattacataacaatggtcaatatacatcacaagaagggataaaaaccaaattttcgcaataaaaacacacaaaaattttcgcaaaatttcacaaaagggtttttggataatagagggaatgtttgagctttattcctggtatcaagaccatcttctacacaagaagtgatctcaagacacaaaagctcttttttttttaatttacattttagtgacacatgtttggctattaattagccaatcacccatcacctaatgttacgagagtctaagatattgagctcactcctaagctcgcaaaatcttttctcatctaaaggcttggtgaaaatgtcggctaattggctttcggttctcacatgggtaaggcatatgtctcctttagtctcatgatccctcaagaagtggtggcgaatgtctatgtgtttggttcgagagtgttgaacgggattaatggctattttgatggcactctcattgtcacataggagtgggatcttggtgaagttgtagccaaagtcttttagagtttgtttcatccaaaggagttgggcacaacaagaaccggcggcgacatattcggcttcagcggtggataatgcaatggaattttgcttcttggaggaccaagaaacaagggaccgcccaagaaattggcaagtcccggttgtgctttttctatcaaccttacacccggcataatccgaatcggaatagcccaaaagcttaaagtcacaacccttaggataccacaagccaagattaggagtatgaactaaatatcttagaattctcttgacggcaatcaaatggcactctttaggctccgcttgaaagcgagcacacatgcaaacactaagcatgatatcgggacgagatgcacatcagtaaagcaaagatcctatcatggagcgatataccttttggtccacacatttaccattatcgtcgaggtctaggtggccattagtaggcatgggcgtcttgataggtttggcaccctccatcccaaacttcttgagtatgtctttcacgtacttggtttgagagatgaaggtgccctcttgtgcttgcttcacttgtagcccgaggaagaaggtcaactcgcccatcatagacatctcgaaccttttagtcatgatactactaattcttcacaaaaagagacattagtagaaccaaatattatgacatcgacataaatttggcaaatgaataaatcactcttaaattttttagtgaagagagtagtatccgcctttccaatttcaaaactatttttcaaaagaaaatctcggagacattcataccaagctttaggggcttgtttgagcccgtagagcgccttgtggagcttgtacacatggtttggcaactttggatcctttaaccccggtggttgctccacatagactaactccgagataggtccattgagaaaggcactcttgacatccatttggaataacctgaaatcatggtgagcggcataggctaaaagaattctaattgactcaaggcgagtgataggtgcgaaggtttcaccaaaatcgagaccctcgacttggatgaacccttgcgcaactaaccaggctttgttccttacaaccaccccatgttcatcttgcttgttgcgaaagatccacttggtgccgatggcattttgcttgggtctctccaccaaagtccacacttgattgcgagcgaagttattcaattcctcttgtatagtgtcacgcccggaaattcactagtaatttccgaacttatttgtgcataaaatcctcgtccaggaatcagccgatgtacacaaactgacaatttaatataccaatccatcttaataataacgttacatacttacaaagaaaagaaaacagcagcggaattaacggtctagcgatggcttcagctccactcccacaggcagctcaactggggtataagccaaacgtcttctccttctggaccctttatcttcaactgaggtttgatgattattgcaaggtgagcatatgacatactcagcaagccacacagcaaatatgcaagtgcacaaggataccaaaggatggcataatataggctcatttgcaaaagcagcatttagcaaaacatttaagagaagtaaaacagtgaagtaattaatcagaaattttaatcaacactgaacagcacacccatgctgcacaggcccaaccatcctgaacaaccatacccggctgtacagatctaactccaaaccaggagctaagcaaattattaccaggtataacatccataattattgtgagaggtgtgagactaatcacgaaaaacattgctcaacccgcccataactgcgggcacggctattcgaatagttttactctggccagaggtgtaccactgtacccacaagacacgattccacacatgttgccatgccccgaaataccaccacagcattgcaaagggggaaatcgtgacaatacccttcgcacaacacaactcaccacagtgcaccattcctggatcataatcaccccctcaaaaaccagagacatggactccccagcgacccccacagacttctcgccgcttctcagtccggtgccccgtaatgaatcatgctatacaaaaggtaaagccgttgcccacgctggcttgtggttggcacggttaatgtctcacaacagtagctcgcgaaccggtccttaattgtcatgagcacaaccatcaaaaccatatgctcacaacccaccttaaccagattttaattatcaattaattaacatcacacgattaaccatcgtgagcgaccattaaatataaccataataataatataatataatatagtttataattaacccctttagttagctaatgtttctaagcatagctaagcaaacttacatatagcatttagctgaaccaatccaatatataaggttcatgctaatcaaattatacccataagaaaataagatcatcttcggccattaattaacggggaaaggttcaccacccgatgacattcaaaaataatgcatagttgaaacaaaataatagctttaaacgggttcaacatgctcaaagggttgtttgggatctgtgtgacttgccttgagcttccgcaaacacttccgaaccttgctcaacgaaaacgctctcctttagaacgtcggaaactaaagtaaaagaataaaaatcaacaaaacagtacaaaaacaagcataaacagtacatgtgaatatttttaacatgtagatcttgattttagaaaaatttagcaacttgaaccacctgaaacggatctacggttatttagttatgattttcagaagatttaatctattagaaaaaactggaaaaggagaagatgatgacgtcatgatgacatcatcaatggcggccggctcggatggcgacctcgccggagctagggtggtcggccgggattttggaggacacctatacgtagagaacgacgagacgaacccgatggtactcaccaatgcgtccaacgacgaccgacggcggccggcaacgacgcaagaggcggcggcagctcggttgaacggcggtgatggcgctacgacggccggcgacggcggagaaggggcggccgagcttccccgctcccgtgcgcacctaacggcggcaacgagaggcggcaacgacggcggacgcggcggcgcggcgtggccggaggatggccggcggcgacggcggcggcgacggagctacggagcacgggaaggcttgggaattggggcaaacgaaagaggaggactagggggtcctatttatagccttggattgaagagatcggactcctcccgcaagaaatcgatccgggaaatcaaaaactcggttttggagataaactcaaaaacgagttcgattcggataaaatactcaacggtttgctccgattcttggggataaggatagaggaggataagaggaatatttcccctcaactaattttaggaaaacacaagagaaaagatcagatttggaggggaaaaaccgagcccactcggtctcggttcggctgctagaggtagaagatgaacagtgcccagggaggaaaattagacttttggttggctgagaacagaacagagcacttgacttgggccggcttgggctgcacagcacgcgcgcgagggagagagaagaggaagaaatgggccgaaaagggcccaagctgaggaggaggatttttattacttttctaattaaaataatcacttaaatgatctttcaattgttaaaaatacttccaatgctcaaataattccaagaaaaatcttgaacatacttggacactcaaagtatttaatataataatatccagatcatttaatgattaatttattatttaaataattgctgaactgctctttgtatgattaaaattaataattgagctccgaaaaatccgagaaaattccagagagtataattaaccatggagaatttaataagaattaaatccatccatgctttatatttaggaaattttatttcccacatttaacttcacttgtaaattaatgaacatttaatataaattctaataataatttattaaataatttataaatcctgaaacaaaaatcaggatgtgacacatagccatcacccaatccggatcaccaagcgcatcttccaccctggttggttccaaagaagagacaaacgagaagtgttgacaaaaacttgcgacacgagagcgagtagttaccccttttcttatgtcaccaagtatgttgtcgacgggatgatctctttggacagtgtgatgtatccttagatggtgcactgggggggacctgagcctgatcagaatgctctaaagtgccctcaacatcgatcccatccacttgtgctgttgacacgtcttcactaccactggtctggaggttccggactgtagaacccggaacttccgggcctggagatgtccggaggttccgatcaataggacccggaacttccggctcagcagacacagcacttgtagggctattggatgtcgatgacggaggttgatccctatcttcttggtcatcctgcgtctcgactggtcgtatgtctccaatagccttagtacctatagcttgacttggatccacatcccctacaacatgtacaacaacttgctctccttgggagccattagattcatcaaatgtcacatccctagtgacttcaacaataccggaggttttgttaaagacacgataggcatgtgcatttgattcatagccaagtaagaatccctcatccacctcaggtgagaacttagatgagcgaggcctcttacttaaaataaaacatttgctcccaaagacacgaaaatatgaaacattaggcttcttaccactcaagagctcatatgaggttttctttaggatcttgtgtaggtacaagcgattgatggcatgacatgcggtactcacggcctccgcccaaaatacatccgaagtcttgtactcatcaagcattgcccttgcggcttcaatgagggttcggttcttcctctcaacaatgccgttttggggaggatcatagggggcggagaactcgtgcttgattccttcttcatcaagaaattcctccacttgagtgttcttgaattctcctccattgtcgcttcgcaccctcttgatagtgagatcatagaggttttgggc

SEQ ID NO: 29301 - DNA, 1786 bp, Oryza sativa
gagaagtggcggagataagcccacgggggtcactggggagtccatgccttgttttataagggggtgattatgatccaggaatggtgcactgtggtgagttgtgttatgcagagggtattgtcacagcctctattcgggtactttccagtatcgcgacgcatggtagacatgatgttgaggctgtgtcttgtgggtacagtggtacacctctggccagagtaaaactattcgaatagccgtgcccgcggttatgggcgagttgagcaatgtttttcgtgattagtcccacacctcccacaataattatggatgttatacctggtaataatttgcttagctcctggtttggagttagatctgtacagccgggtatggttgttcaggatggttgggcctgtgcagcatgggtgtgctgttcagtgttgattaaaatttctgattaactactccactgttttatttcacttaaatgttttgctaaatgctgcttttgcaaatgaggctatattatgccatcctttggtatccttgtgcacttgcatatttgctgtgtggcttgctgagtatgtcatatgctcaccttgcaataatcaatcaacctcagttgaagaaaaaggatccagaaggagaagacgtttggcttataccccagttgagctgcctgtgggagtggagccggagcttcgctagaatttattttccgctgcaattttcttcctggtgaggactaagtgcctcataagtaagtatttatcgttttagttaatttgatgaatctgtatattaaattgtcagtttgtgcacctcggctgattcctggacgaggattttatgcacaaataagttcggaaattactagtgaatttccggacgtgacaagttggtatcggagccatctcgactgtaggataagtcaaatggtcaaactttaaggacgaatttttccgacaaaaatgatttgtgaaaatttctcctttcttgcttatctagaattctttacaaattgtttcattgtctactcccgtctctctttcaacttgagtagttctgagacattgaaacttgaagacgccaatgtgtctacttgtggaggttaagtcaagtggatcgatgaataagaaggtgatggtcgatctgaagtgcccagatgtcaagatggaatgaagttggcatcctaccttagaacctatgccgccaaagtgtcgttgaagaatagttagtaggatagaacgtttgttgtttgctttgtgtgtaggtatggttgcattcccatcattggagtagttcagtgatgagcatgtaattatactaggttgcttgcttaatcaacttgaacaatataatggtctacacacaccagatcagtggtaacctggttaaggtcttaactttagtgtaacctctctccttctatcttctctaatatgcaacagatggtgaacactcgcgctagtggaagtggaaacaataacaatgaagggaacccaactcttgctcaagttctggctcaacagactcagttaatgaacatgatgatacagcagatgcagaaccagctcaaccaaggaaacaacaatgctccaccgccgcagaataagctagctgattttcttcgtgtgaggccacctaccttttctagcactaccaacccagtggaagcaggtgattggctgcacgctgttgagaaaaagtggaactgctccagtgcactgatcaggagaaagttgttttcgcttcacatcagttgcaaggatctgcttcagaaaggtgggatcatttccggatt

SEQ ID NO: 29302 - DNA, 5392 bp, Oryza sativa
  unsure (1)..(5392): unsure at all n locations
attgatgagttgcttggtttagttcaatctacttctgataaccaccagagatctaataaatcagaacaggaaaaacaatgaagtatgcaccaaatttgactatatgaggatgatacactctctggtgttgtttattgacaatgtggcacattgttagaacaaaccatggcaggaattgatgatgagttatactgtggtgaagtgcagagaagaaaaaaaaaagaattaatcttagtgtgataaccatccttggtgttgagaaacaaanaggaagaaataaaatgacaatttctttacaagcttatattacttgcagaaattggtaataataaaacatctaactttatgttctgcatggatgaagtcctagccagaatacggacacaactgtttgttattttgttaatactcatgcaaagctgcaaaatttgcattttttttcttctctgttatgtactaatgttgattacttcaatgaaaacatgtttaccttagcaagtgtatataactataccaaaaggagaatggaagatgtcatataattatacttgacaaaaaatgaaacggtttgaaatacattttatttttctctgtttgaaccaaagaaaatagatttatgcatgaatttaatcatgccaaccttgcattagtagattacgcacaggtcaaatcccaacttgttcgagggaaagacattgaaattcttgcaagacagaatttaacacaaagtgtgcaagaacatttagtaaaagttcagaaaatgaaagcaactaaccttccaatacagttccaaagacaatgttctgtccatcaagctctgggcagggccctggtccagtggtaaccaagaattcaacattgtgataattaggattgagcttgatgtcatcatcgtcatcgttctgtccaaggcacaatgagagggtgccaggccttgcatgctttagttcaaatgctttagggtcaatagtctcagcattcctcacaagtccggtgggaggttggacctcgcccctgtcacgccgaggaccttggcggccagcaacgaagaactggccctgaaggagcttgtggacaagtgttccccggtatgcagcagaagtgcaagcagctttgaagttggcagtagtgagggggaggagtcgaccatacaaaccaaaaattacacgaccaagaggttcagaatcaggacatgtagcaagctcagctcctaaagtgcggtcagagcgaaagtagctagggcagacactgaagtccatgaagatccgatctgtgatggtggtatcaatggcagaggtggatggaatgtttgcgtcatctaaggcaggggatgatgaagcgtatagaagagaagggaggacagggaggaagatgagagaccgtctagaaattctagaggattcaataggtttatgagtattatcatggtttgttttcgagggaagaaaaaaagcatggtggttgttggggtggtggtggaggctgctcagggaaacagggtaagccatggaagaagtggccctggtatttgatgaaggcaacaccatactgttgctaactgaattcttcagttcttgtccttctgacgaaacagcagtagaaaatcactaatatccttccctgcaaatgtaatagttggcttttgagatataacattactgaaattctaaaacctactgttagcctcttcgttgtagggtcacaattatcacttgtgaataatggcaaatagctgacagcccaaacaattacaattttaaaatggaagctttaatctaattctcaacataccattctccgattacttcaaatggaacctgcattgcggtgagggggtgtatgatggtcacagcaggtcagcagctattccagagtgagcaaatatggtcctcttaagtagttgtagtatgagcgagtgaatatttctcaccatgtctttgcatatcatccattcacgattttactataagcaaggttttttgttctaaaatttaccagtttctatagggcagttccaacaatcaaattcaaatcagcatactttttttttacatttccaggcatgttgtctcttcgtttaactagctcgaaattatgtttcagcaattcaaaccaggggcggatccaacttggggcatgggggttcggttgaacccccgaacttttaggtaaacaaacaaactgttattacttgaaataagagaggtttaaggctatcaaattcacgaacgcaagcaaattccaggtcccggtggggtgggagagagagagagagagagagagagagatggatcagaaagaggacgcaccaggatcccctcctcccctccgctgctctgcttgccagatggagatcgccgcccggccctccgctcgtcttggcggcggcgcaaggagcggaggagaacgagaacgagacgggagatttcttcttttacgcgatactcgattactccgcccttatctcaatatcccttttacatgggaattgtgccggctgttttttttcgttttcatcagccgaatttatggctatcagatccttcaagattcgtgctggttatgcaggccatctggtgtgaacccattttgtccccctatagaaaggcaccgcatctggtgcaaaccatggttggcaaccttggaaactcttaatcaacacgacaggctcatccgatggctaggaacaaaggtgaattacttttacacttaaccgcccgcactcatccgatgctaacctcattttttacaaatcccccctcgtcacttcgtgtggccgccgccctccgcctcgccgctccctgcgtgcctggccgcgaacgcgtccccgcccagccagctcgacgccgtcgctggcccgccgagctgcgcctcccgccgtcgccgctcgccgccgcgtcctcgtgccctcccagccggctcgacgccgtcaccggcccgccgagctgcgcctctcgccgtcgccgctcgccgccgcggccgcgccccccctgtgcgcctccacgactccatccagccatgcgccgccagccgctacaggtcagcggcaacagcaggttcggaccgacgcctctgttcttgttcttggaggttcggaccggcggcaagaccctgtgctcttccagcgctaacgagcagtggacggatgtgcagcttctgatccacacccgtgcaggggcagcgctggaacacaggcactacacattccctggcctgccattcaagatttgtaaattagtgtttccaatttaattacatagaatagtagaaagatttaccaactgagattgacactgatgtacggattttgtaatccgaaactctgaagcgtggtcgaggcgccgtcggcgcacgtctcctccaaccgacggagcccatggtctcggtgtctcctccggtagaagcggagtccgctgcaatggatgtgaagggggagcggttgttcaaagggcggtcgcggaggttgtggtggtcgccgacgaggtttcaacggagaccttcgcgggggatgttgatgcagcgcgaggccgttctcgcggcgggtggcgaggtggctaatccgatccttgcctgtctgttccaggaatgaagctagtgacatctgaaccaccaagcaagggaggcacaccgatccacacagtgagtcagtataatgtcatatctcagaactgattattgtttcacatatgttttagaaactatttttaggggggaatgaaatgcttgatatgtgtaaaacattttgctggtttgtttgtccagatctataagtgcgtcaacatatacccaaatcccattatgaaacatttgcatggcatgtacatcaacagctcaatgtctctttgctggctttttcgtggccaggatcaatcagatttgtggtaaaaaatgagtggtagttttcattgatataatataactaacgctaaactgttgtgtcaattcttaattgaagtactatgttattgaacactgcgctacttatactgaaatgccatgttcaatttttgctctgtttgattcggcattgtttcaggttctggtaaaaaaatcaccaataattttgtgatgtgctcagctagctacacagccgatgatctggtgccttcagtctttgaccctgtttggtagtaatatgtattctatgtactttttttaatgatgtattcatttgtgtaatttaaatcacaagttctcatgcaaaaattctattgcttagcctcaggaggacaccatgcttgatagtgttagattgttataatatatagcgcttccaatatttgtaagacagcttattttttaggattctaagatactttaattttgtgtatttttcactgataggaaaataagtacatgaggctgccttaaattgtgcttgctgggtgtttctaccagcattaaagacaagttgattcagacctatgtaggatttgtgctcttaaagatgcataatttttggacaatttgcattgcatgtgttcatggatggaaaaatccatactttacatctgtttactgctctgctcttgtgttgtgagcaatttgtgctgactcacatccttcatgctcctccttttcaatgctgatgattattttcctttttcctgaagagcttggttggcttttctctcttttcgagttagcttttgtccccgtgaatgtaataaggtggccgatgctttagcatcaattggttgtaatagcccagaaaatactgttctcagctgggataacactccacctggtgttgaggatttggttgtcgacgattctgtcgagaatatgggttaatggaaacaattagttttcctctaaaaaaaaagagcttggttggctgttgtttttgcagtaggtattatccccgtgtgccgcattaaaggcaagttgattttctctatctctgtgttagcagcacacaagatcaatcttgttgggaaagatgaggagatatgcatatgtaagctcccccatccctcccattacctctgttggtaatgagtttatgctctgctaattttttatctcttggggggataaatgcatgttctggacaatggttgcatggttaaggtgggatgcaaccattttatttttgactgatcctacactaagtagttagaatcatgtatataaaacaatttttgaattatgttagttctttctccattcactattctgttaactgcaatcttaacagattcatttttgtttaatgaggttatatgttaacttttttttgtcagcaagcatcatttactagcaatatttgcactaaagctttactatatccacggaagcatacaaatttcaaatattagtttcctaaaggtcactgtttagaagtaattccaagtacttttacaagtacagttagcagttttgttaacga

SEQ ID NO: 29303 - DNA, 711 bp, Oryza sativa
taagtaattcttcttgcctttcgagagattgtactttactatccaaagctctcattaacttagccaaatgttgcatagcgggtttgctaaagctcttaagcacatcatctaattcattatcactttcctcatcactagaatcaacatcaagagaggtgtgagagggcttttgagtcatcaccttgcggccttgggccatgaaacaagagtagtggtaggagtcgtcgtcgtcatcactcaaattgttgaagagacgctccttgcttgaagaagatgacttgaaggcaacggtagcaacaccaccttctccttcaaccttgtcttttagcttgggcttgggcttgacctcgggatcttcctcatctccggagtaccacacctccgccatgtgtgcctctgccacatgagcacgctccggcttcttcttgcctcccttagccttagcttcatttgacttagaacaatcggcaatgaagtggccatattcaccacaattgaagcaagctctctttgattgccgctttcccttgtcatcatccttcctccgtttgccatagccactcttgcgaagaaagtgcttgaatctcttgacaataaaagccatctcttcatcttcactttcttcacaacttgactcttcttcttgttttgccttcaaagcaacttcttgatttttgatcatggcagcattcttcaccatttgcctcactt

SEQ ID NO: 29304 - DNA, 10471 bp, Oryza sativa
agtctcttgacaacaaagtgatttgtcatgtccccactcccaagtcctttgatcttgttgacaagaatcatcatcctatcatacatctcttgtggtgtctccttgtcatccatcacaaatcttccaagccttccttccaataattcaatcttggcctcacgaacggtaggtgatccctcttgagccaattgcaaagtatcccatatctccttggcctcctcaagcccatcaaccttgttgaactcctccagactcaaggcggagagaattgcattggaagcttgagcattgcggtggatgagttgctcttgctccgaagtgagctccatgtcatcattaggtacatcaacacctatacaaaacaactttccaaatacttggatgcaaagagattagatgcaacttcatcttgtgcttccaagcggcgtaatgtgtcccatcaaattgaggagcacgcccagaaggcacggagacaaagttgtgagggggaatggtaagtttgctgtaatcaaaaggtatagtagctcccttgggtgatggagtttccttgctgctcgctccatcttcatttccattttccccgttctttccccctaagtccgacatcgtggatcactcaaagcggtgaagcttgaatcaagagcatatcgctctgataccaattgaacgcgctgatgaagcctagaggggggtgaataggctgtccctgaaaacttaaaaacaaatcgcagcggtaaattccaaacagacccggaacttcctggtaaggaactccggaacttccggcctcccaggcccggaacttccggtgttctaagacaggaatttccgggtaacagaatagagatgaaattcaaatttcgaaacaaaagactaagccaatcttcacaagatggtgcacaggtattctaagcagaggatatatcacagaatcatccatagaaacatcacagaaagagacaagagcaattttttcccgaagttcggatcttgcgatcctactctccgttgaggagctccaaagagctgggtctcgattaaccccttgcctcacttgtgcaaaaaccccagaggaaatccacaaccttcaaccccaaacacccctaggcaaatttctagaattgagtgaccaccaagatccaactcaacatacttctagaaatccaccacaagtgtgggttgctctacttgaaaagcctctagaatctcagcacaagaacttcactaacttacctcgttccctttcggaggagaggaaatccttcacaaacttacacgggacatccacaatatgtaacggattctcgcgggcgatacctaaccgtctaggagatcatctccaagagtaataagcaccgagatgacagcccacgagatattccaagtgctcacccaagatcctagtcttcacacatctccaaatcttcttctctccctctcaatctctctttctcacaagaattaggctctagattgagtggagaaggcaagaaacacttgggagaggctagcaatagctctaggtttgaaaagtgaaagtggaatggccatggaacgagctggaaacgagctgtatatgtataacggctaggtgacgtcatctagccgttactcacaaatttgaactggaaactagacaggaagttccggacctagaagaccggaacttccggactacacttaggaaaatctttttcacaagaccggaacttccggacctggaagacaggaagttccggacttgcatttttggacagatggagtatttgcaaaaaagactcctagggaaacttgacacttggttcacactaagagcacttgatatatctcagagcatcacatggaacccctcttaatagtacggtttttcctaaaaactcgatttcaaaagataaactatcctatacacttctcgagttccggtccgctttgattttgtactttttgggggtctccaagcatccatcttccacaccttggactaatgcacctgaaagtcactcaatgaactcattagtcccttaaccacatttgtcattaatcactaaaacccactagggggattaatgcactttcagatgagatcaactagcgacttggccttgtcgagatgaacccgacgagatcagctagcgacttggtctcgagttctccggattgcttctactatggctggtgttgagattatgattcgatgatcccataccctctgagggtcttatatctatacccttggcttccaagtagaactctgagaataccttatttgtacgagatcacagagttcactcgctctcggagtaggattctaacacctggggggacggcttcctggtagattgtgggcccccggttttacacaccggaaaccccatgtgtcttacaataccattccctggatcactagatggtacacacatagcatagttgtatatcacaagctgacatcgttatataggttgaactatacattaataataatacaaggatagcccaaatgggacccaaatagaccgagcatggtcatatacaatacaaaataccagaagaagtagatgagatagcggaagcgaagcagcggcagtccaacgtactccacaggcatcgactggtgaacctaggtcccgactccaccatcttcgacatctcttcatcagcattgtttccgaacagtcgactccaagtcctttctaaaagatttagttaagcaagggtgagtaccaaccgtactcagcaagccaccactacaggatgcatttagtgcacacaggggttcaaggatggcttggtttatttgcataaagctagatttcacaaatcatttcacaaacctatgacctagcagttttaactgaaaacaacgttaagtggaagttgtcattaatccgcgagggtttatccaccttccccaagcctcgcttggtccggtttaccctcgcatccaattttccacacttccaacatcaacatgaccttcccgcccatcgggcaaggtcacaccactttcctcatctaagcaagattaaaatctatgagactagtcaagtgtagtacaagtcccggtgctcaataaccgcgagcacggttattcgaatagatttgatttactcacactgcagtggatgtacgcttttaatcccgcactccgcggcttgcccaacacatgagcctagtcccaacacacgagacttgccacggcccggtttttcagtcattctcgcgtttcggcactcgctccaaggactatggatccccattgcactcccggcacaacacaccacctcgagccggcagtgaggagagtcctggcgctcccgggatcacaatgggttatattacatataggttaggtgtgttttaagttttgccggccttaaccaaacgatcgatccactcgatccttcacctccatcacgtcaccacttcagaaccaccatgacaggggtgccaccccacgagaattcacttagtccaccgggtctatacccactcgagaagtgcggtcgtactctgatcgtttcctgcatagcttcttgactcagtccttaactgaccagggtcggcgactagccgtttccagaaccacccatattctatccatgccgccccagtcgaaaacattttgtttaattaggtttttggttttcgcaaaggtttttactgcgggtggcgctcatgtctccacccgccttctggcaatcactctcgacgagtgaccgctaccaacacatccatacccaactattatggagtgtacaatcttctataattataagcaatactaagcaatgtcaataattgaccacgcataattaatagactcaggcaacaaggatataataaaggtaacaatatcaaggaggggtaggtacgcattttataattagcatgcaactttatttataaacaaaacatttataaactgggttcaatatgttcaaggaggggagcgtagtgacttgccttgcttttagaaaccgatatcttcgagaaatccacgatcgacgaataaccggaatacccgatacgcggttagcacgagaaaaccatataaaatcctctaaataaagtaccaaacattagtgccattggatagatcccgattttagaaaaattccgaaagttgaacggaatcaatcggagtcacggttgaaaagatatgaattcccgaagattagatgatttataaatcgagggggaaggaatacccaaaataggatccctttattttgaggaaatatccccatggttgccctctggataggaggaggtagaaaggacttatccttgggtgagcttgggcttcaacccaaggatacaggaggtctaatagggaggtattatggactttcagagaggaacttgggttctggagggatgtaaaatagacttttcgtaggaaggagtttctgggcttggataaggaagtaggggaggagaaatagactttttggcagcagtcaaggtcacgagatggagtcagcacagtgggctccactggtaggtcccacgacatttactttttccctttttatttctttctctctcgattcttcctcttctctttctctctctctcgttcccttctctgatttctcctcctccacgcgagttccagagaagaaggtgcctgcggcggtgccgggcgcagcggttgcctggcgcggggcggcgcgccggggaggaagggagtagcgccggctgggaagaggaggccggggcgccagcggctcgggccgggtggcgcggcaagaggcggcacggcggcgctcggtgcggcggctttcggcgctcggtgcgcgacgtcacggccggcgtccgggcgcggtggcgcggaggagaggaggaggtagcggtgctgggagcagaggaggtggtggtggatgggggatggttcgcgcggcgacgacagaggtcgtcggggtggcgttctacccggagcggcggcgcgtgcaccgcgcggtgacggcgcggcgcggccgagcgcagcgcgcgagaggtcggcggccgaaaggaggtagcctcgtggcgggcgacgctcgtcccgatgcggcgatggcccggatcgaggcggtgatagcgacgaaggttgtggtggctcccttgttgggcggaggcaggggtggccgcaggaggtgcctgcgcggtcgtcgtggccgtgcgcggcaacttcaacagcagcgatcgagcgcggcgacggcctcgatgggtgcccgtccaggtggagatggaggcgggtggcagagaggggaaaaggggtggctggctgtggtggggagaaaacagcacgaagagaaggctgctcctggcgatggttttgcttgtaatgccaatggcttcgaggagaatgatcggcacagtggtggaagggcgatgtggcgcgcgtccataggttggacggcggcggcgcgggcccgggtgtcgacatcgacacagtggaggggaggtgcgaggcgggcggcgtgaacgcagctcacgcggacgctcgtctgcggccgatggagagcgaggatgcaaggcgtggacgaggagtagcgacgctcacgcgggcgacgtcctgggaggcggcgaagtgaccatcggtcacaaggcttccttggagcacgtgtcgtcggcggatgggttggacggcgataatgtgagccccgagtgtcgacatcgctacaagaaggaggcttacaaggtaagcttcgctgtaaactagctctccaattcggtgtgagctccgctctttctttcggcgtgaaccatcctcactgtgtcttcggtgtttgggggaggacttggtgaactgggagtttgcagatgaagagagacggacgtcctcatccagggaatgccagggcatggcttcggtgcacggcggggtgcgtgcgacgcacggggagggcgtgcctgcgaccggcgcggcgcacggccggggtttggtggctcggtgcaggagcgcaatgcggcgtggcacggctcgacgcgacgcggcgcacgcaatgaggaggagcagcgcggcacgacgcggtggctcgggggcctggtgcgccagccttgcccgactcggcattttgccgagcacgtggcgggcggcgtgtcagcctgctggcggaggcaaggaaggagggggagtagacttggctgcaagatggagggagagctggagagggagtaaagacagacttgtgctggggggtgagttgggctgaccggaaaaggaggcccaacagaatggggactttttgtatttgtaaggattggaattgggaagaattttgtatttagaatttgtagatgaactgtatatttggacatttggtttggctctgggttgaaaccttgaattgtggtttggagctgtaaatggaatgtttaatttgggtaattggattggattcaattcagccgttcaatcgcccaagtatttaacttaggttttgtcacatcctgattttcgtttcaggatttataaattatttaataaattattaatagaatttatattaaatgatctttaatttacaagtgaagttaaatgtgggaaataaaatttccttaatataaagcatggatggatttaatttttattaaattctccatgattaagtcaactctctgaaattttctcggatttttcagctctcaattcctaaatgatacaaagaacagttcagtaattatttgatcaataatgatctaattataattgttaagagcttttcttgtttaaaatccttaaattataaattgttgtttaaaaggaattattagaaatgattttaaaagcctaaaagagaagatctaattttaatttgttaaatctcaatataaaatggggccagataaaatttcattaaatactttgcttaattctataattcctagatttttctaggatttatttgagctaaggaagtatttttaatcaatggaattgcatttcatgaataattttaattgaaaaaggttttaaaagtcttcttttggctttgggccgaaagccggcccaaaacctctctctttccttttcttcctccccggccagtcggcccaagtcggcccagtccgcgccgccgctctcttctctctctcagtcgctgacaggtagggcccatctgtcggagccgtcttcctcgcgccgccgccgccgcccgaaaccctagccgagcgccgccgccgtctccttccaaaattcggtcgaccctttccttctccggccgaattgatagaggggaaacgatcctctcgatctcctcttccttttctcttttggaagcatcggctaattcggtttggaaactcgtggattcgaagtcgaatcggatccatctctctcctccgaaccccgttctttcctttccgtcgccggcagccgtgggccttcgccgtcaccctccaacccctttaaaaggacccccgagctctcctctacccgccgccaccttcgccttcgcctctcgtcgcccgtagcgctctagcgccgtgtgccctagcgccgccgtcgccgccgtcgttccagccgtgcgccgccgccgttccagtcatcgtcgtcgctcggggagatcgccgtcgtggtcgccaagtcgccgccgtcctcgtccgcctcttcgtcgccgccgaagaccgccggagcaccgtcgccgccgtcgacccgatctccgccgccgcttcttcctcgtcgccagcgtcgtccgttgcttctccgccgcttctttggttaccggtgagttcgccgcgtcgccctctacccgttggtgccctccgttcgcgtcgccgcgccgtcgttcgccggcgagcatgcgcgtccgagccgccgccgccggtggtgacgtcatcgccgacgtcatcgtccccatctcccgtgagccggtcgtggaccgttcgatctcggccgtccgttttggataggatcgatctcggccgtccgttcccgtgaaccgctgccgtgcacccggtccaccgcaaaccctagccgctgacgcaataatcctccttttccttttcaaaaataattcattattgcgtcataattcaattaaaatccatataagtgttttaatccgatttaatctttaaaaattcataactaattcatcttagctcagtttaatgtggttcaagttgcaaaaattatataaaataaagatctacatattaaaattgtccataaattgaattaaatttatttaattctttttaaatgggctttaattagatttaatcttgtaaaattcataataaattcatttgaagtcagaatgaggccgttcaagtctcataattcatctaaaatcatgatctacatgtttgtttactttttatgtattgtttatttgatttttattagtctttttcttcgttttgcgtgttagcttgtcgtttccgtcgttgcgaaggttcgcgagtgcgtcggaagtattcaagaagattaattgaagaccgattattgcaaggcaagtcacacagatcctaaacacaatcctttgagcatgttgatcctatatttaaattctctatttatttcaactgtgcatttattttcaaatgtcactgggtggtgtgaatctattcctttgttatggcctgtttgcattgattactttaatccttgataccttgggttattataacttgactagttgagctttatatattggttcagctagatattagatgtgattgcttagccatgcttagaaacattagcacactattgggataacatatgattcattattatttaatgatggtttaatgatggttcacgatggttaatcgtgatcggttaattaattacttgccaactaaaacttgataatggtgggttgtgagcacatggttttgagagtcgtgctcatgacaattaaggaccggttcgcgagctactattgtgaaacattaaccgtgccaaccacaagccagcgtgggcaacggctttaccttttgtataacatgattcattgcggagcaccagactgagaagtggcggagataagcccacgggggtcactggggagtccatgccttgttttataagggggtgattatgatccaggaatggtgcactgtggtgagttgtgttatgcagagggtattgtcacagcctctattcgggtactttccagtatcgcgacgcatggtagacatgatgttgaggctgtgtcttgtgggtacagtggtacacctctggccagagtaaaactattcgaatagccgtgcccgcggttatgggcgagttgagcaatgtttttcgtgattagtcccacacctcccacaataattatggatgttatacctggtaataatttgcttagctcctggtttggagttagatctgtacagccgggtatggttgttcaggatggttgggcctgtgcagcatgggtgtgctgttcagtgttgattaaaatttctgattaactactccactgttttatttcacttaaatgttttgctaaatgctgcttttgcaaatgagcctatattatgccatcctttggtatccttgtgcacttgcatatttgctgtgtggcttgctgagtatgtcatatgctcaccttgcaataatcaatcaacctcagttgaagaaaaaggatccagaaggagaagacgtttggcttataccccagttgagctgcctgtgggagtggagccggagcttcgctagattttattttccgctgcagttttcttcttggtgaggacttagtgcctcttaagtaagtatttatcgttttagttaatttgatgaatctgtatattaaattgtcaatttgtgtacctcggctgattcctggacgaggatttcatgcacaaataagttcggaaattactagtgaattttcgggcgtgacatttattaatgtgccaattaaaacttgataatggtgggttgtgggcacatggttttgatggtcgtgctcatgacaattaaggaccggttcacgagtttcggttgtgaaccattaaccgtaccaaccacaagccagagtaggcaacggctggacactttgtataacaaggctcattgtggtgtgccagactgagaagtggcggagataagcccacgggggtcgctggggagtccatgccttgttttataagggggtgattatgatccaggaacggtgcactgctttgagttgagttatgcgaggggtcttgtcacaatcactcgccatggtgacgtgtctgcgcggacacggtgacatgacggtgggttgtgtcttgtgggtacagtggtacacctctggccagagtaaaactattcgaatagccatgcccgcggttatgggcgggtcgaacaatgtctttcgtgattagtcccacaccacttattaataataatgtgataattgatggtaattaatttagcttctggtttggaatgtgtcggtgacatgggaccgggagtatcatgactagaggcttgagcaggagcaatcacccacgtggcctgaccccctcgggggggggtcgggcc

SEQ ID NO: 29305 - DNA, 18789 bp, Oryza sativa
gaaaaaaaagggaagagggttttagagtaagagctctctggctctccagctcttggtagcttcttcatacacagatccaccagaacacaggagtagggtattacgcttctcagcggcccgaacctgtatacatcgcccgtgtcttgtgttttttccattctcgcgaactttccacagactaggagcttagaatctcacccagggcccccggccgaaccggcaaaggggggcctgcgcggtctcccggtgaggagtaccacgctccgctatctggcgcgccaggtagggggctctgcgtgtgttttttccattctcgcgaactttccacagactaggagcttagaatctcacccagggcccccggccgaaccggcaaaggggggcctgcgcggtctcccggtgaggagtcccacgctccgtcatctggcgcgccaggtaggggtcgaacctacggccttctgcttaggggtccgtatcgagtgatcggcgtcccccggccgggctccgttcggctggccacgggcgacggcacagagctgcctaacccgtggaacattgagcaccttcgtcgcttctacccctaatggggttcgggtgtcaggttttgggctcgggccaaccccacacccccctcgggcgtgtagggttggccgggggctaccacatatgcatattttttcttctatctgtatttcaataaaagcattttcgatttcctaaaggctgtatctgtgctgttgtttccttttgaagaatcttgacttgaaataggtcactcgtgctcaatcctgccctcggaggctcgggtcggctaaaatcgccaaaaggggcccagaaccgagccgtgccccggggcgtggtgaactccgggggggaatcggcaaaaacccacaatcgggtcacccataaccctcggtcaccacgctcccggcctggccagtctcgacacgtggatctccccaggcactagccccgacccgcgccttttgaggaccgagacctgggcacgagcccttagtcaagctaagacacaaaaggaccacggcatagatcatcctcatctcatacacatagcaaaatgaaattgacacagaaatttctttattttgattgcagattaagttaatctatacaaaaaggaggcccgaaggccttggaagaaagaaaagaagaaaaaactgaagattggcgggggcctgggggctcactccgatgcacccgggttgccagcctcgtcgccactgtcgcccactccgccgtcatcgtcctcctcgtcggagttgagggcgaacgcgagccgaggggccgaaccctcgaagctgtggacgatatggttggcggcgtcccggacctgcgcgcgcgcgccgtcctcggtcccgggagggaactcgtccagcgctgtccagggggagaagtcggggtccctggcctggtaactcgccagtacgagctccaccgctcctcgggcgaggtccctcgaggatgacttaaccgtcccctcgagctccttggggagccgctggagagtcccggccatctccgagaggcgctgggcgaggcccccctggttggcggcgtacttcacagtccgcccgccccagagacccgcctgccgcccggcgcggtctaaacgggacacggcgtcgcgaagcatgctgggccctatctcgcctgccaggcgaagggcctcgacctccccggtggacgaattcagcgcgccctgcagatccgcgatggtgtgttcggcagctgcgaggcgggcggctaagtcgctgtcgcccgtggccgccctgccgctacgcgcccttgcatccagctcccttgcctgcgcctcgagttcagcggcccgctggttcagtgcggccctctcggcgcgggcaccttccagattgcgacgcgcttgttcctctagcgcagcctcacggagggacgcgctctccgccagcctttgcgccgcggcctcagcctcctcgagggctcgctcccgctcgatgagcgcatcttcgcggaggcggagtgcggactcctcttcggcgcagacggcttcgtgcgccgccagtgtgacctcccgaatggcaacggcggcctcgcggtccgccagatcccttaccatgacgcaggaacgctcttccagcgccatggcacgggcctcgagggtttcttcacgctgccgggatgccacctcggtctccgccgcccgccgttctcgggcagcggcagcgtcaaggaccccccgggcggcgtcgagcttcttccctagctccgcctcccagctcccgtattgaaggcggaggtcgtcctgcgcctcgttcatcacggtagtggcgatgagggcagccccccgctactcctccacctccttggcgatctcccccagcaccttccgacgggcttcgagctctgagacgtgccggcggtgtgccttgcggcccacctccaccatggcctccactgagcgtcgcccctcttcgacacgcgcccatgcgacgtcgagctccgcccgctctgcttgcagggcctccatctgggcacttaacccgtccaacaccgtggtgtttgcgacggccaaggcctgcagaaggggctctgcgctcagtggggcagcggaaggcgtggggaagagccgcctcggtgaggatgccgcgcggctcggcccgccgatggatgtgccggactcggggacgtcccccggacctggcttgtcctgagcgtcgcccgagggagtgggcccaagcgatgcgcccgcggcctcgtcgcgagctgcctcggaagtcgtcgtcgcctcggcctggcgaagtctggcctcctcctgagcggcttcttcagcttggcgagctcggacggccacctgggcagcttcctcggcttcctgaaggcgatccgcggcttcttgccggtcagtttcgcgggttgcctcggaggatgtcgtcgcctcggcctggcggagtctggcctcctcccgagcggcttcctcagcctggcgagcccgggcggcctcccgggcggcctcctcggcttcccgtaggcgatccgcggcttctcgccggtcagattcccgcctctaggcctccgtggtcgccgcattctcggcctcagattggccggacttggattggcaagaaggacgcgacgggatctcgctgaagcagaagaaaagccagaagacaaacaagatgggtgaataaaaactcgcgttgggagaatgaatatagccacaatgggcgtgggacgaacctgcgaaggggtcggttaaacgaccaccttcgaggggaaataaggtttccccgggatggttctgtcccccccatcttgtggagccgtttcttcttccgctccccctcgggctgcggcgtcggcgtggccccctccgggcgcctgctgctgacacgcgccgccccgccccctcggggaggagatggggaggaggtaccctcttgcttcctcttccctcgggcgtcggcagggcggctgccccccgagccctcatcacggggcccggaagcacgaccccctcctagggtagattgatctcccttgcggctcccgctcgcaccgtcatggcccttgggagctctctcctctgaggccccgaccgtcatcatgatggtcaggatgttggcgcgatctggatcgctgcagagggggaggactccttgggggatgagggatgcctccacggagctgagatttagcacccgttggatcattaccttgaagtcttcagggacccagtcccatttgaccccccggtgggtcctcatacagtcctcgaacccggtgtactcccaggcgccccgggcgcgccgcttgagtggcgcgatccggcgacgaaggtagtcgccgtacaccatggcccctgtgagcccctgggatcgcaggcccgccaggcggtcgaggacggcgtcgtagccatctcccagatctaccggcgcccgccagttggaggcctgcgctgggggctggctcggaagtcggaggcgcgcttcgtcggcgaggggggtgtagaaccagtcgctcttccagtcgtcccacttcttgcggaggacgcagggaatgtagcggttcagcaccggcccccgcggctggaagtagcagccaccaaccaccgacggcggtgacaccggctgtacggtgaagaaccaccggaacagccgaagggatgggcgcaccccgatgaacatctcgcacaggttcgcgaagatggccaatgtcattaccgcgttgggggtgaggtgcgccatctggagatcgtaaaactccagaacatccatgaagaaagaagaaaatggcggaaccagccctgccattgcgaaagggaggaagaagacggaccgccccgggtagcgtggcgccgggcgtccctcgcccagcgtgactatctcccggcgggtggcagattccggcatgaagcggcgcggcagcccggcctgtctctcgctcacgatgcgggaaggcggcagcacgctaccgtcaagcggagcggagccccgtgccatgacgccggaagaagagatgtttgagagcgagcgcgtgtggcgaaggtagggcacaggaaagaaggagttagggcgcaagcggcgaagacaaggggaataatggcgaaaggaaggaagcaaatctcttccttagcgtctttatacccttgccaacgctgtgcccggttcctcgcttcccgcgcccactatctcgccccctcgcttcccgcgcccacgcttccactaatcccactcgcccgtttgcggcgcacgaggtggatatgcggttgtggcggtcgagatggtacatatcgtgcgcgcattaattacgctcgccgaccgaagcgccatcaccatatctccaggcaaaacgaaccggctcgtcccgattcgcgtgctactcgagtaatatggcagtcttgaagagaccgctcattattgacagccgagttaccattgccgatgtgcgcgatttgcgactgctgggtttctgcccaactgtggagaccagccccacctgtcaccaggccttagaaagtggcgtcacgcccgaccgcttccctcgaggagggcgatcgccctggcataacgccgggggctactgtcggtgacatgggatcgggagtatcatgactagaggcttgagcaggagcaatcacccacgtggcctgaccccctcggggggggggggggccgggcccgagggtgatgtggccgcccccctctttgtctccccgaggggtcggaccgctcccgtttcggccccgagggctgaggcgccccgaccccttgtgggttttgcgccgcgtgtatgggttaggtgagcacaacggggctcacctaaccgcatttattgcggtttggacgagcgcgtcacgccgcatgtaacgcagtgcagcgcgctcgtctatccggtctgtgacagaccggtcagattgtgggttaggtggcaacaggcggtctgacacacgcctcgccccatcccgtcaggatgagagcctccaagcactcgtccctagccggagccggcgtgttagctcctggagatggcacgttggtcccggttagatatatgccaggcttcatcccaaccattacaagtaaaatattgtatgaagaagggcgaacatgcagatcgataaactgacacgtggtgggcaagaatgaccgatttgtgaccggtctgacaccggtcatgtcgtaggcagacagccatgttcccacgtcgcacctgcttccggcggaagtggaggtaggtatgggccgtcccatcagaaggtcattcggacggcaaccattgcatgtctccgcccatttatgaagaggtgacagggtgatccccgaggtcagatgagtaaggacgcgtggccacactcaaaaacaagcagtgtttttagctttctagagaaggcaagccaagtttgagtaaagataggataagtccccaccaaaaagagagataggtagaggtggtgcatgtggtatccccttgagatataaaaggaggaccttgcccacggaaaaaaggaggactggaaggagagaggatctggagagtagatcccaggagaggaaaaaaaagggaagagggtttctagagtaagagctctctagctctccagctcttggtagcttcttcatacacagatccaccagaacacaggagtagggtattacgcttctcaacggcccgaacctgtatacatcgcccgtgtcttgtgttttttccattctcgcgaactttccacagactaggagcttagaatctcacccagggcccccggccgaaccggcaaaggggggcctgcgcggtctcccggtgaggagtcccacgctccgtcagaatggtacattcctggtttggagataaatctgtgcagccgggtatggttgttcaggatggttgggcctgagcagcatgggtgtgctgttcagtgttgattaatattaatgattaattattctactgttttataattctcaaatatttgctaaatgctgcttttgcaaatgagccctatattatgccattctttggtatccttgtacacttgcatatttgctgcggggcttgctgagtatgtcatatgctcaccttgcaataatcaattaaacctcagttgaagacaagttgcgaaggagaagacgtttggcttataccccagttgagctgcctgtgggagtagagccggagcttcgctagaccgtaattccgctgctgttttctcttttcttttgtaagtatgtaacgttattatattgatgaatctatatattaaattgtcagtttgtgtacctcggctgattcctggacgaggatttaatgtacaaattagttcggaaattactagtgaatttccgggcgtgataaacatgagtagggttattcattattactcggatcgggggactgaacctatattacaaaaatccttgtcgtatactctctttattccatattcgcgcataccttggtattagccacaaactatgtcccaaaatatcatggtcaagtataacccattgatagttagatggacccaaccagaggaacggtaaggattataatgtgccatcaatttttctcaagtagtattggctccttacacctaagattgttacggttctcagggttgctactatgtaattgggtaattttttatgaagaatagaagagactcctactgcaatatatatttacaagaaaactacaaagaggcagaatttacaataaagttaatctaaagattgtatccatgattatcacattgctctatgatcctcctctaccctgtgcatctgtagggtaaactccttgttgaatccattcttccaagcttgccatgttaggttaatgtcgaagataaagctatttttttcttatccatatatttccaagaagcaatagtaacggcttctgtgaagaaagggaatgcaaattggttgccagcatcgggggtgccacgcaggggagggagggggagggtcggtactatcatcattcgtgttgacccattgaacctcaatgccgatggggctggcgccgaaaaagtgtccactcctagaataaatttttccataggtctatttgtaaaaaaaagtttcaaaaggccattttaccttggagagcaaaatggctggttgtagtcggcagctaataggaaaggttttctcctagtgtagattcattgtgacgtggtgtaaggtttacgatttgacaacctccccttcttggatgaaactgctaattgacaacccaccacacacggctagtctcgcgcgatcggtcccacgcctactgcttttagcctatcggaattttcttttttttcctatacatataaagtttgtatggctacacgtacaaactttttttacgtctaaagtgtgcgcgtacgcgttcaatgtttatactataattttatatacatacatatatacatagaaataaaaaaatatatgtatttatacatatagatacatatttttttaatacaaatataaagttgtatacttatatgtataaagcttttgaacatactagggcccataccgactacgctttagtccccccccctctccctactaggagaccgtggtatttagggatgtagggtatggtcgatatcaaggtatatatgagtatagaataaaaagagtaatggactaggatttttatacatgttcacactccctaatgtcgtaatagtcatactcatgtttatacatattgacctggggcatattacacttagtaaaaaaaggagcagactagctaatctagcctactgttcgtactgatgaatccgcaaacgcactgatatcgctgtatcacttcaccttagagcactccaagggtattgaatcacaggtaatatgtgcactccaagggtattgaatcacaggtaatatgtatatatatctaataacatgattctatccaaggacaacaactaatggtaggcttagaggattcttatgggttaatttattagacttaagtaaaatttgctatatggcatccaaaaaatgtgtaattagctgctggacaccgcaagaacgcgaatatgctatcgagcaccacaaaaactagtaattagctgttggacattcgcgaccttattttattatttccggaggaattggagaaaaaaacttatgtaagagtacaattttgcccctgccttcattccgcttacagagcgggcgctttgcatttgcgtcccaccggccactgctccccacgcttctccgctctgccaccatggccgagtcgatcgtctctggcctcctgatcacggcttccgccgtcgcgcgtcctcacagcagccacagccttccccatggctcctgcgcgacgcgtgtcccccaactccagcgcgacaggctgtgcgtccggcccacggtggatgaggacgaggcgatgagcatcgacaacctccgcctttttcgacgtcaacgtcgacaagtggaatggagccttctacgtgcgctcgccttcctgttcctgtgttcgtaatctgcacactgagacgctgactgtgcttgtgttctgctcatcagcatattgatgcgcatgggattagcacgcggctgtcagtgagcacctatatatggcgaggacgacctcatcaacctcctgcagtcgtataatattcaattaacacatttagcccttttcccagtcttacttcaagtattccacgtttacaacatcttctttaccattactagtaatcaagttcagtattttggccgtttgattgtgcccattgttcctaacgatgtgtttacatattgtgaatttccaggttgtatatcaagcaagcttcttctcagatatcaattgtagatgaggaggattctgaaccagagtgggcagagtacaaaatcaaagagacaaacatgttcacagtagataactatcaacagctgcactgaagtttgatgatctcttggcctcttcagacatttttttaaaaaaaaattgtgtatttctgagtatttttaacgagtggtgttttttagtatacagatcggattctttcatgatgagaaggcatttactgtgatgggatcgatatagtgcgattagccttgtggttggtttgcaccggatccagtcagattgaactatattgagtgtttctctctccaatttcttcgaaaataataaaataagttggattgaaataagttcgatcacaggcaaacttgtctttattgagtgtttctctcttcaattccttcgaaaataataaaataagactgcgagtgtccaacagctaattaccagttttttgtgattccgatagcatattcgtgttcttgcgatgtccaccagctaatcacacgttttttgaatgccatgagtaaccaatactcgatttgatttggatatgtactcggacactgcacgttggaattgtatccaaggtggcctattgggccaagtccgtatggagaagcaaggcaatcgtggacagccatccaatggccaatgtgcaaccgcacatgcgaggcacaatcttgcctaggagctgacatatccaccaatcacagatagcacactaccttcctggtacgtggcgtgaagcctaggcaaccagtcgtcttacccaggaggtagatccacccctgacttaggagtaataagagatagaaaaagaaactaaacatattcattgttggatagagatcacgagaaaggtagtggcagaggacgaaaaaaatagcgaaaatcttctctctcccctcaactactcctggcgagcagctaggagttgagctttgatttcgagtcttcgacctcgccggccattatattccttgctatgtaaccaggatgccgaaggttggcatctcaatctcaatcatcactgccatctccccgttagatctggccacattgagctcaggggtgcctgattctttttttttttttttgggggggggggggagtgggggacaccaggcatgagggaagttgcaagctcggtctcggcttcctcgccggtggacggcggtgcaacgagctccacctcaacttcgtcagcaacgatagcagggatgatggtgtacgagatgtggatacaacttcttcatggcgtacaggtaaacaaaattgccaaagggtagggggcttcttggcgccgatatggtggtctaaactcaaagaggaggaagaagtgtatcgttctgtgattttttttttatgttttagcgcagtgtatctagggctgtcaacgagccaacctcgagcgagcttgcttgtctgagctcgagctcggtatagactcaggtcgagctcgagccgagccttgtcaagtctgagttttcagtcgggctcatactcggctcattcgaccttcgagctttttctcgagcttggagtatgtacatccactacaccatgccccaagtttgcttactacatatctgtcaggaaaggacctatatgctgtcaaattatttgttagcataagttttcccgacagatagggtctgtcaggccaagtgctgccggcaaaggtcttttccgacagataaatgtttgctgacagataactcgacagtcctacaaatgaattaccgacagacggaagttaccgacagatggtcctttaccgacagttaacggattactgacagatacgcagtttgcatatatcagtttttctgacagatattctgttagtgtgccctgcattgggttaaaaaaaatatagttcatggaatcaaatcctactgatctagaactgaatataccaccaacagttctcatgcatccacattccattagtactgaatataccaattccatttaattacaaatgccatgtacataggttagttgtacaaaaagagaaattctcctatacaatctacaaaatgagacaaaacgatggcaaatctacaacaggcaaggcatttcccttgtagagaaatgccactccaaaatatcttgtgaccgccatgataagttgagcatctaaaaacttgaatcagattatcagaaagacaaaagtattaagggtcagatatatagattataataatactccattcaatgttaagtaatctatgcaacacctactatttcaatacagaattgaagatcagtgtcaaatgtgcaggataagtgtcaataacataactgatgtagttccatttaattcaatctgtagcatagcttcgatattctcacaatccaccaatattaaattaccagttccattttatgagaaatttatgttgaagcagtataattgcaatcgtaacagattcaattacaatttacaagcagcaaggattgcaatttatctcacaaactatgggaacaaactgattttagcttacatgatgtatgagcctttaagttagtgttgatcttctgttccttcaggtacccttctctgacacttcagcaagaagttgattgctcacccacaggtcgcaaatcatagctagtaaataaataaaaagaagataagtgctgaagtacagtttaattggctcccacttgcaaatgttaacttatattagaattgagatgtatgtaggtgacattttcataattaatgtagatggaaaatctgaagcccgaagactgtttcaaatttgtactacgacaactcactgcaaggacagctagccacctaatttgcagagatcaactaagggagttttatttaaaataattatactaggatggtacattctacaagtaaaaactcagtaaacacacaatgtacatgcatatttctaataaatggattgatataagttggaaatggcttcactagtaaatagaacttggcttgagtagttgctgtactatgtggtgcatgcaaagttctcaattagcatttcaattattccaactggtcctgatagctgatgcatgtctgtgtgaaatcaataatagatcaaatcttaaaaaaaaatgttcaccactctttctagtacatatataataatgtctgccatgaaatgaaaaggaaatggagcaaacataatctccaatttattgaatagtgcatcatatagaagattagcacttaattgttaataccattgaagttcttgtaatggaaaagtaagcggaaatctaaaaatatgaacaattatccgtttttcaatttgatacattagatcagacagaaaatgtccataatgtggtacactacatgagaaatagtgcattttcttagtactaccacatttctgtaaacattacagctaacttcatgagaaatataaagcagaactggagcattagctaagattcatggggaaaagagacaagtaggttcaccctaaactcttttgcaccagtattaagcatggttgcaatgcaagtttccatcccatggctatgaatgacagccccagctctcatcaaataagcctgcaaaataccaatgaaaattagacagtttagaacacactagccgaatgtgcgctctttctcttttggcaaccatgattggacaatcaataaatgagaattctataaaagctcctaatcaacaccactcccgaatacggtatgctcgatcctaacagaagacacgagagtagccactgctcgattaaccgctcgtgagggggaatcgagtgcccctcgcaggcaattcgtcgaacaggagccgtgcaggctgtgatgagagagagagaggggggggggaccttgggtgcccagaggcggtcgtcggcggcgacccagcgccaggtgctgcgtgcgtccaggagctccatcacccgccccatcacctcctccccgagcacatccacggggtcctctcgtctctgccgcctcctcctcctcctccccctcttccgcctctcccactcctccgcctcccgcttccgccgccgccgccgcccgcgccttggttgccgatgacgtcgcctgcaccttgctcaccgccgccgccgtcgcccgcaccttgctcgccgccgccgcccgcgccttggccgccgatgccgtcgccttgccgccgccggaggaagcgtgagtgcgtgacggctgggtagggaagaaaaggataaggttgtggggaaattagggtttggtttatatatgataggctagatgggctttttgggcttgcaatatagtattattaatagtctaatatacaccctctaagttttgctgacatataattagctcgtactcttacaattactgacagatattttgaccaaaaatatatttagaattactgacatataccatgtctcattatgcactattgctgacatatagtttgccaaaaacctttaccgacagatatgttatcactaattgtttatttttgccaacagatgtctgttggtaattccatgtcatggtgtagtgatcatgcgagcttgtactattactaacaagcacattacagcatgcaagcttgtactactagcaccaggtagacaatatgtgagagcttgtactactagcatatgggaaaaacaattcactgatagagattgtcacacccagaaattctcgaaccagaatttctaagctgaatgtgcattaaatccctgtccaggaccagccagggtacacaaacgataattgttgacatacagacccacatcttacaaaaatataaaagattacaaatgcagcgggaaagataaaagcgagctaaaccgggaagcttgacttcaacagcggacgactccactccacaggcaaaccttgacggcagcgacgaaaccaacctctctgagacagctccaactgagaagaacttcaactctggtatgggggaaaagagagcaagactgagtactacccactgtactcagcaagtcataccggaagaggaggtatgatgcaggatataaccaaaggaagctaggggttcttttgcataaagcaggcatttcaaagcagtagttgaaagcagtaaaacagctgtagtaattaatcaatattaaccaatcactgtccaacgctacaccacgttgcaacaggcccaaccaaccacctgaactacaccagttcattaagctaaactaggggtgagactaatcacggtgaatctggttgatcgcccataaccgcgggcacggctattcgaatagttttactctggccagaggtgtacaactgtacccacaagacacgattccacacatgtcgccatgccccgaagtatcaccatgatactgcaaagggggaaatcgtgacaagaccctccacataaccctcccataaccatccacaccacgctaaggtttcacccccacccctcaaaaggcagtgggcggtcccctcttgcaccgcggtgaatccggcagctggacaaccgaacacctcggccgacccaactccatcacgcccaccctcgccaccggtgcctaggaaagggtcgagctatacttcagatcaagtagttacccactcccgcttgtggtaagcacggtaagtctcccagggtttcccgtgaaccggtccttaactgctatgggtgcgaccagcaaaaccatgcactcacagcccgccattcagaatattttaattaactgacacccttgcggtagcaccaatctaaagctatgccaatagtcagagtctatgtaataatgtgatccctttttgtgtactagttgagctaagcatggctaagcatttcctaaaccaacatctaatcattttgatacccaggttatcaatggcatatggtaaacaataaatggctaagtaataggacccatcccacatgacattgtaaaagaatgcaacatttaatagaaatgcagggtgtttgtaaattgggtacaatatgatcaaacgtatggcatgacttgccttgctctcgaactgatgagacctcagcaacgtctttgagaaactgcggatcgacgaaacggccgaaacctacgcgacaaacagagcacacaagcaaaacatgctataagactactgaaacaggaaacaaaaccatttttaatggattctttgcatttttcttgatttactgagacttgaatggacttaaacggagctcggatgaattacttatgtattttagaagataaactgtgtttttactaataaagaaaaagtccttaattaattattgcgcaataatacccagggctgacgtcatccagggggcggcgccgacaggcggggcccacgggtcagcggctcaaaggggagaggaagggggcgccggcatataggccccacgggcagtggctcaaggtggccggtctaccgtggaccgggaccacgcgggtggtccaccgccggtccacgggaccgacggtccggatcagccgggaggccgatcggacggcacggcggcggctaggcacggctcggctcggcttcaaaaccggccggccggccatggcaaccggcggcgacgcgcacggtcgccggcgacggcaatcggcggcgcgggaagcgacggcggacggggtacaggacggcggcgtcgaccgaaggcgacggcgagcgcgtggagagaggcgacgcaaacgagagagagggggaagagggaggaggggggatcctcaccggcgagtatggcggccggagcggaggatgaaggtggcggcgacgacctggcgatgaggaggggcggacgggcggcggcggcacctacggagggagttgagaaggattaggagtaaagagggtgaccacggcggccaccattgttggccggagacgaaggagaatggatagctcaccggtgtgcgaggagaaccgggctccggtggggtttagcggaaaccgagcggcggccgaggtggctcacgcggcggcaatgctaatggcggcggcggcttggcgcggcggcggctctagcggctgcggcgcgcgaccggaggtggcggccagcggcggcgctagtggcgagcggcgcggcggcggtaggaggcacgggaaagcgcggcgaaaaggggaaaagggagagggagatgcggggaagctttataggggctcgagaggggcggacatggccgggaaaccccccgatttggccggcgacgtggggagagagagagagagagagagtgggggggattcaaatcgaatcccgcccatttgcgggcgcgcgtgcggacgggaatggcggggagggcggcgacgtggggacgcggagtgggggcgcggcgtggagcggagaaggcggcggcgcggacggtttcggcggcggttgccgtcgtggggcgggcggctggaggaaggggacgacctgacaggtgggccccacctgtcagcgtcccggagagaggggaaaggggaacgggccggcccaaaggaaggaggccgagcgcgggagggagtgggctgacggcccaatagagaaaaaagaaggaaaagaaaaagaaaaagaagaaaggatttttcctgggatttaaaattgcactttggtgatttttaattggttaaaattatttccaaggctctaaaaattccactaaaaatcttggtaatgcattggagcatggggaactcaagaaaaattccaccacgctatttccgattattaattgcatttattaactagggatttagctctaggttaattaagataatttcttcgggcaatttatttaaccaatttttaaagcaagaaaaaggggaaacttctgggcgtgacagagatgctcacgaatctatcatgcagctctttattggggagtgtgctagtgctggagtactactacttgttggtctttgaagaagtacgggcttgctgctagcccgtggtgcatagataaagaataaaagaagtcaaacatactactcgttgagctgtaggtgagcagctgagctcgtcgagcttttcgagctcggttcgatggggctcgcgagccttagtgcaagctcgggcttggcttgtatgatggtcgaatcgagctcgagccgagcctaagacgagccgagttcgagtagcttgcgagccccgagcttttttgacagccctaagtgtatcggtatgttttattagttagacacaaaatgttgcagtgcccttttgatgatgttttcattcttgccttcagtgtgttcagatgtgttgatgctttggtagttcaaaattgatgtttcatatgtaacaaaatgtttcaattatgtttcaccatttgaattgtcgaaacatttttgttcgagatctgaaacatttttgttcaagggatgaaactcttttatctcattggtgaaactttttttatcgagtggtgcaacatgtgaaacacttcataataatacagtgcaacatcgtccgatgatttataaaatattggacatctgatttgtagcactctccaaaaaaaaaatagaggtgtggccatagactaaggagatgctttagcgccagtttgccatcgatgccatgaaactcatagcaactaaaatctctagccaagtcagcagtggatgccatggcagaagtcgatcaagagctcggacaaaccgtatgcagctgcacatctacgtccttcacctgcgcctctattggccacagtgtcgtatgcccgcgccgcctacacccgttgcatgctcaccattgccactagctttcccatcggtaatcaagattggtgttgatagtcgttatcgaccaatttcgaccgtcaatattacccaatatatgaagactagctatgcttgcaatgcataatttccaaataaaatatctacttccactatatactatgctattaacatctatgtaggagaagcacatataaatggaggagaatcgacaacaaaatagacgatcaatcaatcagaggctgtcgagatctagacttacggatgaataggccaagaacacataattgacatgatctaataggcccaaaattcactgttatgtataagggaggagctaagagggccacctgccaaaaatgggccaaaatggtctagcacatggttcggccgaacccctctaagcgccgatggatccagggtttcttgtggacggtggagattcactccctatgacggttggagggcgtttcggacctttccaactatcataactgtcataagtgttggtatttcttaacgacattactagaaatataattcccagtaatgacgcagaaatacttctggtatattatggttacagtgttcatccgcaagcgcacggatataccattgtaacatttcacccgagagtattccaagggtatcgtatttattttatctcgtgggaagatcatatagagagaacttgactaataatttatatattacttgtgataatcatattctaagcaggggttaagataatccaagggtagagtgacacacaagcat

SEQ ID NO: 29306 - DNA, 8915 bp, Oryza sativa
tatccgatgtcctcctggtacttcgagaagccaccctgactgccgagttcctaacgacaacccgtcatgaccatacaaccggggctaaatacggaggaataaacaccccagggaattaacttaggattatataccggcgcggaggaatacccgtactgagctgtcaccatcagcggcccacctctcatccgctatatataaccccaaataatgatatcccgtaatctagacaccacgtctaaactactagatactactctaatatcatcgtcatgacatatagtaattgcatatgcaaacattatacccgcaccaaagcatctcccagataagctagccgtatattcagtataacatgaacataatgtaaagtaggcattcatatactcggaaagtatttcaataccataaatgcatatagaagagtattctaataaaagtacaaagcttacaaaagagaagagaaaagctactagagccatacccgaactcttccgaaggcttccggactcctgatttatactctattcctattccaccagctagatactactaaactaaacttgagagaaatgagagagctattgcttgaggtgtgtgtgtgaagtgagaagaggagctccttttataggcaggtaatgatagttgtgacggttggaatggtcggtaataccctccaaccgtcattggggatcaatcccagccgtccatccaaaccctgcatccatcggcgccacgggaagttcggtcgaaccatggactggcccaacccagcctatcttcggctggcggcctcctttgttgtccttctctgtagacttgtgaattttggctcaatgtgtcgtgttatttctgagttcttagcccattcatacataagtctggttctcgacaccgtctgattgatttatcgtctgagttgatgtcgattctcctccactttattgtcattctctgcaaaagattagtatacctaatactagtggaatattattattctaatagatatatgcaatgcaagcatcactagttctcctctattttagtaatattgacggtcaaaattgatcgataacgatagtcaacaataagctgcctatttaaggagctcccctcactccctccaacacacactcaagcaaggatcaaatctctctacaaagctagtattagtgttagtggagtagagttagaatagttccaagtccgcggaggcttcgggagttcggtaaagttctgtagcttttcctttctactttgtaagacttccatttatcaatattatgttcttctttatataatttcggtgttttattccaatcatagaatatgagtaccagtcttagtttattcatgagtattataatctgtggttaaactttctgggatttgcattgatgctggtataatgtctaactactaggtcattagtttgcttaggctaagccaagagctatggtttcagggcttagttgcttctacactgattgcaagactgtaagtagtaagtagtaatttaagcatggagcttaggttaccgcttatcattattttggagtatatgctctgggtgatttgtaggccgctgatggtgacagctcagtacgggtgtcttccccgcagtttatatccctacatacaatttcctggggttggatactcctccgtatcccgctttggttggatggctatgacaggttgtcgtaaggaactcggcaaaccgggatagtcttgcgatgcatcgggagggcaagcttagctatgttgcattgttaaaggggttataatacatagtgtatactagttagaatatactaagatgttgtatactagaagtacaggaatagaacgtatctaaactactaccccttagccataattatgagatgtagaaattagctaaattagctgtgtgtcactctacccttaagcttacttacccctcatagatcttgatgtatacaagtaatatataaactattagcatagtactctcttatcatatcttccgttgggattaaacaaatatgataccttggaatactcctgggtgcaatgctacaatggtatatccgtgcacttgcagatcacatctgtaaccataatataccaggattatttctagtgctattgctgggaattatatttccagtagtgtcgctaagaaataccaacaagcatttatgggctctcctgaggagggagaacaggagaattccaaggtatcatatttgtttaattccaagtgaagatatgacaagagagtactatgctaatattttatatattacttgtagacatcaattgggattttagaaggcagagagctagggttcatcaggtccacaagtccacaactaataaataccactacaagagatcttatgatagatgacacttcatttacgtcacaaacattgaatttttcgtcacattttgtaatctgtgacgctcgcatgacgaaaattcattcgtcacctataaggtgtctctaatggcgttctatgacgaaaccttatttttttcatcattaatctagtgacgatccttccgtcgtcataactttatgacgctcaaattcgtcattatctagctaaaaaacgtcataaaatatctaatagcccattaagatccatgtattgagcaccctgtttatgggcttagcccaatggcaagcccgactagattttagcctagcccatctacgatgtagcatattttcagcccaattctattatatctattttctttaatatcaaataataaatgggccaagtacattgcaaaagcccatataggcccaaacattataccacactattttcagcctaatcatattatattcatttacattagtatcaaataacaagtgggctaagcccatataggcccaacaatcaaacacaataacaacccatatagcacaaaggtaacaacccaattagcatcaaacatccaatacaacacaaaatttacaacctagttaacagccaaatccagtcatgttccaaatacaatcacaggttcactgagttactaagtacatgtaactatcctagcaaaataaacaagttacagtcacattcactaacaaaacaagtcgcatgtctgaatcacaccaatcaaaagatattgccctctcatcatgaatcagcaagtcgacatgaaaagggcagacaaacctgcatggcatgatatgcagaagaaataacaagtggaacttgttgcatattgagcacaaaggaatagttatgaaacatggtacaaatgactaatagtattgaaacattgcacataccttatcaaggacgccttgttcaatgtcatcattaccttcaagagttggcaaaagaattgatcatgagcatacagagaatggtaattgctttgatttttttttagaaaaaacagattttctatacctcttcatctaaatcaagatagagctcatcaccatcttcagtcttcagcatccacctaccatctagcgccctggggaaaatgagcagcaaagaaaataaagcaacataaatttatgtagaaagtactttcctcatgacaaacggaacaaggtagcagtctgtactcagcagcctcaggtgacatccactgtcctcagcagttatagagtttgtttttaaacacagataaagtaatccagaacgtatttaagccatcgcaaagattctgttttagttcctgactgaattaaatttcaatagtattctgtttcataataaccaatctggttttcaagcagatgcaacataacaagttaatctaagaggaatcaaaatcaaaatgtaagatataactccagagaaaagtaagcacctcaagttttcaaattatagtagttactgctgtataggaacaacaaaacaaaacattacctagctgtgccatactgcatcaagtgcccaggaatgcttatatcactgaagaaatcaagtgaaactgccaaacagatgtagccatatcagctcaaccaattgtttgtgaatgcagcttttcctactaactagtaccagaagaggaaggggccatttgtaacttctatacacatgtgaggcacaattagtccaacagtaaagaacaggaattagtgcttgtcaaagataaaatttatatattcagtttaacagaatactatgttgaaaataaataaccatagttcagcattaccctccagatatttagctagcaatgatttgtgtaccccaacaaaagtaatcactctaatgcaattgaggatattgattccaggttagtaatcaggtctacagggacaaagaaacatactaggatattaaccagcgccaaacttcagttaaatagacctttctcgacagttgcaagatgccaacacacagaaaactcagcccggcgcaaaaaaataataaaaaaaaagtaaacagagaaaactcaattaatcattttgcaatctactttttttttagcaagaagggcagatcccctcccatttccattaaagaaaccagcacaaccactacacccagaacaactataggataagtatataagctgagaagacctgataaggcaattccatccccattggcacccctgaactagcctaagcaacaatccagtaaagttccagcaaaactactgctaatgaacagagatgacgcaatctattgcaaattgcatcagaaacagccctacagaagcgaaactcgaaatatctacacagcccaagtataatcaagaaaagaaacctttaggcaccgccagtaaccacagaccaaagatcagttcagtcagactcacggtcgcaccgcagctacttagctaattaagacgatacacgcataacatagtaacacatagagatggagattccgttagcagtagggttgtttggtctgctggtggcagccacggcgccggcagatccaccgctcccacacccggcagtgatggaaacggaggtcggcgcggcaagcggcgaggggcgagcaagccggcgcggtgagcggcgacggagaagaccgccgctgcaggccgtcgacgctgccgcacggtgtcgccgagccgcccgaggactgccgccgctggccgtcgacgcagccgcacgccgtcgcaagccgcccgaggaccgccgccgcgcgatctggccgccctagtgtcgaaaccagatttcggcaatattaaaaggggtggctatcaaactgaaaaaatagatgggtttagagacaagaaattttatacaggttcaggccttcttaatcaaagaagtaataccctactcctgtccgaggattgatccgccgagtatattattgatcgtatgatctgggtgaaaatcgtgcccctagaggcacccagacccctccttatataagggaaggggtccgtattacaaaatacagtccatatccctaacggaatatgtagttacagataaaatacaatcgtaactgactagaatctcaagtattccttgacatacaagtttggaatttaacccgagtcctcttaaagatattctatctatacatggcaccctataccctgtcggactatacatgacgtgtaggtatggggtatccataatctccacagtagcctctgagacctttacagtcaacgaaatagtctcttctcgtagcacaaaatgataatccgagtgcttcaatttcttctgcattgatctcctgagtaccaaaatcaaagactatttggctagaaatattcaggactgtttggcttggtcttttgaatatctgcatcagtgccaacattctaagagggaaatagttcttttaaaattggattttgagaaagcttttgatactattgaacattcagttatattaaacatcatgaggcagaaaggcttagatcctaaatggataagctggatttctcagattttttcttcagcctcttcttcagttatcctgaatggtgttcctggcaaatccttctattgcaaaaggggtgtaagacagggtgatccactttcacccttattatttgttcttggagctgacttgttacaatctatagtcaataaagcttgttctcagtgagtttttacaatgccaatcccaacacctggtaatgaatttccgattgtccagtatgcagatgatactctacttttttttgactgcttccaaaaagagcttttctgtctcaaggcaattttgaatacttttgcctcttcaactggccttaagattaactatagtaagtcatgcatgattcctctgaatgtagatttggaaaaggttgatcatctctcaaaattgtttggttgctctattggtaagttaccttttacttatctgtgtcttcctcttggaaccacaagaccaagagttatagattttgctcctctagttgatagagtagagagaagactctcatcaaccactgctttgttatcttatggggacagattgaccattgtgaatgcagttctttcctcccttcccacttactacatgtgctctctttcacttccaaagacagttatagaaagtattgatagagctaggagacattgcctgtggaggggatctgatattaattctagtaagaagtctttggttctctgggcaaaagtttaatagaccttagattgcaaaataattcccttctcttgaagaatctgcataagttctataatagatatcctgttccctgggtcagtttgatttggaatacttactacactgcagaacctcctcatgctgttactcctaaaggatctttttggtggagggatgttttacaatttgtggatatttttagaggcatctcggcctgtactgtgcaagatggaaaatcttgtttgttttgggaagatttgtggaacaataaagtcagggccttggtttatcccaaaatatattcttttgccaggaattcaaatctctcagttatgatgttctctacttctgatctacctcagctctttgccttgccactttcagagcaagcttttcaggaatatttggcaatgtcagctgcagataccttggagcatcttaatgatgagagtgatcgctggacatatgtttggggcaatggtatcttttcctcacagaaaatttatgccatgaatttttctcatgtccatgtgcctgtttatattaaatggatttggaagagcagttgtactatgaaagtcaaggtgtttgttggctactcttaattgatcggttaaatacttatgacatgttagacagaaggcattgctcccctcaaaatgcttccttactctgtgtactttgttcaacaggatcaagggaaacaactctccacttatttttctagtgtccttttagcactcaatgttgggcgcaatttggtgtggtttggaatctttctttaagctttggtgaaatgttggtcacggccagaaattcatattaatctacccattttattgagaaggtgctttatgttgcttggaacatttggaagcagaggaatagtttaatttttgaaaacattgttccctctgttccctcttggagagttctctttaggaatggtctctcccttttagttcatagagtcaaaaattctgagagagatacattgttacagtggttaaatttgttgtaattttttctcctttattaatataaaatcttaacggtggggacttcccctaccgtggttctttcaaaaaaaaaatcaaagactgtgtagagctaaaattaaataatcaggtgcatcgaatagatgcacctaattaggtgtagcccccgactatatgagtagctaaaagctaaacatatagtcaaagtgcaaataacatccatccgagtggctttacaaccgcatcatccatagtatcatatagctaagcatatgcatcgttcaataaaacatctagccgactgctttagctttaatataccaaaaattaagatataaagaggcccgagtaaaaaatactctagaggtccataaatcagcacatatgacaagaatctgagtaaaaattctcaaagatccatcacatgtggtataaatatgttatcatgacaattaatgagtcaaaatagcctaggctatgactcacgccataatcaaattaagcatataacatgccgagagaatgactgttcaaaatccaaccatctcaacaaaacccaaacagcctttgcagcctaaaaaggcttacaaaagaagtataacacatttctgtcgggtacctttttatttgcatcgtagtaattcaaaggaatcatctaactgcgtcaaaaaggattttaacagcattgagccataccactgtgacaaaaattgccgaaacaaaaatgcctaagtccctaaggatcacaacttagccatgctgataacagaattgggataaagtactattttaggcccaggcccattagtactcccgataccctaataacaccagaaaaccaaacaccgcttcgtcttccccgctgagactttcgccattttccccattccccgctacagtacaaaaccactccagcggaactagggttctccgattctcccaaatccaccttccaaaactccacagaaatcatccgcgaatccaccgcatcaatcccccctccattcccagccattcaccgaaccaaatcatattatccagatcgcatccatggcggaagagagagagctttgagagtcagtgggcgccctccgatgtaacggaggagaacctgaaggagatggtggcgcacggtgttcttccggcaaaggagatcattgggtggtgtccagcatgcggcaaagcattcccaacccctgacacacacgaggtcgtggtattttctcatttcttctgtggcgggttctctcttccaacctcaagattcttttgggggattttggatttctatgggattagtttgcatcacctaaacccaaattccatagtccat

SEQ ID NO: 29307 - DNA, 1559 bp, Oryza sativa
cacctaaacccaaattccatagtccatattgccaacttcatacatgcctgcgaagcttttttgggcgtcaggccacattttgccctattccgccgcatcttcttcctcaagccccaaccgaacaagagcaaaccatgtgttgttgggggggggcggtttccaacttaggggaaccttgagccagaaatatttttccatgcccttcaaaacctcgaacaagggctggcatgcaaactggttctatgtacaaaaccccgagcctgcacttcctgagtactcctgtcttcctccagtttatcaggacacttggaactcacttccaatgggagaagaagccgctcaggcgcttgccctgatggaccgtatgctgaaactaaaggagcaaggtctgcaaggagaacagatcacccggcattttatcaagagccggctagccccaatcaaagaaagatctcgtacggcctttgaatttgacggcaaacatgaccccaaccgtgaagatctagactctcttgattttaaggtcatgaaggagagaatgtacaaaatcttctcaaatgctatcgtggtcagttattcgcacttgctaccagcggtgccatacaaccccttcaatcctcctccaccgatatgtattcaaacatttcagccttcctcaaaagcatgctttcatcttctgttaagctaattgaaagttcgaaatatcatgcccaggaattagccttgatgaagtcggatcctccaattgctcaacgctgatcaccccgccggcaaactagtcaggtgagtggaggaccaaaaattcggtctgatactcaaccaaacacctcgaaatcaactagccagtcagactctcgcaagaggaaattggttctgagtgatgatgagggcgatgatgctaaaaaaactggcaacaaagaagtgactggaaaacaaccaagacaaactaatccgaagaagaaaacatccagtcgtcccatgtcgaaaatcagaaaatcttccaggtacaaatcatttggccatcttccttgtattgctgcttacccactattgaaatagcattgatagcataactcaaatttgtaggaagccatctgacatagatccttctggaaaagactttgagccgactgacatggagataggcccttcaaaagaaactgggccgactgcagaagatcacccgagtgacaatcaaccggcaaccgacaatgtagaacccagcaacaagcccccgactgggaaccagtcggccgaagctggagttggcgctaatcaggatcccccaactagaaaccagtcgggtacagagccagataaagatatcccagaagtagaagctcaagctaacagccctcccaagatagacaccggtgctagcccaggaactagttctcctgttagggtgcaaggacctgctcgtccccgaccggaaatcaaaacaggtaagcaaatccttcaaacctgttttgatccaacagactttcttcaattgtttcaccattatttatgaatgcctaaggcttgatgatcggcgacgaagaagaggtcctccggat

SEQ ID NO: 29308 - DNA, 3263 bp, Oryza sativa
aagaagaggtcctccggatacagtcagctgaagattctcgcccacctattttagtcaagtgggggatgacgacatgcaacctcagggaattgtgataaagaagcaaaaggaagacgaggaagtatgcctgctgaaaaaaggcactcggccaagccactcgtctcgtaaatgtaagttttcatatatatatatatatatatataacttcaaccaccctgtcaatcaccttacttgaacaaagacaaactcgcgatgcagagaatccatctcaggaatgaggcgaagactgcaacccttgaaaaattagttcctcatcttggaacccttgaagctaccagaaaccagctgcatgaagctaaagagcttgccaggaagactgaacatgatctgagagaccggatcgctgagctccaagattccaactttgagctgagtggttcgtcaaaaggtaattctcatccctgtctcacttatttatgctgctatctgtgatatcagccaacaagaagcgatacagtgcaagccgccaagatatctgaactggaaaaacggatccaagctctggagaaagacaaggccgaattggcaaaacaaagagactcggctctgaaagatgtcgaaggtactggtaactaatacttcaaaacaccactctcatcttcatgcctagtcattgatatagacttattcgtgtagaccgcaagatcaaatcccaaactcaattcgatgtcttagttaacaaaatcaagaagcttgaaggagccagagatgaaatcgccaatgccgctacaccacttgtccaagccatgttcttcaataacaatggtccgagtgcatttgatgctaccgaaatcttcgacaagctgagaattgctccggatacatattttaagaatatcaaggaagctggaagtatgggagcgagcttagcgttggcaatgaccaagtccttgtacccgaagattgacattgacgctggtgatggttttgcagacgggacaagcgaagaagccgctctcgacctcatcaatgatgcgcagaaagctgctgataagatagccgttgatgtagttgagggattctaggacaacgacctctggccgactagatctaataactctgatgatgaaaaaactgataccgattgatgtttattataacaatgatgatgatgatgatggaggcacaatttgtacaatactgatgaatttatgatgtgcttgatctttaaacttaacttctgatttcttaaaagcttttggcaaaccttattgaaccttaaaacccgcaaaagttgttgaaaaactttcaggtcttattaaccaagccaaaaaatcaaacagggcaatgataaatcaataagcaaattgaattgataaaaatcacactccattattattttagtagcccccgactgataactcaaggaaaagcttgacattagcagtcaaagagggaaatacaaaagtaatgcctaagcataaaaacgacgaagatgttcaatattccaagagttgtcgatatgagtaccgtcttcacgcttgagtcggtaagaacctggccgagtgacttcggaaattatgaacggtcttcccacaagggagataacttgtgccgatcccgtgtagtctgatttttctcagaaccaggtcgccgactaaaaaagctcgtgatcgaacattgcgattgtgataacggcgcatcccatgcaaataccgagctgactgaattaaggctgcttcacaggcttcttccagtcggttgaggtcatctactcggtcttctctctagcactcctcgctgaagttacgaaatcgtaaagattcaaattccacctcacttggcaacattgcttccgctccatagaccaggaaaaacggtgattggcccgtagcccgactgggagtggtgcgcagggatcaaagtacacatggtagctgttctacccacttgccggcatagggatgcagtcggtcgaaaactcgcgcttttattccttgaagtaccataccattggcacgttcgacttgtccattgctcatagggtgcgctacggatgcataacaaattttgatgctgaagtcttcacaaaagtctttaaatactctgccggtgaattgagtgacgttatcagtgatgatccgattaggtaccccaaaccggtgcacaatgttgattaaaaaatctctagccttgtctgcgtgattgtaatgactggtttggcttcgatccacttggaaaatttgtcaacagctacaaaaagatgagtataaccaccgacagcctttttaaacgggccaaccatgtcgagcccccaaaccgtgaacggccaagacagcgggatggtttgcagctcctgagccggtagatgagtttgtcgggcaaaaaattgacaaccctcacatgttcgcacaattttgtcagcgtcggacacagctgtgggccagaaaaaaccctgccgataagccttgccaacgatggttcgtgcagcagcatgattaccacagatgcctgaatgtatatcctttagcaattgtcttccctcctccaaagaaacacagtgttgcaggattcccgatggatttctcttatacagctcagtctcatgaatgacataaagtctgctgcgcctggaaatccgctcggcttcatctttatcttgaggaagttcttgttttgtcaaaaatcttatgaggggctctctccagtcggcttcaatcatgcttacgtcttgagtgtccgtggcattgattgtttccttccttggtacggttggctcgtagagatgttcaacaaatacatcagaaggggctgcttctcgttttgaaccaaacttagccaatttgtcggctgcctcattgttgtgtcgaagaacatgggtgagctcaagtccatcgaatttatcttccaacttgcgtacctcctgtcggtaagcggtcatgttattatcaaggcaggaccactctttcataacttgattaacaaccaactgagaatctccacgaactatcaaacgccgaatccctaaagagattgcaatccttagtccgtgaagaagcgcctcgtattctgccacgttgtgagatgcagaaaaatgtatccacaatacgtagctcagcctctccccagtcggggagattagaacaactcctgctctagtgcctgaaagcctttttgacccgtcaaaatgcatagtccaatactccatcttctctgcaggcgtgtcttcttggcactcggtccactcggcgatgaagtcggct

SEQ ID NO: 29309 - DNA, 734 bp, Oryza sativa
ccgcggcagttcatcagccgcacttgagcatattggaaatgtatcccaaattgaatccccttgggatagaaaaagaagaaccaaaagggaaaagagagagaagtttttaatcggtttacctggtgtcaattcatatttgttgtgtgttgttaattgttatgaattaaagtatctgcgagaattggagtattttttttagtttgaataagtggtggacgtaggattttataaatgggggtacgataaactaatttatttataaaactgtttgatgaaaacaaaaccacaaacacatggaaaatagggaaaccttatattttattaatcatgattcattaacatgaatgtttatagatacatgggggctcccgtaggaattcgccttttgccttcgtgaggaatgcttaataaaaaggtatgctgactggagattgcttgtagtccgttgattcccagcgcctagtaatgaggctaccggttaatttcatccatagaacgagcctatggaacacctccgattaagctgtgcttgtgatcgtcgtcttcagaattatttgctcaccgagggttgaggttggtgcaaatttaatggtgaatatagtgaatgtggaacgggtggctttgtttcgccaaaacctggtcacggtacactaccatcacgtcggcgtgaagagggaatttggtgaagcggggtgacctttgcctcatcggtgcccagtcatgaaccctgcctt

SEQ ID NO: 29310 - DNA, 20044 bp, Oryza sativa
gagtactgggcgtttgagctactggtactgatcgccggattgctcccgaatccgacagtgagcacctcgctgatcgccatgtggtaagttcgtcgttgcgctgtcccttccatgaatcgatcgcaaaggaagaaactgatctgattaatgcatgattgtgttcagctcgagcacggaggccatcgcctacatgatcacgtacgggttcagcgccgctgtgaggtacgttacttacatacgcacgctacctgttcgatcgccggccattgttcgtcgccgtcgtttctgaccgaacgttgcacgcgccacgcgcgacgcgacacgcgcagcacgcgggtgtcgaacgagatcggggccgggaacgtggagggggcgaagaacgcggtggcggtgacgctgaagctgtcggtgttcctggcggcggcgttcgtgctgctcctcggcttcggccacggcctctgggcggggctcttcagcggcagcgccatcatcgcggcggagttcgccgccgtggcgccgctgatgatggcctccatcctgctcgactccgcgcagggggtcctctccggcgtcgccaggggctgcggctggcagcacctcgccgccgtgaccaacctcgtcgccttctacgtcatcggcatgccgctctccatcttcttcgccttcaagctcaagtggtacaccaaggtagtacattacttatacttacaatctcacattaatccttttcatttctgcttcacaaagattacatgcatgtgacatttgatttgggttgcattgcttgtagggattatggatgggtttgatctgcgggctgacatgccagacctgcacgctgatggtgatcaccgcacgaaccaaatggtccaagatcgtggacgcgatgcaggagaagaaggccagctacgtcgcgtagtttaactagtctttggctatactgtagattatcgatcggattggatatgtgtatgtatacacgatgagcatttgaagcaacatctgcggttagcatgtctgcaacacgcgcgacgccggctgttgcgttcgtgcagtgcgtgcgcctgcgacgtttcgcggggttttggacgcgacgacaatgcgcgcgaactgcttgttcaaatacagtttcttcagccatctggaagctggaagcctggaatagacaaacaccttagagcaagtataatagtaggctataagccaactataagcttaaggagaatttgaaaaatggagagagttggctctcatgcaagagctagctattcacatattttaagatagatacataggtgagagatagagagaggaggagaaaaaaaagaggtaaccttatagcccatttactatatatgttaactctaagataagctataaactcattgttggctctattattaaacttgctcttacagtactattttcaaatggtgagcaccatatattaattgtgaaaacacacacacacaccgatgtacacgatgatggaaatttactcctctcaagtttgattgaatcttgtctgaagttttatataaaccaaactaactttagataaaagccctcccactaccataaaacctacttccttcgttctacaatgtaaaactttctaggatgaggacatatcatgtgaaaacaatgtaagtgttgaaaaattatgaaaatcatatataaaagttccgtaaattcatgaaaaatattaaagataggtgtagtgaaatacattctcaccaaatctcaactccaaactcaattttgtttaagaggaaaaaaaagagacaaattttgggtgaatagtgtcatattactattctcctaaaatttgtcttttgtcctaaataaaattaagtttggacttaagatttggtaataatgtatttcatgtttacacttatctctagtattttttttatgaatttataaaacttttaggtatgatttttacgagtttctaacacttagcttgttttcaccagatatgtccccttctaggattacccaaattaatatagatgttaatgaatctagacacatatagaaaacatatacattgatcaatggatgaatctaggtaagtctaaaaagtattacgatatgaaacgaagggagtatcaaatataccatcttactagtgctggttagggaaaaaactagcactggtagcggtttttggtccctcaaacccacacgacactcggaggataagaaaaaccacacatgagaccatatcgataccagttcattaaataaaccaataaaatgtgtgggacgttgatgttggaacatgtataaaaaagagctgatattgatgggtgattaagctgagctgatcgagcaagctctagattggtttcgatatatttaagtctagacactctctcttgtgtgcgctcagaatcgatcccttcgtctcccttcccctttctctcatggccacctcccttttcctctctcacttcctctccctctttgtcccgccaccgcgagattgattacagtggctgatcggtaggcagcggcaacttccgtcatctttcccaacgcggctgtcctatagagctcggaagccgctggatctgcccatcatgagctcgggtatggctggatccgatcagtgtggctcaatggaaacttccctccccctctcccagccaccttgagctttcgaatgcgacgacaaaatagaacaacagctatggtctattctcaaatataagcatttatatgatttattttttccatgatataaatatttctgagcactaattctaatatgtaggaatttaggcatttttcagccaattagatacttagaaaatgaatctagctatctaagaaactcaagattttttaatatgaccattgatgaggttatcgaaagggaattattaccttaacataatatttactaaataacctaaaaatgcttatatttaaaaataggtggagtggtacattttgcggttaagcttttctttttactagtaatcgtgcacgtgcatcaatgcacgtttttcataaaatatattataggagtacattggaagtttggaaactatatctaccaaaaataatttattcaaccaaaatttataaaatatatctcatgtgtaactgtaaaaaaaatataaccaacattatcggtacttgtaaacatgggcatgactgtttgttttgtacaaattttgataggagggaacaaaatagaaccgaagccaaaggctatacagtagccgcctttttctctacagctagctgctccactgcttgatctcgtaaaaaaaagaatttgtcgacaattcgctaaattgaccatccctctttcttgaagtttctattgtttcgttccgtccaaattccccaacagacaagcaagaagagggtcctgagccctttgctttgcatcttttctgataaagtcttgtgacaccaccattccaatactgaacaggctgaaggagggctagctgaagaaacttcagtcaagcacaggctaataaatatagatgtgtaagacatgcttcagacaaacttcagtcaaggaggtaatgcatcactgcaagttgaattaaattaaaaatcaaatatgatagtttcactcactagatgttacaactcacgagaatacaagatttcggaaaacaaaacaactaataaatatagatgtgtaagacatactcccttcgttccaaaaagaatcaacctagaaggggccacatacatcaacctaggaggagtcttaagttgaattttaggaagtaggaagtaaaatctagatatttttcccgagcgtgcaacaaaataacttaaatatggaggctctctattaccctcgatagaaaggcgaagttataaaactcgttggagatgctctcttggctggattttttttcttagaaagacagatttgtcaattttcccagtcagacaaatgtagcagcgtcaactaattaaggagctgatgaaccttcttccagagaatggagtgtcacgggctgttatgtttctcttgtcactgtaatctgagtaccagctactatgcgtctgtgcgttgttctcgaacgaactagtggtcttatcggtaaagttaaaatttatattttcaagttgattttaaaatatttttaacatagtagttttattttcagaattggcttttaagtcccttaaaacatgcatatacaagttttatctataaattaatttttattttctaataaactgttttggtttataagggaatatgagtaaccgacgaggacataaacagcttatcccgatctcaaaattttagcagaataatgatcaacaagcagaaataattcagatagatagcgacgtgtaaagatgcaccaaccacatagaaatctctgtttcgttgcgtttgcctcggcgtaggttagggagcagaattggctgtcagctggtgccttatcgttgattggaaaagatatggaagttggaacaagccaacaaactgtatatgtcatcattttagggcaagcccaaaagcattttctagccgcaccatcgagaaagcattctagccgctcgatttcgagctggcattttctcttctggtcgtacaaattttcttccctaaattttacttgttttcagtcttttttaacaaaaagaaaatattttaagcctactgtttgagagcgtactatgcagcaacaaatattacaaaaaaattataactagagatagtattctatgatgtaattttcagaaattcacaccgactttcaagtaagttcaacaaaacatacttgaaatatatgttgctccgtgatttggatccccgtggactacgggagagaaccagggaattggaatctaatttcttaaacaggttgtttgggtgccattggagttggaatcatctaaacaatatcggcttccaagacgaaaatagtacatatccacattttatattagagtaaatttcacaaaactatacgtctatacgttttgtggtctatgttacagaaaactacacacactttgatacttggcacttaagtacatatatttcgatatttcggtagtgtagttttacaaaaccacactatcaataaataaattcaccgtgagatgatgtggctgttccacctaaacgaggacgtggcatcctatgctattaattttgcatgacctcctatgcttgtcagcgccggcgcggacggccgttccatatttccgcccatcgacgaccaccgagcaatatcgtgtagttctcaccgccttcggcttgcatctcgtcgtcatgtcagccacaagccagcgcctttcctctcactgctatcccctcgccgccgcgccacgaggctcctcgctaggcctcatcatctctcccggcggcccctcaccatcctctggtcatctctctccaatacatgctatgctcgagatgtggagttagcaggcaactcgctggctacatgcctctttgagtactgcggctgtgcggccccttgtgtctcattccagtactatggtggctctgccattctgctactaacaggtatggtttggttctttttttttttgtccaaggaatcaatcaggtgcccattttatagtgagttttaatgagcaagttccaactgaaatttcacataggtatgtagttttttgcctcactgttgattgattttgttaaaaaaaacagttaattcatcaaatatggaggtttctaatgcctctgaaatgaaagtagtacaaaacatgggagctataaggggaggacagggaattagtattctcagtcagtccactattgtacttaatttcaagtagataaattacgcttcagtggaaaggatcactcagtctgaagtttgtggctataaccccttgagttaattgattgttccattcagcttgtagtactggaacttgacaagagaagcacaatagtttggcgtagtactggaacttgacaagagaagcacaatagtttggctgtagacagtagtaggtggcttctttcatgtctgtaggaaagtgctcctaaaccaagcacaaccttcagttgtggtaagcacaatacagaccttaactcatggaactttgaaatgaaataaaaatggtataatgctccattagacatgttcacacatctagtttgatcaacaagtattcttaataaccagctcaacaaatagtgcaagaacaatagactcaaaacaaccatatagaaaggtgatcactgaccagaaaacaagtcacataataaaatccttggtaacatatcgcgctgggattggaaggcacatatgtgcgtatatttagttgcagcagttttagtgggccatgcgcatagaagtccagcttgtcccacgatgccacgtcctcgttataggtggaacaaccacatcatctcacgtgtgaattcattcattgatagtgtagttttgtgaagctacactatcaaaatatatatatttaagtgccaaatgtcaaagtgtgtgtagttttctacaacttggaccacaaaacgtgtagttttgtgaaatttactctttatattaaaaaaggatgtctttttttttcacgtactcttgtgacttaggccctgtttagttaccacgcaaaaactttccaccccgtcacatcgaatgtttggacacatgcatggagtattaaatatagacaaacataactaattacacagattgcgtgtaaattgcgagacaaatctgttacgaccaaatttggtaagatatgaaccaggttcggcattagaatcaaagcggattcggcaaagagttaggctcgaaaaacatagtttgcatcggctgcgaagacatcggctgagatggatcggacagagtacagccgatacggtcgattctgatgaagacagttgtaaaactgcttctagaatcaatcaacatgctacacaaagattgccacgacggagataagctcttagataggcaattgtatctattagttagttaggatatttcgaatagtttccttagagatatgtttggacaaaagtctgtcgtaaagacctatgtgtatcttagagtttgttagagataagagtcgtgtccggcgaggacatattatgtatctcgggtataaatatgacccgaacccaatgtaaacaacaacacacaattcaataacactttcgcgcatcgccaccctttttacttttgttctatttcgacgagttattgttttcgggttgagctgcatcgtttcgattttcaactagaggtaaacttgtcatgacggtttgcgttctcgagattagtacttccatctttatggtattctaatcttgtttatgtaattcgtcgagttatcgtatatactttataatctctgttaattgtgcttgttggtgacatgggaccgggggtatcttgactagaggtttggggcagctgcagtcacccacgtggcctgaccccctcgggggggggggggggtcgggcccgagggtgatgtggccgcccctccctctgtcttcccgaggggtcgggccgctcccgtttcggccccgagggctggggcgccccgaccccctgtgggtttggcgccacgtgtgtgggttaggtgagcacagcggcgctcacctaaccgcgttaattgcgggttggacgagcgccccacgccgcatttaatgcagcgcagcacactcgttcggtccgtgacaggtcacagtgtgtgaccggtcacagaccggtcagatcgcgggttaggtggcaacaggcggcctgacacacgtctcgccctgtcccgtcggaatgatgagagcctccaggcactcgtccctagccggagccggcgtgggaactcctggagttggcacgtcagccccggccagatacattccaggcttcatcgcaaccattgcaaggaagtcattgtatgaagaagggcagacgtgtagcatgctgaactgacacgtggtggacaagaatgaccggtctgtgactggtctgacgccggtcgcgtcatcggcagacaaccgtgctcccacgatgcatctgcctccggtggagtggaggtaggtatgacccatctcgtcggatggtcatttggaaagcagccatggtaaatctccgcccattaatgagggagtaacagggagatccccggtgtcaggcgagagacggcgctgagcctcactcaaggacaagttgtgatttagcttccaggcgaaggtgcaagccaagttttggtcaagagagggtaggtccccacccagaagaaaagtaggtagaagtggtgcatgtagtatccccttgagatataaaaggaggaccttgcccaccaaagagaaagaaaaaaaaagaaaaaaaaggaggcgagaggggttctggagcctgaactctctggctctccggctctctgtaaatccttcacacacagatccaccagaacacaggagtagggtattacgcttctcagcggcccgaacctgtctacatcgcccgtgtctcgtgcacttgctctctcgcgaacattctccagatcgatcgagggcgaagaacctcacttagcgcccccggccgaaccggcaaaggggggcctgcgcggtctcccggtgaggagccccacgctccgtcatctggcgcgccaggtagggggcgcgtatgtttttctaagccctcgtcctctttcgtgtgcgccaagcttctcccgctcagcccattggccgaacgggcagtggcgcacaatctctctccgagcactagcggtgaagacggggagcagaacccgcgccgtcgagctcgtactccactgtccccctctcgccgaagtcttgggcgggaggaggcgctcgaggaggtcgaaagatccgcgacttcgccgcacgcgggcgatggagaaggacggcgagacggggagcgtcgtctcctcgtctacggagatggcagcacgccccagggcgcgctccaggctgcgggcgcactcctgcgtcacccgcccgtcatccctgatccagagactccaacccgacgttggctagatgacgtggccaatttggtcatgacggcgcagcagcgcttaggcgccggctggcggtcctccgccaccaaggccactggcgttgctactgctggctccgtgtcgtcgaggcggagggcgcggcgagcggcggccgctacccgccgttcgtccgccattccctcgtcaacgcctccaacccaagaagatgtgcgtagggggccagatgcccgcttcaatatcgagcgccggcgcaatgatcgccgtgctgcccatgcatcggagggcgcttcctcgtccggagcgccacttcggtccgggcacgggggccagccccccgtgtccccggttggcggtgccggctgtcgagcctttgtggcgagccttcggaacgtccgttggcccccaaggttccggcccaccatcaccgaaaaatacgacggaagcgtcaaccccgccgagtttctccagatctacacgactaggatcgaggccgccgggggtgacgacagggtcatggcgaatttcttccccatggccctgaaaggacaggcgcggggttggctaatgaacttgccacccgcgtcggtccactcttgggaggatttgtgccagcagttcaccatgaacttccaaggcacatatccgcgcccaggtgaagaagcggacttgcacgcggtacagcgaggggacgatgagtctcttcgctcgtacattcagcggttttgtcaagtccgcaacaccataccgtgcatcccagcacacgcggtgatctacgcgttcaggggggcgtgcgccacaaccgcatgctcgagaagatcgcctccaaggagccccagaccaccgcggagctttttcagctcgcggaccgtgtggctcgcaaggaggaggcctggacctggaactcctcctgttccggtgtggcagcttcggccgcccccggatccgccgctcggtcagggcgacgggacaggaggaggaagaagaggtcggcccattccgacgacgagggtcacgtcctcgccgtcgagggcgctttgcgggccacccgaaaggggaggcctgcgagcgacaaaaagaaggaggccggcgctcctagcagggagcgcccgaccggcaagtggtgcaccgtgcacaacacctccctccacgacctcgcggactgccgcgcggtcaaaagtttggctgagcggacgaggaagtgggaggaggagaggaggcaggagcgccgtgagggcaataccccggcggctcccgccggcaaccggcgaggtgaggccaagcagaaggcccccgccgaggacatcaacgatggcgacgatgacctagggttccaggagcctgaggccactgtcgccaccgttgatgggggagcgtgtgctcacgcttctcgccggagcctcaaggccatgaagcgagagcttctggccgtggcccctacccatgaggtgacgcggcgggcgcggtggtcggaggttgccctcaccttcgaccagaccgaccacccaccgtgcgttgcccggggaggacagatcgcgatggtggtttcccccaccgtttgcaatgtgaagttggggcgtgtcctcgttgacgggggtgcagccctcaacatcctttcccccgctgcctttgacgccatcaaggccccggggatggtgctccggccgtcccagccgatcatcggtgtgacgccggggcacacttggccgctaggccatatcaacctcccggtcaccttcggtggttccgccaacttccgcacggagcgggtgaacttcgatgtggcggacctcagtctgccctacaacgcggtcctggggaggcccgcgttggtgaagttcatggtggcggtccactacgcctatctccagatgaagatgccgggccccggtggccccatcaccgtccatggcgacctcaaagtcgcgcttgcttgcatggagcagcgcgcggaccacctcgccgcggcatccaagcccgcgggtggtgacgagaggctcagcacctccgtcccagccgccccgaggcagcggatgatcacgtgcgacgaggtcccgatcaagcaggttgccctgggcgatggcccgtccaagaccacacgaatcggtggtcttctggacgacaaataggaagacgcgctcgtctccttcctacgggcaaacgccgacgtcttcgcctggagaccggcggacatgcccggggtccccagggaggtgattgagcaccgtctcgccgtacggccgggcgcaaggccggtccggcagaaagtgcggcggcaggccccggaacgtcaagccttcatccgcgaggaggtggcgcgacttctggaggccggattcatccgagaagtcatccatccggagtggctggcgaacccggtcgtcgttcccaaggcgaacggcaagcttcggatgtgcatcgactacaccgaccttaacaaggcatgtcctaaggacccttaccccctgccacgcatagatcagattgtcgactccaccgcggggtgcgaccttttgtgttttctagatgcatactctagttatcatcagattcgcatggctagggaggatgaggaaaaaactgcattcattacccgcataggaacttattgttatacgacaatgcctttcgggttaaagaatgcaggtcctacttttcaacgtactactcgaatttctttgggtagccaaataggacgtaatgttgaggcctatgttgatgacttggttgtgaaaacacgcaaccaggagaccttactctcggatctagcggaaactttcgaaagtctccgcaccgcccgcataaagctgaaccccgacaagtgcgtgttcggcgtgcctgcgggcaagcttctcgggttcttgatctctgcccgaggcattgaggccaaccccgagaagatacgagctatagagcggatgcgcccccccagcaagcttagggatgtgcaatgcgtcactggctgtatggccgccctaagtcggttcatatcgaggctgggagagaaggcgctacccctatttaagctcctcaaacgctccgggccgtttatctagacggaggaggctgaacgggccctcactcagttgaaggcgtacctcagttctcccccagtcctggtcgccccggagccagatgagccgttgctactctacctggcggcaactccgcaggtggtcagcgcggcgttggtcgtggagcgcgacgaggacgaccctcgctccgcgcatccccaccctgtgtcgactcgacccgggagagagcagggaggagaggcccccgagccgaatggtggcccgaggcccccaacgaccggaactggccctctgcccgcttgtccgacggtgccaggcgcccctgatccccaggatggccccggggccactgcgggaaggccgcgcctgtcgccctctgaccccgaggtcgtcggcacagaagccgagtgcgccccgtgcggcctctcggacgaagagcaccctgtatcgactcgacccgggagagagcagggaggagaggcccccgagccgaacggcggcccgaggcccccgacgaccggagctggccctctgcccgcttgtccgacggtgccaggagcccccgacccccaggatggccccggggccactgcgggaaggccgcgcctgtcgccttccgaccccgaggtcgtcgacacagaagccgagtgcgccccgcgcggcctctcggacgaaaagcgccctggagatgcggcccctggcgaagaggatcggccccgacaaaaggtgcaacggcccgtctactttgttagtgaggccctccgggacgccaagacccgataccctcaggcccagaagatgctttacgctattctgatggcttcgaggaagttgcgccattatttccaggcgcatcgggtcacggtggttacgtcctaccccctcggccaaatcttgcataaccgagagggtactggacgggtggtgaaatgggcaatcgaactctctgagttcgatttgcactttgaaccacgccacgcgatcaagagccaggccctcgccgactttgtggcagagtggacaccggctcccgagcccgtctccatccccgaggccagctcgggcccttcgcagctgcctcacaccgcctattgggtgatgcagttcgacggctccctgtctcttcagggcgccggtgcgggggtcacgttgacctcgccgagcggagatgtccttaaatacctggtccgcctcgactttcgggcaaccaacaatatggcagagtacgagggactccttgcgggactcagagtggcggctggactggggatccgccgcctcctggtgttaggcgactctcagttggtcgttaaccaggtctccaaggagtaccagtgctctgacccgcagatggatgcttacgtgcgccaggtgcggcgtatggagcgccattttgacgggatagagcttcggcacgtgcccagacgggataacgcggtcgccgacgaactctcaaggctcgcttcctcgcgagcccagaccccaccgggcgcctttgaagaaaggcttgcccagccgtcggcgcgacccgaccccctaggggagacggacgcgcctgaacggcccccgaggcccgtcggagtccaggcctcgggacccgaggggggcgctcccagctcccttagattgattgcttagatcgctgagatccaggcgtacctcgcagataagactctacctgaggaccacgaagggagtgaacgcgtacagtgcatctccaagcgctacgtgctggtggaagggaccctctatcggcacgcggctaacggagtcctcctgaagtgcattcttcgggaacaaggcgtcgagcttcttgccgatatccatgaaggcgagtgcggagcccactctgcctcacgcaccttggttggcaaggcctttcgccagggtttctattggccgacgactctcaacgatgcggtcgacctggtccggcggtgcagggcgtgccagttccacgccaagcaaacccatcagccggcccaggccctgcagaccatacctctttcatggccgtttgctgtctgggggctcgatatcctgggtccgtttagacgggccccgggcgggttcgagtatctgtatgtcgctatcgacaagttcactaagtggcccgaggcttatccggtcatcaagatcgataagcactccgcacttaaattcatcaggggtatcactgctcggtttggggtgcctaaccgtatcattacggataacggcacccagttcactagtgagctcttcggtgactactgcgaagacatgggcattaagctctgcttcgcctctcccgcccaccccagaagcaatggccaagtggagcgcgccaacgcagaaatcctcaagggcctcaaaaccaagaccttcaacatcctcaagaagcacggcgactcgtggattgaggagctgccagcggtgctctgggcgaaccgaaccacgccaagccgagcaaccggggaaacgcctttcttcctcgtctacggcgcggaggcggttctcccatccgagctcaccctgaggtcccctcgggccaccatgtactgcgaggctgatcaagatcagcttcgcagagatgacctcgactacttggaagaacgaaggcggcgcgcggcccttcgagccgcgcactaccagcagagcctgcggcgctaccatcagcgtcacgtccgggcccgatcactctgcgtcgacgacctcgtcctacgccgtgtccaaacgcgtgctggactgagcaagctctcaccaatgtgggagggtccgtatcgagtgatcggcgtcccccggccgggctccgttcggctggccacgggcgacggcacagagctgtctaacccgtggaacatcgaacaccttcgtcacttctacccctagtgggggtcaggtgttaggtctcgggctcgggccaaccccgcaccccccctcgggcgtgcagggttggccgggggctaccacatatgcatatacttatcttttttctcttccgtatttcaataaaagctttttcgatttcctaaggactgtgtctgtgccattgtttccttttgaagagttttggcttgaattagcacgctcgtgctcgaccctgccctcggtggctcgggccagcggaaatcgccaaacggggcccagaaccgagccgtgccccggggcgtggtgaactccgggggggaatcggcaaaggcccacaatcgggtccccataaccctcggtcaccacgctcccagcctggccagtctcgacacgtgcatctccccaggcactagccccgacccgcgccgtttgaggctgggacctgggcacgagcccttgttcaagccaagacacagaaggaccgcggcacagaccatcctcgtctcatacacacaacaaataaaattgacacagaaatttcttctttatttgattgcagattaaattagtttatacaagaagggggcccgaaggcctcggaagaagaaaggaaaaactatttaagattggcgggggcctgggggctcatttcgaggctcccgggtcgccggcctcgtggtcgctgtcgtccacaccaccgtcgccgccctcctcgtcggagtcgagggcgaacgcgagccgaggggccgtaccctcgaagctgtggacgatgtggtcggcggcgtcccggacctgcgcgcgcgcgtcgtcctcggttccgggagggaactcgtccaacgctgcccacggggagaagtccgggtccctggcctggtagcttgccagtacaagctccactgcccccccgggcgaggtctctcgaggatgacttgatcgtctcctcgagctcctcggggagccgctggagagtcccggccatctctgagaggcgctgggcgaggcccccctggttggcggcgtacttcgcggtccgctcgccccagaggcccgcttgccgcccgacgcggtctagacgggagacggcgtcccgaagcatgccgggccctacctcgcccgccaagcggagggcctcgacctccccggcggacgagtccagtgcgccctgcagatcagcgatggtgtgttcggcagctgcgaggcgggcggctagatcgccgtcgcccgcggccgcctcgccgctgcgcgccctcgcgtccagctccttcgcccgcgcctcgagctcagcggcccgctgatccagtgcggccctcttggcgcgggcgccttccagattacggcgcgcctgctcctcccgcgctgcctcgcggagggacaggctgtccgccagccgctgcgccgcggcctcggcctcctcgagagatcgctcccgctcggtgagcgcatcctcgcggaggcggagtgcggactcctcttcggcgcaggcggcctcgtgcgccgccagcgttgcctcctggatagcgacggcggtctcgcggtccgccaggtccttctccctcgcgcgggcacgctcttccagcgccgtggcgcgagcctcaagggtcacttcgcgccgccgggacgccgcctcgttctccgtcgcccgccgttcccgagcagtggtggcgtcaaggactccccgggcggcgtcgagtttcttctctagctccgccacccggctcccgtattgaaggcggagatcgtcccgcgcctcgttgagcacggcggtggcgatgagggcaatctcccgctcctcctccacctccctggcgatctccgccagctccctccgacgggcctcgagctctgaggcgtgccggcggtatgccttgcggcccgcctccaccatggcctccaccgagcgccgcccctcttcgacgcgcgcccacgccgcgtcgagctccgcccgctctgcttgcaggacctccatctgggcacctaacccgtccagcaccatcgtgttcgcggcggccagggcctgcaggaggggctctgtgttcagtggagcggcgtaaggcagaggggagagccgcctcggtgtgggcgctatgcggctcggcccgccaatcgacgtgccggactcaggggcgtcccccgaggctggctcgtcctgaacgtcgcccgaagggtcgggtccgagcggtgcgcccgcggcctcgtcgtgggtggactcggaagtcgtcgtcgcctcgggcggagtcgggtcgggggcttggcaggccgcctggcgtgcgcgcgtcgcctctgcctcccgggctgacttcccggcccggtggagtctggcctcctcccgagtggcctcctcagcctggcgaacccggacggcttcctgggcagcctcctcagcttcccggaggcggtccgcggcttctcgccggacagcttcccgcctccgggcctccgcggtcgctgtctcctcggcctcagaccggccggacttggaatggcgaggggggcgcgacggaatctcgctgaaagcggaagaaaaaccagaagacaaaaagaaacgggtaagtgaaaactcgccttgggagaatgaatacggccgcagtgggcgcggggacgaacctgcgaggaggtcggctaaacgaccaccttgggggggagatgaggtttccccggcatggttcggtcacccccatcttgcggagccgcttcttttttcgctccccctcgggctgcgacgtcggcacagcaccctccgggcgcctgctgctggcacgcaccgccccgccccctcggggaggagatggggagggggtatcctcctgtttcctcttcccccgggcgtcggcagggcggctgccccccgggcccccgtcacggggcccagacgcacgaccccctcccggggtagattgttcccccctgcggctcccgcccgcgccatcgtggcctcgaggagcccgctcccctgacgccccgaccggctgcatgatggtcaggatgttggcgcgctctggatcgctgcagagggggaggacaccttgggggatgagggatgcctccacggagctgagattcagcacccgttggaccaccatctcgaaatcctcaggggcccagtcccatctgcccccctggtgggtcctcatgtagtcctcggacccggtgtactcccaggcgccccgggcgcgccgctggagtggcgcgatccggcgacgaaggtagtcgccgaacaccatggcccccgtgagcccctgggatcgcagacccgccaggcggtcaagaacggcgtcgtagccatctcccagatctaccggcgcccgccagctggaggcctgcgccgggggctggctcggaagtcggaggcgcgctttgtcggcgagaggggtgtagaaccagtcgctcttccagtcgtcccacttcttgcgaaggacgcaggaaatgtagcggttcagcaccggcccccgcggctggaagtagcaaccactgactaccgacggtggcgacaccggctgtacggtgaagaaccaccggaacagccggagagatgggcgcaccccgatgaacatctcgcataggtgcgcgaagatggccaacgtcattaccgcgttgggggtgaggtgcgccatctggagatcataaagctccagaacatccatgaagaaagaagagaatggcgggaccagccctgccattgcgaaagagaggaagaagacggaccgccccgggtaatgcggcgccgggcgtccctcgcccagcgcgaccacctcccggccggtggcagattccggcatgaatcggcgcggcagcccggcctgcctctcgctcacgatgcgggaaggcggcagcacgctaccctcgagcggtgcggagccccgtgccatgacgccggcggaggaggagcttgagagcgagcgagtatggcaagggtagggcgccggaaacggagagtcagagcacaagtggcaaaggcaaagggaagagtgacgagaggaaggaaacaagtcccttccttgatgtcttagtacccttgccaacgctatgcccggctcctcgatccccgcgcccactacctcgccccctcgtctctcgcgcccacgcctccactaatcccgctcgcccgtttgcggcgcacgaggcggatgtgcggccgtggcagtcgagatgggacatatcgtgcgcgcgttaactacgctcgccgaccgatgcaccgtcatcacatctccagacgaaacgaaccggctcgtcccggttcgcgcgctacttaagtaatgtagtggtcttgaaggaagccgctcattattgtcggtcggttttttccttgacgatgtgcgcgatttgcgaccgctgggtttctgccacctgtggagaccggccccacctgtcaccaggtctaaggagtggcgtcatgcccgagcgcttccctcgggggggggggcgatcgccctggcgtaacgccgggggctactgtcggtgacatgggaccgggggtatcttgactagaggtttggggcagctgcagtcacccacgtggcctgaccccctcgggaggggtcgggcccgagggtgatgtggccgcccctccctctgtcttcccgaggggtcgggccgctcccgtttcggccccgagggctggggcgccccgaccccctgtgggtttggcgccacgtgtgtgggttaggtgagcacagcggcgctcacctaaccgcgtttattgcgggttggacgagcgccccacgccacatttaatgcagcgcagcacactcgttcggtccgtgacaggtcacagtgtgtgaccggtcacagaccggtcagatcgcgggttaggtggcaacaggcggcctgacacacgcctcgccccgtcccgtcggaatgatgagagcctccaggcactcgtccctagccggagccggcgtgggaactcctggagttggcacgtcagccccggccagatacattccaggcttcatcgcaaccattgcaaggaagtcattgtatgaagaagggcagacgtgtagcatgctgaactgacacgtggtggacaagaatgaccggtctgtgactggtctgacgccggtcgcgtcatcggcagacaaccgtgctcccacgatgcattttgctccggtggagtggaagtaggtatgacccatctcgtgggatggtcatttggaaagcagccatggtaaatctcc

SEQ ID NO: 29311 - DNA, 26635 bp, Oryza sativa
cccctctccttctccccctcttccctataaatatcccccctcccccattctctccactccatctccctcttcggctcccctctcccctctccactgcgccgccgttcccgtgccgctgcgccgccgttcccgtgccgccgcgccgccgttcccgtgccgccgcgccgccgttcccgtgccgccgcgccgccgttcccgtgccgccgcgccgccgttcccgcgccgccgtgccgtcgctcctgtgccaccgtgccgccgcttctgtgccgccgtacgccaccgtcgccaccgccgtcgtcgccgctgctgccgtcgctgagccgccctccttccccctcgcgtccaccgccgccaccgctcgggtaggagggagagccgagagaaagagaggaagaagaaaagaaaccgagggagggagaagccaaggaagagagaaaggagccgggagggagagaagaaagggaaaaagaaagagaggagagaaagaaaagaaaaggaaaagagagaaaaagagaaaaagaaaagggaaaagagaagagaaaagaaaaaggaaagggagaaaaaggaaaaggaaataaataggaaattagagggagtttggggaagtttagaaaatttaaaataattagaatttaattatagattaattatagtcgtagaattgcaaaatttaatataaattatggattattcttggtaatttctataggaaatcaattcgcggtagtaatttagatgtaattaataactaaacaaatagttgaattcttatagattattatagattatttttgggtaatccctataagtaatcgattcacggtagaaattcggatttaatcgctaggaattttagacgtatattatatttaatcgtttagtcatagactaaattaaattgtataatatttctaggatttcgtccaatatttagctcgtaatagaaatttctaacctattatatacaatgctcggggagagtaaattattgacaacgaaataattatacccgcaaagtagtttaaatcgaaattgggtttgccgtagtttgcacatagtaaagttaataaaaaggaatcgactttcgcattcgactttcatttggatttatttggatttttatttgaattctaaccgaattcaaatcaatttttgcacgtaacaatagagcccgagggagttgcggatccaagcgaaggccaagacccgcaagactttgagcaaggcaagtcatcactattccttgaacatgttgatcctaattgcaaaattgttttgtttacaaataaaattgcatgcaatgatgaacatcctacttgtgattatgccatgccttgattattgctaacccttaaatctttgtaaccatgtttacgtatgagtccctagtcaactatgacaattgcttagaaatgctactctagaatcatgcatactcatatttatcaaatgctatatgcttggggcaattacctttgggaaggtaattgagatgcggcatgtggagacataagcgccacattgccattatgttgatgacatgatttgtgaaaggagaaataaaatttaacaattgttttcgactggggcggacggaggatttgggtggtatctggaaaaggctagtaccgtccccggtcaattaaggaccgagccatgaagttaagcatgaaacgacccccgtacaaccgtacttctcgaatgggtatagacctagcggattagatagccgagcggaggcagtatccctgcatagatggttcacctctgagtgaggcaggtgcgctacattgggacagccgttgaggtagggccgagaggcgtgccctccatcggtgtcgccattggtaggactgccatgagtgtgtaagagagagaacttaacttgaaccataatttaatatgtgtgtgagacttctctttcccgggagcgccagaactcctctcactgctagaaacatggacgcctagagtgcatgaggatttaagttcatggagcgggtactgccaatgcgaggttatcaaaaagctttgccgtgacgcgtctcatgtgttgggacgaggctcatgtgttgggcagtcgcggagtgcgggtaaagtgtacatccactgcagtgtgagtaaaccaaatctattcgaatagccgtgctcgcggttattgagcaccgggacatgtattatacttagctagactctaaattctttaacttgtgtgggatgggatattgcatgatgatttttatgctgatggagccacttcctgagaggcgggaatgtggacgtcctcagaaaaccataacgattcaatggcgggaagctatccttgggatcacaatggatggtggacagaaccgtcattgtttaatatgaacactggtattaaaacgtgatcaatctatgctaggtcttaggcttgtgaaaagaattacaaaatttgctttgcgcaaaagaaccatagccatcctttgaattcctctgtcatgtgcatcattgctgtggtggcttgctgagtacggttggtactcatccttgcaaatataaaatttatcagaagcggaagatgaagcctcggaggatccctatgcctactatcaggagggagatgaagacgaaggcgtccagtaggtcttagtacggtcgttgcctgtggcaatggcatgccgctgcctgaattccgctgccttatctatttctgcttttggatgtattccggaccgctcggtccgatgatttaagactatgcctgcgggcctataatgtaataattcgtattagacactcgtgtatgtgcacttggtattccagctatgaatccgtgtgtaccaaactacttgatccagggaaatggtactgtttacacgattgattcctgttataaaaacgggggtctacacgccggtcgcgtcatcggcagacaaccgtgctcccacgatgcatctgcctccggtggagtggaggtaggtatgacccatctcgtcggatggtcatttggaaagcagccatggcaaatctccgcccattaatgagggagtaacaggagatccccggtgtcaggcgagagacggcgctgagcctcactcaaggacaagttgtgatttagtttccaggcgaaggtgcaagccaagttttggtcaaaaaagggtaggtccccacccaacaagaaaagtaggtagaattggtgaatgtagtatccccttgagatataaaaggaggaccttgcccaccaaagagaaagaaaaaaaaaaagaaaaaaaaggaggcgagaggggttctggagcctgaactctctggctctcggctctctgtaaatccttcacacacagatccaccagaacacaggagtagggtattacgcttctcagcggcccgaacctgtctacatcgcccgtgtctcgtgcacttgctctctcgcgaacattctccagatcgatcgagggcgaagaacctcacttagcgcccccggccgaaccggcaaaggggggcctgcgcggtctcccggtgaggagccccacgctccgtcagtgctatataacttgcaattggctgatttttactgttggaaagtagccgatagagttaaatctcgttattaatttagattatattgtatatctactatctcttagagattttcatcatcttgcctagatcttatacttatctttatgcttaatgctgcatcggttgggttcgatctattaagtaatatccataattataaatatctagtttgttttatgattgtcaatagagatagtgtcggagttccagccgatcttacctgatttagctatttatatctcatatgcttgattgttatgctaaatctgccttttatattaaaatcttattgcattaaagtatattaggcttcttgtttgatatttttttgcttgttttgatatcttagtataaagtggtatcagagtattagccgatacacgctagatctatttggtcagctatgctataaacatctatataatctttgcttcaatgtatgtttcgacttaagtgatttatactgtctctgcatgacgaccgatctatcccaatcacttagtttaaacatatatcgaaggaaagattacatgtcattaatatctacagacgatcgagtagatttagttttatcttattcatttattactgccgatcgattccaacatgacatcggctcgaagataaatgatatgtcatcggcaactagccgatcggctatcatttatggatttaatcgtggttttttttgtctttctttcttgttgattgcaggatcaaatcaactggcacgctcacgaacctaaaagcaagattttggacctacatatgagttaagcagatctccaggccagtgtgtgtttttcacatcaacagaatcttttaagcctaattactccatgatttgacaatgtggcgctacagtaaatatttgctaatgacggattaattaggcttaataaattcatctcgcagtttacaagcagaatatgtaatttgttttgttattaaatctacgtttaatacttcaaatttatgtccgtatattcaatatgacacgccaaaactttttaccctgaacagggccttaccctactcatcactgcactgttctccgtattgggaagcctcagctatggtgacaccatcctcaatgagaggaggaggaggatgaacctaggccagcacaccatgtttcaaccttaaattaccaaatctggttgcacgaaaatataagcgtaaagataacatcaataaacatgatattaaggtttgtgccaaacatttgatgacatcaagtgcaagtgcaacggagacagcaaggcaatgagaaattgagaagtctagtattttgctagttgcttactagtataccttactctctttctgaacttttctttaaaatgttctataaaagtttattttaaaaatcatattaattcaatttaaaatattttaagctaatacttaattaatcatgtgctaatctgccactccgttttgcatgtcgagaggaagaattttcaacactcaaaagaacacaacctaattctctccacgctttcctgtgctctttctcggttattaatattttctcaatcctataatttttttaaaaaaaaacaggcatttaaaactatccgctaaggatttaactcaatactaaaatggaaatataatccattctaaacatagaattcgagcagaggcctttcaataatcttgagcatagcctggctagcgagtccataaacagtcactgacaagtgggccccaagtagagcgtggccacgaccaaagctctgctccccccttccagcccgtctccaaccagccgcctcccccccaacgccaaccacccgcacacgcaaaatcccccaactccagcaacaaccaaaaagtcgccgtcgccgtcgcctctcctcgccgtcgccgcccatccccccccccctctcgctttcccctcccctcccctccaccgaccagccgccatcccgacctgctccctgccgcggcggtctctcgacgaccgtttccgtccctacttgctcatggtggtggccgcgccgtgctcgtcgtgagggggatgatgcgccgccgcgcgacgatcggggccatggggccctccgcagccgcgctgagggccgccgccgtggtggggctggttgtggcggtcgggctcgcgctcccgccgctggccgcggcgctgcggccgctcagggagcgcgtcgcgtccgcaggggccgcctcctcctccggatcgtggggcgatgaggtgaggacaccgaggcgcgattgggaggtttcctccccacaccatttctgtcgcgggggtttaggcgaattcggtcccgacggggtagtgcaattgaagagaagaggccggggggagttggggagagatatatgctttgctctgcgctaaatttggtactccatgggtttaatttcgtagagggcttattttggtgccttgtttccttgcagtacaaacaattcgatggaaacagataactagtgttgaatttggaaaggtactgcaaaaccaaaatcggcgtctaggtttacaagtcaaattaggctattctgttcttggtaggcaccttgaattggatatgctggcatcccaactgactgtacgtttgtacctacatagacaccaggtgtagttggagtaagagtctactaggcgtctataagcccttgggaatatgaagaaggggcactcgaacagctcgcacttcaagtggtttctttcatttctaacttggttgttatctgatcatgcccttgagcttgtctgtttatcacttttatctacaactacgaattctacttgtatgtctgcagttgagcttattactcattatctctatctttatgtgcttctgcagcatgcattcttcaagagggatgagaatgagataagtccgtactcatggaatatcacagggacatataaaggtaacttctgggtcatagttacacttacacactcgatgttctacctgcttctttagctgaacatttgtatcactacagcatgtgctatagtgatatgttgtctttcgcttgccatacattttattgccgctgcatgtgtttggatgatctactgttgtaggtattccaggaattaagtatgtgctatttgctcttggaatattatttgaaacatgggaactgccctctattccctggagttcagtactgtacctgcattttaggtgctggaatgatttaattttagtgctaccaatttttctttcgaagattataagttaatgatatgctattcaaaccatatgatataatttgatcatgccttatcttctttgcacttacttcttttgtttcatgatattccttgtgcctaatattaattcactgctgttgcttgcttgtcataatgcttagagctttcttggatcttaggttaggacgttcagccccaaattgaaatgtttgatactttgattttcctgctgtgtatctagttagtaacaggagtcttttaacaatttgtggtagattttctattatgggtccatatctatgctttaagatagttactgtggccaaaaagtggaataacatatgtgcttttgaaaatccacctcgtcactgcttgccaatcctagcaactgtggtctttccttcctgtccaaacagttgtatcatacaccatgtctatacttgtgtgcgtttgagtgttacacacattgttctcttaaatataattgtaaatataaataaagtgcacatatgacgcctttttttaaaaaaaaaaatagttaccttatgttgtgctagtgctatgcataggataccgttgcttcattacagtgttaatgtgcttcatgaaataacatcaccaatttgttgttcaggaagttggaactttgctggttccacaaatggttcttctaggtttcttgagtttacaaaattgaagggcgatgcggttttggaactattaagtacaccgacaaagataagcggggtgcactatgttcaggtaatgcagttccccaccccaccaggtacatgaggccattctagtttactttcatttataagtccagttgagctgatgtcacatcctggcctcccacacccttcaaatagtccctgttgagccattcctacattggtgtaactcctttatccctgtagcctaaacttaattctttcccccgcccccttcatctcaatcaacttgaagcttgtaatcccacctttttgggactttttgaagagatttaatttcaggtgggctgatcacagtttttcgtggagtcataaaataataataaaaaagaagttacacagtcctttgcatgtccgatacaatttttgtggtcatcatgatcattttcttcttcattcgtggctcctctgttcactcttttaccttgggatggcagggatctgttacattccatgatgttctagacaatgctcatgatcgtggagttgctcagataaggttagaaggcgtgtacatatggccttttcggcaacttcggatggttgcaaacaggtgcatatttaattttattttctttgtactaaggagctttattatacggttttatgttatgccttcctgcttctggattatattatgttctgttaattttgtacaagagaactatattattaatatgttctattgccaagcactccaataaacctgcattatgttacttaatgcaagcttagctactattacaaattcattcaaattccttggttatcctgacagatacttttttttttctgttagctagtgctaatgtttaattgtggtgtcacattgatttatattaattacaacgagggcgacattacatcacctttttgtagggtggcatatttatttgtttttggtgtcagttctgttttggagtattctgtagtggcacatgtaaatcttgtccttctaccatatgatctaatgcatatgtactatactgtccagtggtgcagatggcgagccacttcaagaagaggattacttcttatcaaatccatatcatttggtaagaagcatagttcttttttctttattgacttttcacagaatgtcttccagtagtttcctcttaccaaatgccaccatccagttttccttgtgtactttctctttagatatgcatgtagtcccatgacatttacattcattatgatagtaaaagaaccccactctttaagctaatgtacacgcctatgacaatgcacttgctaaatttgtatcagctgcggattttctcctctcaagtgttccaagaaacctctgaagagaagaaccggaggaagaattgtaagattttgacttgtacattgaatactacctacaacctcatgtggttttgatatgcgtgacctcttccttatcagctcttacttacgacatggagaagcattgtagcgtcgaaatagctgctaaggtggtccgtgtgtcctctaacctaaatggtattgaatttctttgtgaaattcttaaactcatttctcattggttagtttgttgtgcatcaccaaaagctgcatgctcatatttcaagttttcagtttgtgattgcctttcctttcattcttcaatgacatctaaacagcgtctgtaaatgcttcttttcaactagagggagagcatgagaaataccgtttggagggattgatggagagtacagcagtggatgatgatggagagtgtttctcaccgatcttattaaatgcaacatcattgaatgttgaagtttattacaacaaagcagtcaattatacactgatggtcacttttgtatcctttgtgactcttcaactttctttgttctgattttttattggtatgtactgtactctatgtgaattccttaattgagtataccagatctccttcctccaagttttgttactgattagacaaatggaacatagcaacacccaatctgtatgtattcattttccttttcagaatatgtcagtacaatttggacctcttgcttttcataacctcaaagattccagttttgaggtagtttatatcattttgcagggagctgccaaggtttcaattctaatgatagggcaacaagctatcatggatgcatatctttgtctactgcatctgactgctgggatattggttggtgagtcttttgaatcctaaaatatcagatgtcttttttgtctattattttctgataagtgccaactgctagtatcacccactctttctttgctggtaaaagttgggtccttgtgccacttgttctgacatatgctgttgctatgttccaacttgcatgaagttcaagtgtttctgagcaattagctgtaaaataaaatgtcttccagtagtaatgcgaaaataattatgttcattgattttttttctctattaaatttaaattccactttgattaatggttattccatttacaatggtattttctgttgaagtcttgaagggttgaatagcaatgcaatataatggcaatctgagccaaacacaaaatgaacatgttatggttacatatgctacttatcaaatagagatcgtggataaaaatgatccaccgttgaacctgctactgatcaccagttaaataccatcaacataccccaagattgggcccagcatgcatgcatggtctgaatttgccaacccactcaaacaagtcctgtaatttcactaatttgtaaacccctaggccattaatctgaaatgctgttagtcacaatattaactaagtggaaacctttaagcttttcgtgcggcctgatgcttataatgttttaaattctgcatatcttcaaaatttattggtggtattaacattttaattgcttgtttgaattatctacagagtctctctttaacgcattcgcaacggctgctttcttcaagtttgtcgtattttctatatttgagatgcgatatctccttgccatatggaaagccagtagaccattgaacagtggagaaggctgggaagtaatgaggagagaattgtctgttctttacagccgcttttgtaagttctccattttcatctggtttctccattgtcttaaaaaccagtcagtaggtcatctcttccagccaacatttattatgcacaagagcatgaatctgcgtaaactttagaactttacatgggcatgtaatctggatcacaagaagattgagttcctagcagtctagcacccatgccgatcattgttcaattagtaagatgtcatgtgctcaccatagttgacttggcaagatagctcctgtgctgaccccatttctcagtcattcttatttatggttctacacatttacctttcatttgaatttatttatgataagtgatacctaatgtgtaagtgagtgggcaaagcacccttatgtgctatttgcctatttgttgaagcctttgagtatgttgttctgttggaaccattaggatgaatatttttgttgcttgttgaaacagcctatttttccattgtagtatcagtatgttggtaagatgtcaaattagttgacactttccacctttacatcagtgtttagcacttttagcttttattttacaaaatataatgttcaatttgcgttgtgttattcagatggcattcttttgggagggatccttctcatgtatgagttgcacaattttctgcgcccacttcttttcctgatgtactccttttgggttcctcaaattgtcacaaatgtcatccgggatacaagaaaacccctgcaccctcagtatattttaggcatgacgatcactcgccttgctattccactgtatatatttggttgccctagcaatttcatgcgcattgagcctgacaagacatggtgcatagctgtgacaatattcatgggtatccaagcggcagtgctcctgctccagcactattttggttcacgctgctttattcctcaccaggtaattactacatggtctttcctaaatcctcatacacagttgatctgttgatctttcctacacgcactctagttgccattcatggcattaaattccatgcctcccaagttttttttttccttctatgcttgctgtattatgcactgtagtacttccattcctcagattggaacaatttgttctacctgtatcacactatcattaataaattgtcatgggtacaattttcagattctccctgagaaatactgctaccacaggaaggtagaggataacacaaatcagcccattgattgtgttatttgcatgactacaatcgaccttacccaaagaacaagtgaatacatggtaattatgaaatcttgttgcctgtgactaactgtgatgtcatagataactttggctgaacgtgtgctgccttctccttcaggtggcaccttgtgagcatatattccactcaggctgtttgcaacgttggatggatatcaagatggagtgcccaacttgcaggcgctccttgccgccagcttagatgagcactactttgtaccatatagttaacaagtaggtagctcagcatattcaaggtattacaaactcaactccttttcccttttatccgtaaaagtggctttatacatctgcagcttgacggtttgtctgtttcgatgcatttttaggtgggaattgaggtgcaataagacgagttgcaaccatgggtggtttctcgaagatagctgtagaaaatctgttacgcttttaatctcaagtgatctctgtgttgtacacaaatcattgtaccaattctcccacggaggaaaaaaaaattttacttatgcagtattctcgctcggcatgctgcgttcttatgtcttcttcagatctgtccttgttttgattatgtaagcattgcacaaaaggtattctcacactgcaaaacgaactacggtgttccaacttctgcgatctgcggtaatgcgccgccacccatgccgttgaggtgtgtgcccctgctgttccggcgtttgttgtcgggtgtgctgtaccccgttgaggtgtgcccatgtttaaacgcaggcagtcgagaccaacacgacgagacaggaatgctgcaattggagaaagaatatgaggcccctttcaaatggaggaaaaataaaggaattgaaatcctacactattcatatctttgattcgtaggaacgagaaaagaaaaaacgtaggaaaccttcctattcctacgattttagaggaaaaacgtaggaaatttaacatctattctaacctcttggaaaattttctctgagtctatctcttggaaaatttcctctgagtctaactctcttatctaattcttgtgttttttctgcggtctaattaaacggttattcctatgtgtgtttccggtattttgtaatcctctgttttatactttatgttaaaatcatgtgtttttcctattcttccgttttttcaaccttgcgattcaatggggccctggaagggaaaaggagagcaaaatgcaagatactgcagtggacgagaggtcacaatgcattgaaatcgaacttattcacaatgcacttcaatcatgtttttctttttctttcgtacactagctaaagacctgtgcgttataaaagaatattataaaagataaaacaaaagcaaaaactttatagcataactagtcgatttaacatataatgcaaagacatccatactaaaatgtgttgctagatcacctctttttatcctctttgtcaatttccctaagccataaagtcggataatacaagattggatgcttataattcatctgtggtagtagatgaatttaaaggttttgtatgtgattcctttaaaatttctagaattagcatttttatggctattcatatgttacggagatctcatgcttatgttctgacatgtaagtttgtggtgttgaagacaaactcggacaccacaaaaatcattctaagtagtaaagataagagcacttcaatttcctatagagattgagaaaatttaatttcaaactggacataaaggatagtccaccttaccagttgcaacagtgccaccgccaattcttttaccccttgccagtagtactatgtgccattggtctcttgtgattaacaatcggaagagaaaaaaaaactctaggtttgcttctctgtgctcatgttgacaagttttactttgaaactagtactatctccgtttctccgttacaaaatataaatatttttaagattgtcacatgtattaagaaaatatgtgtaaatgattggttgaaaaggaaacgtaggtaaaggataatggttacgattcgttgagaagtaagtaggtggagaagtaattttattttaatataaaataccgtgctagaaatagctacttcatttgttccaaaatataacaacttttaaccctctggatttgtcacaaaatgtaacaacttctccaccaacattctcttcctaaccaatcacaaccctctagcattcactttttctacctacctccactactcatccaatcacaaccctccaccattcacttttacctactttcttaataatcgtgttcaactttaaaacgtcttatattttgggacggatggagtatattttggaacgaagatatcaatggagtaacggaacagaagaattactgcaattggccgagtttagtttcaaattttttcttcaaacttttaactttttcatcacattaaaacttttttacacacatgaacttccaacttttccgttacaccgttttaattttaaccaaacttctaattttggtttgaactaaacatgcccttggactctctacgggaaatttcactcacctcaacgaggccactggatctcaatcgatagctggagcatccaataccgctactccagcgtagtggtagggacaaatcgccgcaacaaccgggcgcactttcccactttcggtccccccccccccccccccacccgtcgtcgataccgcccgccgggacggtgcaataaacgttacagtgagctggaaggacatgctgcattgcattgctgcccggctgcccgtgatcttagtttcgcaccgattggctaaggttgatttgctcccgatgatttctccacgaggccgtagtactacgagcagtagctgtgtaccccgacaagatgcaacccttttttttctttttcttttttttcgcgcgcctattcatttgttgggtgaccagattttttctatccttacatttacaactaacggattacaaaagaaaataataaatacatatttacttacacaatatttatattaaaattatagtgcacttacctgtcatatcaactaaatttacaaatgtaattttagttatataggactgtaattctatattttaaagaaaataactaatacatatttacttacacaataatttttatcaaaattacattgcacttacatgtcatatcaactgaatttgcaaatataattgtgttatataaaactgtagttttatattttatttcatcaaaccaaactaacacgcatggttgcatccgttcatattccttatctggttatagtgttggttgtgtgtccaataaaaatgctactaggtggttcgtgcaggcgtgcacggtagggacgcatcacagccgttaaattaagtcatgcccaagcgatccaacggaagcaaattctagtgatttccacaaaaaaaaaaaatctgtcgcgtgatgtttaacaaaatcgttcagaaaaagagaaaaacggccgcgcaatttctggcgacttcgagtttgaggctttgagccaaagctcgcaatattctgggcttctgtcgagtacgagctcgaatcgaatagctcgccaggggcagggcagctggttgcctggttcttgtccagggcgcggtgtcgcctccaccaacggctgcaccgcggttctatcggcaccgtcgtcgtagcccgcatcgacgttggtagtccaacacctcctcctcccaagttgcctcgatctatctacaacaccgaccaccaaacattatctgttctgaaacaccgaccaccaaacaccgacctccctagttgacagcggaagttcggcggcgacccccactcctttcttcctccaaccggcggccttcctccctaggccggacactgacaagctcctctccctctccgtcaagttgctgcgtggtttggaacagggataacgatgggctcaacagcgctgaatggggacgaaaacgaggttagccgcctcctcatcttcttcctctaccaccttgttgtcgaggtcgctagatccactttaggggtggcaacgcatctcgtggtggtggcctcgccgacgaccgccaccacccttgcatgaggtgtgggggtgttgcacggggccacgcctcttccaacacgccactcgcctcatgcctcagctccgccctgacatatgcctgcgtaatttctgatgaaaaacccgtgtctttattttagctccgtggtctttagattgggagcgcggatgtgtgcgtggcgtgaaatctccgacgtgaacggtcgggggtgaacgccatgtaagtatactgtgaatggccttagcccttggtccggacattcattcctgcgcgctgataaccaattcccagatgattattgttatcctctcctcgggtggctcgtgcgtgggtcgggagcacgaacgtgcacggtgcactcctctcactatccctcccgtaccccaactaaaaaatgataaaaggaggttaacctgtgaccacatcatctgcacagctcaagtctccattactaatcataaaagcaccccgtatttgtctgtcgctaatcacgaatattctaatactacactcggttttagctctcgaaatcagagttttcaggcagcttgttgtttctctgcctcgagagaaaagaaaaaaaaagagaaatcttgggagtgccaaagcggaggagaaaggctcgtactttgaaggggagggaggagcgcaatgcagcgcggatctctcggcgtgctgcggctgcggctgtggctgtggctgctcgcggtctccgcatcaaccgctgttcttgcggcggatcctagcaaaggtgagctttcttgcttgattcttgtttgccttttttagctttgaaaagctcagtttcctgggtcttcctgctgaaatgtttgctaaatgcagcccaaaccagcgaccgtttttagtctgtggaatgaaacaatttcgtctacagaatgagaaattcctggctattttaccccttctttccttccctttttggatcttgaaatgcgaatcgtgtcttgggaggatgtaagcggcgaggtgggttcccccagtttgagtttttgggtccaatgctgcatttcttgagtcttggccaaaattaggcgctgttgtttggtttcaatcaagcaaatttgtgggaatatccttctatttttaagcatttcttgtattttgggggcactgcattgttcacggaaaaaaaagattgattttgaccccttctgagatactactacttatgatatttctgttcccttatcgagttcatccattttggagttcatccattttgggagtactactcccaaggagtccagttttctttgcgagttcgcatgtgctatttgatagtttccattttgctaggacaaatcttgctcaagctatgactgaataggaagtaggaactactcccatttctgtatatttgtactttcacggtttaatgaactcagataatatttgctgtagttgcttgattgattgttcttgtctagcatgacatagctgtgtgccgtaattcaagtatcttgttttcagagccattcaccatccgcataagctgtgggagttttgatgatatccggacagctcctaccaacacattgtggtacagagactttggttatactggtggcagatttgcaaatgctacacggccgagcttcataattcctccgctgaaaacgctccggcatttccctctgtctgatggtcctgaaaattgctactacatcaacaatgttcccaatgggcactatcaagttaggcttttctttgctcttgtggctgatcctaatcttgacagcgagccgattttcgatgtttccgtcgagggtactctatttagttctttgctgttgggttggagcagtgaggatgagaagacatttgcagaagctttggtttttgtccaggactcaagcctgtcaatttgcttccacagcactggtcatggtgatccatcgatactttctatcgaagttctccaaatagatgacaatgcctataaatttggtccttcatgggggaaaggtacaatacttagaactgccaaaaggttgacatgtggttctggcaaaccagcattcgacgaagatctaaatggtattcactggggtggggacagattctggttaggggtgaaaactttgtcttccagttctgacgaccagccgatatcaactgagaacgttatagcagaaacattacttgcaccaaatttttatcctcaaagcatctaccagtctgctattgtgggtactgacaggcaaccaagcctatcctttgaaatggatgttactccaaacaggaattattctgtgtggcttcactttgcagagattgagaatggaataactgcggaagaggaaagggtgtttgatgtacttatcaatggggatactgcattcaaggatattgatataattcgcatggcaggagaacgttttactgcccttgttctgaataaaactattgttgtcactgggacaacactaacaattgtcttgcagcctcttaaaggaacacgtgccactattagtgctattgaggtctttgagatcattctggccgaaaagaaaactttaactcaagaaggttggtgcttgataccctacaaattactttccttttgtttcaagcaaatagcaaactatggtagtggcttttttgaacattgtactgactttattttgactactgagcctttttgtgtcaaattgcgtatgaaacttttagtcccatttccatcttgtagatgattgaggccaccttagcttttcatgatgtatattgatcgatgaaaaatgtactgccaaataaagtagcttttactgaatgcaaaaaatgtattgatgtcttttttcaaagaacagaaaatgacacgcgaatcaccagagtttgctgcttatgtaatgattttcctgttttaatgctttatagtgagcgcattgcgtactgtgaagggttcgcttggtcttcctcttcgattgggctggaacggtgacccctgtgttcctcaacaacatccatggagtggagttgaatgccagtttgatgatatcaaaggccattgggtcattgatgggctgtatgttctctatatcacaaaaatcaatatttatctttattattagcttgctagaaatgccacactgattttttattcgttcaaataacataaatagaaggattccgcacggtctattttctcatttattaaatttcagtaacatgaaactaatacataataataaggtatgttctagtaagcaatattgcatacaattgcccaaccaaaaaaaaggaaggtctgaaggactaataataggacaaaatatgagaccgtgaacatatagtagttaactaaaagatagtgccaaatgacatcacttgtgaaattccacatgtattcaattatcaggtgaagattgttgcaagcatactattgctagtagttctacaacagctatcacctaatcttattgtacaataaatttaaaatgctctagaatttgattttacaatgccatgctgtcatatattcttttcagacaattattgattgtcatgtgattttcccatggatttcctaatgaactgctggtaaaccattgattcgaacaccaatcttttcatagtttggttttagtgttgtaaaagttgtgttttgatgaactaggggcttatccacaatttttggtttctgacatgcatttcaatttcaatagttatccatcaacaggaaatctttttctatcgcaagcatttaaacttaattcctgaacatgcagaggtcttgacaaccaaggtttgagaggatttataccttctgacatatctaagctacaacatctacaaagcatgtaagttggtatctaatagagacgatctgatttcatttttttgaggagcactagtatgctttgctagatcttatgataagtgcagtatctgaaaccttcacattataacagcattaattaaggactgctggaaagtattcaaaacctataaagctgtaacattgcaatggatgcattgacctacacacctgtgcaacatatatgactgttggaaagtggtcatgtccagtatcatctgaaaatctaatatgaatatgggatttttgtgaaatctaaatgacatgttctaactgccattgccataagaaagttttgcccctcttctagtctgacacaagtacaatcccattttgtcaaacagaaacttgagtggtaatagcataaagggcaacattcctgtcaccttgggtactatatcagggctgcaagtgctgtaagtgcacctcaactatattttactattatgtttcccttgattatttcaagaacattcataatatgttctcttgattaaagaaagagtatgtaaaatgtatttgtattctttgtgtttgagcttcttaaggcttgatgccaaatgttcttggaggtaacaataagggaaatttatttgtttggtcaaagcgtacctttttggtgataacacatgacctcagaatgggatattgcaatggttagatcttggcaccttgcatcatgtgcctaaaattaccgatatccctgctcctttatttttattgtgaatattcatccagcttattgcctgttctctgctgacatggaactcaaaagtgaattgtatttcatttccttatactcctgagattgaaactgcagttggaagctaatgattcagttaaatatcatttcttgattaatcctatctctgtcaaatccgcactactcttagaccaaatttaagttatatcgggaaagagcagcagttttttgtataatactaacttgataattatgtttgcagagatctgtcgtacaacgaacttaatggttctattccagatagccttggtcagctggcatcgttacagatactgtgaggacatttattatgcattttgttttgtttgggacatgctttatgcttctccctgttatcttaaaagaatagctctcatgcaggaatctgaatggcaattatctttctggaagggtaccagccagccttggaggaagacctctacacagagctagatttaagtaagcactctcttttcattttgtcactatatgtaacctggtttcaatttgccacatcctccatatacgtaatcacacataccaatctagatacatctggctggtaattgctgttaatagaagattgaatgataacaagttaagtagcttatgattgctgaatgctgatatggcagcttcacggacaatgctggactttgtggaattcccggtttacatgaatgcggcccgcatttatctgtggctgcaaagattggtatggcttttggggtactggtagctatcctatttctagttgtatttgcggcatgctggtggaagagaagacagaacattcgccgtgcgcagaaattagctgcaggtaagaagcaatcataagttgttaaaatctgaatgcagggtgtacgccttttctgaatataaaggactgattgcccatttcccccttatattactgcagcaagggaagctccttatgcaaagtctcgaacacaatttacacgggacatgcaaatggcgaagcatcaccgcccacatgaaagctctcggagcggcaacgatgaaagcactccacatttgcttccttcctagttaattgttagctatggtgatttgttgtttgctcagttgattctgctatcaggttgagttgcaaaacaaattgtacatactaggtcatgtatggtgtatagacactcgtttttggctccaacgtttatggtacaggagcattatcagttgagagaaaggaatgatccagatcaggttgtcctattgcttctgaattctgatggaccaggtggtgtactgactgaattgcaacatcttatgcttgtgcaaattagcagccagattatctcctgtactacttttaagtttgccaaatgtaaattcaggggagcacctatttactgttatataaacctgaaatctcacctggtctgtcaatctgtaaatgttgtttttttttagtttcaattgacagtaatttatttcgagtggcatactgaaaatgtgttccagaacttatacatccctgcggaacagaaaagcaacagaaggtatgcagaaccaaacactgaaaaacaagcatattactcccagtagcacaggcctgctgcatatcagcatcacatatttttatcccatcctactgatctcatgatctcatcaggatgttttttttttttacttatctttcatacctcatagaccgtgtccacaccagccatgtgtgtgtgtgtgtgtatattacacacacacacatacatacatacatatatgtgtgtgttgtgtgtgtatatatatatataagctcgccgccggcgaatcaccgggagacacctgggatgttaacccattggaggtgcaggatgatctcgccggtatcggtgttcctgagcttgaggacgatgtcctgggacaccttgccgtccttccatgtgatgtggctctccgccgcgaagcagttctcctccttgtccgggtggatcgtcttcatcaccgcgccgtcgccgagatggctgtggtcctgcttggcgatctcgacgaagtccaggatgccgaactccgcgtcgcccatgctgtcgtccttggtgaaggtgtccttgtcaaacacttcctgcgtgcaggttgatgtttcagaagggaccagaggtggcaaccaaatgcttagaagtaggcttatacaagaatcagtgcaaatttcatatattatttaacatgaaaactaccgttaaatcaaaataaacgtttgagatttgtccgcgttactctaagtaaaacttttactcccggatttaacaacgagggaatgttttaccgggagtaaaagttttacttaagatgacgtgaacaaatctcatatgccaattttttttatccaacgatagttttcaggtttacgttacattttgcactacatattttcccaacttgtaatgaaacacttgatatcttgaaggaagaagcactgaagtagtgacgaaccgagaacggaaattatcaagggtctaatcatactccctcagttctaaatataaggcataaccacacacttaacccaacgagcaagaaataattattatcaacttctagttcacgtaatgtaaataaatataatgtatgcacccaataaatcaagagatcttgagggtgaaggagagtaggtgctagctagttacatgcatatacgtatgttttatcttataaaacaattttaaaaaatagttttacgttatattatgaaatagagagagtaattaagtatctaacttatgaattgatatacttaattaatataatatacattattaaaattggataattatttatctgggtcctatgacctcgagaaggataacgtaggaacaccactggctggctgaaggtactaaaatgtgagtggaaatgctgatgaacttacaattttaacaggcagcatcatgtttgtgattgataacgtgagttcctcgttccattctgggttgatggaatgatatcttatacttgacttgactttctgcacatcgcacgaatagattagcagaaatgtcaacaaagaagcatcattgaggataaggaagacaagaataagtagcctgaatttacaccatttcactatataaaacgaattgtcgtaaccagtaacatcatacaaaacgaactatttgaaaaaaaaatttctacttggttttcctatcaataataagtactacatctatctacgacctctctatctctttactaatactccctccgtcctaaaaaaactcaagctcatactacgacgtgacacatcctagtataatgaatctagacgtactctatgtccaaattcgttgtgtcacatcctagtactaggttgtctttttttgggacggagggagtatgagatattgtagagttttgcctgtctcatcaaccgcttttcatttaaattttttaacatcttactcccaacaagtctctcacgtccaaccatccaaactccttttcttctcaatctggcttagttcttttcagcaattccaaacgacaacttcattgttttcacgaacacactactgaacttatatagaaacttatttaaaaaattaaataaatatattttctaagtttatcatacactaaagagctttctcattttgcgcgtggttggatatctcatcctagaatcacaaaggaacgggacctttatctctacaaaataacctagaatccatttacacgtaacgtagaataaaaacaggggtggagccaccgcccggctaccctggacggttgcccaggctcatcagtgaaaatgctattaaatttgtatgttgttgttgaataagttgatgaaatatttatagcaaatactagttacagtgaaatttgtttgggctcaaaaatatttctggctctgcaacactgaataaagaaaggaacttggaaattaaatgatgctcttctatattcgagggtccctgatttcttaatctgttttagcttcgccattactccgaattagctgcttcaattccgcgttggccggaaatggtgtgactgatacaacgatcagtaagtacgtactactacacgtacatatatacaggtcgattgattaccggccttaatggagagcttgtgaatcaatcccatcagggctacgtataccgctcgctcgatccaaattaatcgaaacaaaagcatgcatgtgcgatcaggatcgattaaaaaccgagacgatcgacgacattacgacaaccaatcaaaaggtaattaaggtggcactcgcctagaagagcatatgcatgaacaaggaggatccaaggaaggaaaggagaagatcgatcgatcgatcgatcagcaaacctgggagccgtggcggaggacgacgtaggggtcgctgctgtgggtgagcgggtcgcagatggccaggttgaggccccgcatgacgcgcaccttgagcaagccaagcaggcactccatcgatcgatcgaacgagatcgtctctccgggctgatcagcctcctctcgcggccgcgcgcgtcgaccttattaccggagttaaagctgaaggaagaggaggaggaggagacgacgggcgacagaaagaaacggcaggaaggcaggcttaggcaacgcaaaacttgggcgccgtggaggaagatggagaagctggacgccaacgccgggcagccagccaaaggctttttatattttcattaactacacggatgcatcatgcatatgcatgatatttctgaaaccgctccaatccacctccacgcgccggtaacgctaccaaatttaggtaatactacttgtaggaacgatctgagtgctcagattataagggtatattaggcctggttcatttggcaaaaatttttgcttctgtgtgtcatatcggatatacggacacatatttgaagtattaaacgtagtctaataacaaaacaataaattatagattccatcagtaaaccgcgagacgagtttattaagcctaattaatccgtcattagtaaatgtttactgtaccacaacattatcaaatcatagcgtaattaggcttaaaagattcgtctcgcaatttacacgcaatatgtgtaattgactttttttttgtctacatttaatactccatgcatgtgtccaaacattcgatgtgaaatttgttttaggaactaaacagggccttagcactctctccgtcccaaaaatgaacatttttggacttcgacacagtattcaggatgctattttgaccaataataactataaaataagatgttttaaataaaaagagttatacattatgatagtttgtttaatgataaatttagtaacatcaattttacatgattgatcctttttttctattaatagttaaagttaaaaatatctgactggacaccatacttaaaaatgcttatattatactccctccgttttttaatagatgacgccgttgactttttctcacatgtttgatcattcgtcttattcaaaattttatgcaaatgtataagatataaatcacacttaaagtactatgagtgataaaacaactcataacaaaataaattataattacgtaaattttttaaataagacgaatggtcaaacatgtgagaaaaaataaatgacgtcatctattaaaaaacggaggtagtaggatggagggagtacttagttactaactctatagttaggggtaattttgagaatcaccgtcgctacccgttcacccggccatggcggccgctgttccacccagtgatcactgccctcgctctcgtagttccgtcgccgttcttcccagccatccttgcccaggttcgatgccgtcatattcgtcctgcggcacaagctctagtaaaccacgatggcctagctagattatgctaacagtaaagaggatcgtgaaagacgtttttgatggattttgttcggcttttcatgatttaccgtggtaagcgaaacctaattcccgatatccgtccgactgttagctttctgccatgctaaggaggacattgacgaagcgttcatttgtcctcctccctgacggcgatatcggcggccggccggccgtgcagtgcagggcagggaagggcagggcgtctcgtgcgagcctgcgttgcggcgactcgtcaaaacatgtcttccctccgtttcaaaatgtttgacaccgttgactttttagcacgtgtttgaccgttcgtcttatttaaaaaaattttgtgaaatatgtaaaactatatgtgtacatg

SEQ ID NO: 29312 - DNA, 9987 bp, Oryza sativa
tcaaacattttgaaacggagggagtataatataaggagttttaaatcaaacatgggtatttattaaatatgttgacaagactaaatggagaaatattgtggttgattaagaagaaaatgtataaaggaaatttcaatagtgaaaagttatgcctggttaataagagaatgtaggtggatgaattgttattttttaaaaaataatttttaaagatttaaagttgttatattttagaagggatgaagtaaacaactgcatgcattttgttccacagacgacaggatcacaggaacatttccgtcggatcagtgaaatgaagaatgcgtcaaaaacaatttagcgaaaacggatggtgggcctcgctgagccaaaatcttagcccggcctacagaggccagcaatgttgggccgagacgcagaaccgatgattttgttctcttctactctttttttatcactactatagaaatggacattcaaatcgatactataaataccaaaaatgatataacatttatagtgttttttccacccacgcgctcaccagcgagagagccatcacaaaaaaccggcatctttctctccaaatagatgccggtttttaaattgaacttgcacctatttttcctgtcaaagaaagatgccggttttaaaatttagacttacaattttttttgacttttggcttagtaactttgactgagaagagaccgagagcttgttcgggtggcaagcgtcgccggtgggcacgctgcccacgagcattcgaaccccaggttcgacgctcgtgctcgcccgagggatttttcccctctttcccaggactgactttggttggtcctggctaggtaatagggtacacacgcgtgcgtgttcagtgggactgcacgttttccgtgcactgaggcctagtgcctctaatctcattcctagcgtgtgttagggacgtgcacacgtgtgtgtgcgtgtgtcgtggtgagtgtggtgtgtgtaagtgtgcgttatgagttgtacccttctaaaaaaactttcactgatgatatacatgcaaatttcagatttaggaatggctttggacttagttattttacactaaggaaggtttagacttataatttttgactgaggcatttactctttttttttttacatttctatgtgttgatatatatgtgaacgtggatgtggatggggttgtggatttgatgaaaaattcagatgtggctacgaatgtgaatgaatttgtgtgaatgtgaatgaatgtggctgtatactaatgaatggatgtgatttgagacaaattatgttacatgtgatttgtatatgaaattggaaggtcctgctatttttatttttttattgtcaacataagggtgccggtctacttgccacatgtccagttcagtcaaaaactggcacctatatgctatttataggtgctggttttcgtaagaactggcacctacactacaccagttgcggttttggtcaacagctaaaatgatctacactcacgtctaaagaactgcagatatgcaatagtcttgtcgtgggtgattacatatggataccggttcttggatgaaaactggcacctatatatttttagtcatcagtgtcggctattagatgctggtttgataaatctggcatataagaattttctcaactgccaccaatgagggttcttttagtaatgtatactcattttagttgagtttagtcccacgttggtaattgatgatgggggagcacgacttaaaaaagtggatgccgtccttacctatcagactattcttttggtttgtgtaggcccggaatctaaagttgtgggtccggttgggcctgtggtggagcaggcccaatgtgacctgggtgacccacagttggtgggctgggctgcgtactctaacaagtggtatcagttcccaaggtttggaacccgaaacaatttttatgggtcacatggtgggaaggccgggtaacaagtcttcggggtcacatgggttgatgtgacgggggagattattgggtttagtcccacatcggtaattgatgatggatgagcacgacttaaaaggtgggggtagtcctcacccatcagactgttttttgggttatgtaggcttaggaccttaagttgtggctctggtttggcctatgggggagaatgcccaatgtgacctggatggcccacggttcgtgggccgggctgcacactttaacaagtttcctcttaatcatgtagcaatgtaaattatcatttttcataaatgagatggaaggtagagttggctctaccttcttatgtgtgaaaaaaaaatatttcaggtcttttctcattgtttgcttgttagtttatcaaccacagtaaaaacttaaattttggagttctttcatcgtaatctattttacagcattaacttcccataactttttttttcaatagttttctacagcttttcaaccataaaccattagagttggccattctcaactctcataaaattttggtatcagagttgtgtgcaattaaaggtggatgaattcaatttagctgatcgatcgaccgcgccttcatactctcagacacggctctgctttgagaaagcggagctaacactttcacgtggctagctagctagcttacagtacaccatgcagcctggaaaatattagcacatcaagttaccccatatatcttggacgatatgcaagtgtcggacggaaagcaccatcacgcaaacaagctggagtaagaaacgaaccggtgctattccccttcagtcttgacgttcaattagcagacatgctgtgttcgattacagaggttgggaacacatgctctgtacacgaaaaacggagtggtctattagtacgtgattaattaagtattagctaatttttttttcaaaaatagattaatatgattttcttcaagcaactttcgtatataaactttttttaaaaaaaaacaccgtttagcaatttaaaaaacgtgcgcgcggaatacgagggagaggggttgggaacccagtgatctaaacacagcacacaagcatcaatccttgcctgaactaggactcaaagcaaacatttatgtagctatagctagctactagctactatggatcaaacgttaacgtgtgttgtctctctctatatatacacatatgtttatatgcatgcttgtgatatccggccattgctgcaagaagactacgagcaagcagtatagctagctaggaagctagcgtcgttgttgcccggccggcgccggagaagaaggagaaggagaaggcggaggtaggtcgagatcaatggcggaggcgatcgtggggccgctggtggggaggctgcaggagctggcgctggggcaggcgcgggcgctggtgggggtgaacgccgacatccagaagctcaaggacaagctcatgtggctgcaggccttcctccgggaggccgacgccaagcgccgcgccgtctccgacgaggtcaccaaggtgtgggtgctgcagacgcgggacgccgtcttcgacgccgaggacgcgctcgaccattactatctccagttggacaagtccaggtatgtcacattattagtactactgtatactacctctatttttttaagtaacatttgattatttgttttactaaaatcttttagtatgaatatgtaaaagtataagttattaaggttatagtttttcaatgataaaataagtcacaagacaacaaagtaaataacatttatattctttttaaaaaagacgaatagtcgtacgttacatgaatacattaaaaaccagagagcgtttcaaaatactaataacgttctagttttatcataagtcaaacattttcatctttataattgttaatttttaaaatttcatatagtttaacaatgtttgagttatatattatggaagtatttcctatagtgaattaaaaatataaatcttatgatgttaaactatatgaatttatcaaaattgatggctaaaaaaatgaaatgatggacttagcactacttaaaaaactattttcctgtaagagatcttatgatttttacaaacggaccgcgtaagttgccgtgtctggaaaaatcgagcggtattttcgcatatggctccttaagacggccgtatggaaaaatcgatttttttccatgcgggctcttaagagatctgcatgcaaaaaataaactcattttgtgaaaataaaatttgaaactagtttatctcactcatttgaattccgaattggatgattcattttcctaaatgttactaaaatcatgctctatcatattatcgtgttcttactgctattattttggccttttttttattgtgactttgttttatcaattaaaaatttgaattttaaaacttcaaaaaatattttgaagtagtaaataatttcaggtgaaaaaaatcatgaacataaaattgtagaactcatcaagacgtacaacttttattttgatcatttcttcatccaacaatgtgattataacattgttcacaaaatttacatatcttatctcttatagtttataaaaccaaatgagagatatgtaaattttgtgaacaatgttactatcactttgtcggatgaagaaatgactgaaataaaaggtatagatcttgatgagttatacaactttgttgttgatgactttttcagttgaaatcatttagtatttaaaaattttgtttgaagttatcatattttcaaattcaaattcaaactattcgaacaaagtcatacagaaaaatgaccaaaacaaaagttgtagatcttgataagttatacaactttgttgttgacaatttttctatttgaaatcatttactacccgaaaaattatttgaatttcttatgttttaaaattcaaattttatatagttcaatcaaacttggatgaagaaataaccaaaagcaaattggtagatctcaatgagttctacaactttgtttttgataacttttttcacatgagttcatttattattataaaattcgattcaaactttaaaaagccacatgatttttgcatgcggatggataagtgatctgcactgcatgcaaaaatatcacccatatttttttcatgagagaatccactcaataccactgagtttatcgcacttctacaatctaccactcactttgtcaagttcaataatataccatcgtgttttctttacctctattgtgtgccctcgccgtccatgagctgttagctgacatccttttgctgtattgaattttatcttaatgactaaaataccctttgactaaaaccaccagtacccaccagcttcaatgtgcactagtagtttgaacggatcatggtgaggacaacgatgctgccgaggaaaccccccgcaatggagaatgtgggcgtcgacttcccgacggatgttctggtggtcatcctatcgcagctcccgacgagctccttgtgacggtgccggctcgtgtgccggcggtggcgcgacaccgtcgacaagcgcacgctggagcgtgacgtccggaccaagatgctcaccttcgtcaagggcctcgacaatgaggcgtccgcctacatcgtcgacgaggcacgaggccgtcacaggtgcgtgtggaccagctcctgctccgtcgacatgatcggcacccgcaacggcctcatctgcgtcctggacggcgacacgggcgccgtcacggtggccaacccagcgacgcgcgtcgcagtccatgccgccgccgccgtgacaggcgtggctcttgccgtgctccccagacgcgtgcacgtcccgtgctacttcaacaagtctggcacgttcgatgccatgtaggtgtacgccctcggcggcagcgcaccgctgtcatggcagagtgtgcctaccgtaggtgccagcggccgtttccagccgggaggggtcgcctgcgtcgatggcgtggcgtactggatcaccgccggaatgcagctggttgtggccaggtcgtcactgggtactgagtggagacgggtggccggcgcatcaatggggattccggcgaccggtggcgcgtcgattgggattctagagaccggcgggcggcggcacgtcgatttggagttgggcggtcgacagcgcgtcgttggggagtcgggctgccggtggcgcgattgggagtcggcgccgcctcgctgggaagagaggaagagaatgatttaggggagagattgatttgctagggttttcacttttcagtcaacaaggatgaataaattagccaaagggtattttagtcattaagagaaaattcaatacagcaaacggatgccaactaacggcgcatggacggcgagggcacacaagagaggttaaagaaaacacgatggtatattattgaacttgacaaagtgagtggtagattgtagaagtacgataaacttagtggtactgagtggattctctcttttttcatctccctccactgtcttaatagtacgacattcctaaactcaaatgtaaataggaggagaattataccaataggaatgtcttctttccatctttctttcattgtcttaagggatgccaatgccgaaaccgtttcaccatatattctttagatgattgatgcggttacttgtagcttcaaatggcctcgcacggtccatcatgacaaagccttcactcgcccttgatcaccggatttggttcttcggtgccaagccccttgcttgcccttgaccgccgcatggtccatcgtaaccaagcatcgcttgcccttcaccgtcttgccatagtagccacttcgtatcccatatcttcaatatcttcactttgtcatcattggcatctttaggtgtaatgagatcacttgagcaacaatacctttgcaatccttgggacctatttctctcattcaactcaataaaattattatatgaataaataatgagtactaatcaacaccacaagtgtcatatactcgaatgtatactcaaatgtaaagatcccaattaaataaaagtgaatcacttggatcaagtacatgcataactaaggtatagtatttactccccctaaatgtatgcatacgaaatatttgtgtgaagcaagagtatgtataacaagatatgaaacattgagagcttatcctatacaagaatagaagacatttatcaaatatagacattaaaataaaaacataccttcatcatctccatgttctcaatgtaaagagactaaacaagatatggctcaaacaaaacattagtctcacatgcttatgtaatcacatgaaaatatcaatatgtgaacagagagaaagagtgatacatggcttgatctctattcatttcatctttgtgatttaggtccaccatcaatgaacgtttctatctcaacttatatgatgtctgggaatcacttctcacatattccgttttcatatccatatgagactagtagacaaagaaatgcttataattaacaatattagtctcatgtaattggatttatcattaatcaccaaaaccaaattaatggcacataaactttcacaaactccaattgtactaaatttggactccctccaaatttaaacttctcatcctatacgcatacaatatctccatcgtatgccatatggaatctccaacaaccacatgcattgatctttagcctaagcatcctgcaagatactccgattgtcaggacatcatcttctcccaagttaactcctgatccatctccggtaactctctctctcgaggcgtcaagactcacctacacatgaatctaacacaaaaccatatccgaatacaagttctctccaacttgactcaacattagcatacaacagtattacatatgcatagaaatcatctagaagtcataaacatgaattatccacgagtatccaaataaataacccgaaaccgaaaccgatacagagttggtcagtcaaaccgcgggctgaccagtctgaccgcgcacataacatcggtctgaccggtcccgtcagacaaaaatccctgtttaccacttgaaaacattgttcacaatcatcccagtctgaccggtgccaaaaccacttcctcaataatctccatatatcaaaacaaataatctcagatgtcaattgttcatcaggaaataagaatcaaacacactttgattttacacttgcaaccacaaagtttagccaataagtagatgtgagtctcaaaagtttaatgaaacattcatatcttaattagggtaaactttggcaacaaaatcagccatctttgttttaccaataagttccatagaatatttttccttaagttttagtacaactatagtttagtttagctttgtatgtatttatatgatacttatacatatgcttttggtctatctagattataaatttttttattttagcaactattacttagtggggatttgcgtcgaaagtagagatcaattgtcagtactggtctaatggtctaaaaaaaggatcaaccacttgattaatagatgatctaataatgaataatgcttctatgcttcaacaaagttgaatatatggtcttgttttgagatatctgctcttgatggtctagttttaaaaaaaaattgctctaatagttttatgtacatgtattcaggtacccattgtggattcgtcccaccgcaaaacttgtcacgacctttacaacacaggcacacattcgacacaagctgtctaggaaaataaaagcaatcaattcaaggcttgaggacatcattgaaaacaaacataaatacaagatcgaggaggcaaacacgaagacaactaggacatggaaagcttctacatcaatatcttacacccataaaaaattgtaagtagacagaagtaccttttgcaatatttatctacatgtattagatctctagtattatttggatttggttctttgattattcttctgtagaaataaaggcttagctattccaacttcaagtttcaaaattgtggaactttatcttttagttacattaaaatcagaaacatggagttcaatagaaaacacttgaattccaagattaagtttgagaataaaaaaaaatcaaattattggacttcaaatataaatattttaaatctcatttagcaaatggtattcctgtgttggtgctttttctgaccaacatgggttcacctaaaaatttacggtgttaacagggtcgccagccacctcggagtagaaaagctcttaacaaagatgggtttagaaaagaataaaactaactagcggaactgattcagagatcaaaccaacgtctaggctgatttagatcgatttgaaaataacaaccagtctcatgggtgaaacggaaggtttacgaggcaaaccttcaaagggtattgcactctcgcagcgaaggcggatgatatatggcgcaaatcgacaaagatggatgaaactataggataaagtaaaaatacatggctgagaagtaaatgtaaaagaacgattcgatggatggtggtcaggggtttagaatcgaaccatccattgcccttatgaagaggttggtcttgtctccgtagggccttctccacatcctattaggcttagagaataatttggactatagaaaccttggaacaaaataaggaaactaataacccacaaattgggctcgaagtcgaatctgctggtatgaccggccacataccgtcggtcaaattgggcccacaccatcggtctaatcaaccctatggcagggctcaaaccagcttcatatggcaaaccgggtcttttctatatatggctgtgttttcttattttcaatgtttggtgtctaatttaggtgttaacacttttatagggagtttttcgtaatgtaggaattaatctaaaccccactatcaagtttatctagaagcactactcaacttatatagtggacataattaacacttcatcttttgaaaccattcatttctacagttacatct

SEQ ID NO: 29313 - DNA, 7642 bp, Oryza sativa
tattttaaactaaaataagacttgtataaaataaaatagaaaagtataaaaaatatcaatagggattgaattaaattaattagagagactctaataaatttgtaaaaaatagttattacttttcaaaaattggaacaaccattgtatgttccattgccataaccatgtttaagtgcttagatattaatggtcttccatctatcctataccctggaattatgagtttctccaattattgcatatataagatatactaaggtagcaagatgtagaagtacgtagttggttaaaaagttatatatatgctactattaacattatatttagaactcatgttgactaggtatattttaaaaaaataaattataaatcacatatataacagtgaaacgaggtgtacaatatatatctcctatgtatttattgaaacactctttctagaaaataaagaagattattgataattgcttatagtaatgaattaaatattatatagttcaaaacttacaaatatcttgtaaaaaaattatctaagcaatgtccacgaagaaaattttcaaagaaatagtacttttcaaacatagcaggtgtcatctcattgatattccaccttacaagttactcaagcgtaacttacattacattctcgtgcgaatgcgtgggctaccttcctagttgtttacatggccaacaggttagcccaattttccaagccaaccaacaatacccttatgtgtttgttttcaagctaacttcttaaaaaaaagattggctgaattcgttattaggccaattccgtcctagtttgcatgacctggtaaaatcacactaggttgttagctagtctagttttcattccttttttaggggtgggagagggggggggttgattggggtagaaattaaacccattttcatacttaggctatgttcgtaacttggggttgggaacccatctcctccacatggaaaaggaagcagtccattagcacatgattaattaagtattagctaattttttttacaaatgaattaatttgattttttaagcaactttcgtattgaaactttttgcaaaaaacaaaccgtttagtagtttgaaaagcgtacgcgcgaaaaacgagggagaggggttgggaacccagagcaccgaacacagccttaggggtaaacaaaacacctactataatacatcaagtggttgtagactttttcctttaaggaacccacgaggctctacacctaatagtttcatgttttcagatctctttgaaatatttgaaaggtacaaagagatactgctacttacaagtcagaaggcaaagaaaaaaattaactcttttagtgaactacatttgtggcacaactaggatatagttatcacttattaaaattatacgtactattactgataataacggtatacttatgatttgaccacagggaatatttgcatgagtcagacgtgccgattcatgtggaagagcgaaaaaaactagagaaagtccttcttactacacctgaagatctacatggcaaagaacacaatccagtcataatctctgtgtttggaaaaagtggtgttggcaagacaactcttgtgagaaaaatatttaaagaaataggtaagcagaagcagttcgacattccagccatggagtgttttgcaccttacctatccgctaccaatatcttacaacaaattgttcaacaactaacaacagacaaccaggattgccctagaaataaggtcctcgaaattttagaaaagaaattaaaagaaaaaaagtatttgttggtgatagatggtgaagttagtggtactgaactgaacaacattttgagtacactcccgattggtcatgcgggtagtagaatagttcatatcacagaaagtaagccagaggagccacctagcaactatcatcatgtcaccattgagttgaaaacaattgacaaaagtatatccaagaagatgttcctacaccatatggaagtacaaaatctagaccttgaaaaccatgaggatgatattatttttcagattactggagggttaccacttgcaattgctcttttatcaggtcttatgaaaaccaaggagtccactggtgagtggcagaaggtattcgaatatcttaagtccaagcaatcaaaacaaattgatgatatgctctcaatttgctttgatgatcttccacatgagctgaaatgttgcttcctgtatcttgctgcatttccagccaatgttaccattgaggcacgcaacctagtgtctatgtgggtagctgagggatttctaaggtcaaaagttggcaagtcaatggaggacattggctacttctacttgaaagagttgtcggctaggaatctagtcagtctggttcaaatggacgatgattccaatgttagcaatatgactgttaccatccaaaacaaagtccatgaatttttgcagtttgaagcacatgaggcaagcttcctagaggtacatagtggtgatgatatccccacattgacaagtgctcgtcgtctctccttgcagaattacactgataaatatgctgttctagcaaatccattgccgaagctacgatccatcttctcccagtttgagcaagagcctaaagaggaattggagaccatgacaaaaagcatccaagcatatgtatgttgttcccctcaacaaggtactatagcttctatgcagaagaagaatatcaaatctcacataaaagaactattgcatggatctgagttcctccgtgttatcaatatacaaggcattgagataggtaacaggttgacacgtgcaataggcaaagccgttcacctccaataccttggaatcacttcttgctcacttgaaaacatcccatcatccataggaaatcttacaagccttcaaacattggatgtaagggaaactaaagtccggaagctcccaaaggcattttggatgatcaagacactaaggcatgtgtttggttttatcctcaaattacccaagcaaactgtcaatttgaagcagctacatacacttgattccatagaacttgaagattttgagcaaggcttggataatacacttggagagatgatccatcttgagggcttagttatttggaaaatctcaaatggtaatgtcaaagctctgttaagtgctctaagaaagcttgagagccttaagactctaaacttacaaggtaacaatattacatcaagtgtattcaccaccttgttcttgcgtcgcctcaagtttatggttctagacggggagttggacttttcatctgatcaactgaataatgggttagccctccctaatctgactatgcttacattgaaggaaacaaaagtaactcaggagtttattaacaagctagcaaagcttccctctcttgtcacacttgcgttgtgtctaggatcctacaaggatcaggaacttgtcttcttttctaataaatttcgatgtctacagaagctcaaggttgacgtggagaaattgaagaaagtagaaataaagttgagtatgcttcccaaactcaaaaaattagaaatccagacacatgacagtcatcactatcaagagcatgaagtaactcatcaggaacacgaacagaagacagtgatctcttggaaaaaggaaaatgctattcaagttgaatgatgaagcccctctgatgagatgtcacttctcccactatgcatggctagactccgttatctgttatgacatgcttgttctttcttgtgtttccgcctatacctctctaattaatatatccatagtgttgtctatgtatggattgattataatatttgtctaacccaggtgcggtcagtgttgtcgtgtgtatatatagtaagcttgtgtaataatgtggtaaaaactgtgatgattactctgcctcaagttcatgcataattatacttagctaatgtgggttactaaaacaacaattgaaagttgtacggctagtcccttaagcataccaagaatgtaaaaatgccatgtgtgttcttttagctgagcgagcgtgaacaacggcgtcgtcaagcattggctttgcttctctttactatgcgctacccaaaatttggtcatgtagagacataaaaattaaaaacaaaatactccttttctcctcaaaacagagagaaaagatgtatagtatttctaatgcttctaacatcaaatttatagtattggcccaaatgcccatgctgcaagcgcaacgacaaacacacccatcaatgcttagtctgatgagttaagtctagcggcaccgcctcacaccctagcccgcaccatatctacatgacgacaatcagcaaaacgcctcaacaatggagggcagatctcatccaattgatctcgttcatttgtgctgcactgcaggatggatgcacgaatgcacgtgatcgattggtcaaggtgccatcaaggagatgggggcaagcatacgtgacatgacccgacgacgtacgacagtcggctggttcactaagagaggctatctgcaatgatgccaagcgtaagcggacaaaatggaaccagatttaaaactattttatcacaaaactacagattttataactttaaatagataatagtactatgatctaactctagaatatatagttctttgataacttcatcattaaatctgtattgttgtgatacatatttttaaatctgtagttttatgatcatttgagccaagtatctatattttgtgaaatttactcttttatctacgtacaatcatcattggtatacaatagatttacatttagattgatatataaagccttatcatttaacaaaatagtcctgtaataaataaatgtattatcagtctcttcagcacctgcatggaggacaagttgattctgccttcagcacagcacccgtagagcagctgacgaaacggaatatttgttggtcccacttggcattgggccacccatgcccacaaatccatgacgctgggccttccccattcctcgtgggcccaagcacagagcagtttgggccttacaagcaggcccgccacaaactttcgtttttggcctgcctaacttagcagtagtaggtccccctgacacgacgagctgacgtctcggtgcacctgatcgtgttgccgccgcagccgtcgcgttgccatgacacagcgtgcggtggcggccatggagatggagctcctccgcctgcaggcagctgctcgccggcgagatgaactgcgcgacgcggtccatgagctccacggcgctggggcgcgccggccggtacaggtggaagcagtggtcctcgccctccgactccaccagcgtcacctcgcgcccgccgccgcgaagctgggcggcgtaccggcggccgcgctcactcaggacgtccttctcggcgacggcgaccagcgcgcggcggcatggaagcgacgacacgtcctcggcgggggggtcgatccgcgggtcgtcgttgccggcggcgccgcccgtcacgtacggccagagcgcgtccagcctgcccggcgcgagcatcggcggctcatcgtcgcgccagccggccgccgccgcctcctccgacggcagccaccgcgcgccccagaagcatggctgcagcagcgccacgccctcgatgtcgacgtcgtcgccgtcggggccggcggcccgcgcggccacgttgtgcgcgatggtggcgccggcgctctcgccggcgaggaacagccgcgtggggtccgcgtagcgcgccacccaggggtcggcgagcgacgccgcccaccggagcgcggcccacccgtcggcgaacgccgcgggcaaggggtgctccggcgcgaggcggtactccacggagacgacgagcgccccggcgcgcgccgccagcgacgccgcgtaccggtggaacagccgcccgaacgcgctccccgtgacgaaggcgccgccgtggaagtatagaaccaacggaagcctcctcccttcgccgccgccgccgggaaggaacagacgcgccgacgcgccggtatcctcgtcgacgaccacgtccctcgtcgcgacgccgtccctagtagccggccgcaccgccgccgacgtcgccgtgccgtcgtcgtgggacgccgccacggcggcggtgctgcgcacgagccgctcaatgtggccgccctcgtacacgcgcaggaacgggtagaggtcgacggcgacacggccgccgccgccgccgccaatggccggagatgatctaggcgccatgcatgcacgttacgtcgcacgaatatgcttgcgaaagctgcatgcaaagtgtgctacttatactgtgctgcggtggtgggcttaccgggtcgtctaaatgttcaacgagtcatgcgtgccaatgtgcgcgtcagccgtggcgcacacagtcgggggctcaaatcacatactttcttgcctacaaaatttcgagaagttttttgaggggaaaatctcgagaagttcaaagcagccatcggttgcaaacaagatagcagcagagagtttggaatttgatgagtatcaacacttcacgagcgtagaattctaaacgcatgcatgcataccgtcaattttacgaacaaaaaaggttaaaaagaatgtcgcagcttgggcctaaaagttattttctatccaaaccatcgagcgatatgcatgcatccttttctgcaggaacatgcgtgtacaagttacaagcaaaggaatttacaagttaattttagcctgtgaaagaagggccgactgatttcaaaaagaggggtaaaaacaaaagcgattgaacaagctttcaaagtgtcaatttccatcaaatgtggatatattatgagagatagagttattgcccgaatccatggggatatgagtatatgacctaatcttgacatgtcttctaatttaagttatctataagctcactacatattatcatgaggtaaaataatatacttttcccccatcttgttatatacctttctcttcttcatttactctcttctctgttccataaaagcatagtattcttctctgttttcccctgttctctcctcctatgtatatatgcatagacacaaatatggcatgacataaacaaaagctataagcgatttacacggcatcatgaaatgataagaatatacaatgcactactgcaccagaaacgcccttgttgatgattctttattgcgacagcatatagggctcctagaataatgcgatatatatctcgcaccaggtaaatccttaacccttcctcctcttactaatactacgtaatgttcttgtaaactatcgacaataccaggtatataagcagtgattttaaacctagaagttaatcgtactctagcaactttacgtaagagcatgtacaaatataaagttcaatattggtttgttagttaatatatatcacttagaaaccatcctcatacaatagtgagacaataagatctcttaactattattacaccaaaatattttttttacccttatttccttttcttcttcccctgcaacaatttttttttaataaatgttaagagtcgactctgaaccgttgcatagaaacgacggttcccttttcaccccccccccaactactagaaaaagtattttcgcaggcggacaaaagtga

SEQ ID NO: 29314 - DNA, 38551 bp, Oryza sativa
aacaaaaaaaaatcacggcggcggcttcactgacaccgccatgcgcctcaccgccgctgccctccgccggccggatctgggaggggaggggaggggaccgccgccccgtatccgtgccgccggcctccccctccctcctccggccggatctgggaggagggaggggagcccccgccgccgccccgcgcgtcgtcgtcgccgccgccccgacccgtcgtcgtcgtcgccgcctccgccggcctccccgctccctcctccggccagatctgggagggagggggaggggagccgccgccgcagctccgcgtgtcgtcgtcgccgctgccgccggcctcccccctccctcctccggccagatctgggagggagggggaggggagccgccgccgccaccccgacccgtcgtcgtcgacaccgtcgccgccctcgcctgcctcctccctccctcctccggtcagccgtacgccacgccgccagccggacaccgcgccgccccgccgccttccacgccaccccgcgccgtggccgccgtcgctccccctccgacggccggggagaggaggaagggtgaggggaggggagaggaggcggcgtgaggggagaggaggaggcgtgaggtgtgggaagagaggccggccgtgggtggagactggagacttagaaaaaatcaacacttccccaagtctatttatagtgaagtctattttcgcaagcggaccactgcgaaaatagattttcgcagacggaccgaccatttcaccccgatttatatttttgtagacggtcatttggctttaagagtcatgtccgcctgcgaaaatgagacccctacgttaatatgccttttctagtagtgccccccccccctccctcatttctatcttccacgtcatcaaatttgcatgcatgtcaaccgagagagcccgttaataaacgtggttgtacaagccctaagctagccagctattttcatctactgccttcgtccataaaagatatatttcttgtccaagtatatggctaaaaacaagatcggcaaggagaaagtgcgtattgaaaaaataaaatctattgaataagtccctacatgggcggaatcttgccttcttccatatagcaggctttcctaacttggggaaattttcaagagagacttaaatataattaagtttaaattaaacacaagaatatattgttcctaagagcatgctggtagttaacagtaagccgccgggcacagtgacagtactgcaggcatcttgacgacgttgatgcgccaacgttttacttttctcccaataatttggtcaagatcgatattattcggcgttcactttgctcctaataattggtcaatagataattcatgcccgttgaacaaatcaggtccatgccaagtgcttcagccgcctactcttaattagtaccgtatacgaactcatataaaacctagcaaaagctgttgtaagcaaatgtctcaacaaaatccactagtacatatccttatatatgtgacggcctctaacatgcctggaaatagcgggccgtcacaagaaagtcatctcaattaggccgaaaaagtgcccgattgagatatggtcgcacagacatattacaagggcataaaacttaagtccgtcacggatgacacctatcagtgacgggccgtagtttaggcccgatagagataacgttccatatctcaaacgggcctaaagttagggcccgtcatagatgaccatcatccgtgacgggcaccaactttaggcccgattgagataacattccatatctcaaacgggccttaaattgaggtccgtcacagatgaccatcatccgtgacgtgcaccaacttgaggcccgtcacagatgactcatcagtgacgggctatatactaatccccggttgacacgacttaatctctatcgggcattaactaaagcccgtcaccgatgagtatttttccatttttcatatgaaatgtttatatttgtaagttgaactatagcaaaataattagcttgtagtacaataattcaatttatgagtcaaaataattttacgtgtagtaaatgatatcaaatggaaaagtcatcaacaacaaagttgtatagctcaactcatcaagatctataacttttattttagtcatttttctatataacaatttttgaacagtttgaatttgaatttaaaaatatgacaacttcaaacaatattttcaaatactaaatgatttcaactaaataagttatcaacaacaaagttgaataactcatcaaaatttataacttttattttggtcatttttctatataacattttttgaaccgtttgaatttgaatttaaaaatatgacaacttcaaacaacattttcaaacattaaatgattttaaactgaaaaaagttatcaacaacaaagttgaataactcatcaagatttaaaacttttattttggttatttcttcatctgataaaatgttagtaacattgttcacaaatttacatatatgtgttatagtttataaaaccagataagagatatgtcaattttgtgaacaatgttactatcactttatcagatgaagaaatgaccaaaataaaagtttatatcttgatgagttattcaactttgttgttgataactttttcagttgaaatcatttagtatttgaaaatgttgtttgaagttatcatattttcaaattcaaattcaaacggttcaaaaaatattatatagaaaaatgaccaaaataaaagttatagatcttgatgagttatacaactttgttgttgatgactttttcagttgaagtcgttcactaacaaaaaattatgtttgaatttctcaaactttgaatttcaaatttcaaattgtttaaatagagtcggatggagaaatgaccaaaataaaaattttgcacctcgatgagctctacaactttggttttggtgacttttccatttgaaatcatttattaaccctaatttttgttcaaagttgttaaattttgaaaattcaaaatttgaattgttcaaatgaaacttacttgtacaaaggaccgatacaatagttgtagatctcggtgagttatacaattttgttgtttaggatttttgatggttgtgtatgtgaatgaatgtatatgaatgagggatgttggggtgtgacatcttggcctagggcttaataggattaatagaatactcatagcaacaagttacaactactcttccggaagccaactttgatgttaagcgtgtttggcctgtagcaatttcgggatgggtgactgatcgggaagttcttctcaggtgcacacgagtaaggacaaaaaagattggcctgagagagaggctagacggcatgcctaaaaataaaatttatttttttggagattatactcatctgtgacgggcattaacttagacccgattgagaggactcatctatgatgggcattaacttaggcccgattgagataggtcatccgtgacgggctatagtttaactgatcgtctgggtcaaaagctattggtgacgggctttaattatggcccgattgagataggttcatctgtgacggccgtttgcctgattgagataacttttcacatcagtgacttctagcctgtgacggacgccatgcccgattgagatgggggttgccgcccgattgagatgatggtatccgttctagtgatcccaaattatccatgtcgtcctaactattggcaatgtacaaacttgtgggatggatacagtctagtcgaatagcttacgaaattctcatgtcgatgcgaaaatttgtttcactgcatcctaaattaaacttctataaattggacaagttcataaaaaaagcattatttaattaaaaaagtattatattcaatgatgggtttaacaaaaactaatttggtgtagtactatatttttctataactagtgtgaccatcaactatatttatacaattaagcatgagaaatataaaacattaccaaacaatacctcggatgaatggaagatctataagatattcaagctcatttttggaatccagttcggtcttaagaaacatcactggcttcaaataaacctagcgtcttcatgccaacttcaatttaggtgatcttggatttgttgaaatgcttacattgtcacctttcatatgcatatggcctcatatcaaaatctatcctgagtcaacagaaatcatcaaaacaagacaatatagttgcctaacccgaacttaaacttataccttgcgatagactgtacgtcggtccatccttacaagagtgattttttagtttttggatttttctcataaagaacttttgaattaatggaggatatagtagatttttttagcccattgctagcttgatatatgtctttgattttctaaaatatttttctttttttaagaaaaaacggaggcagtatactagcctatagctactacaactcacaaatctgaacacacaactgtatcggcagccaaattaatagtgaactcggccggcgagccagtcgatcgagcggcacacgtatggtcgtgagttgctagcctcatgagcgtccacccaccgcgccgctattggcttggtcattcatgcatgcaagcatgctgcatgagaaacaaaacgcatattcacctgcacctaacattgactgctagctagctgctgccggcgccttgacgccacaaaacagatattatcatcataatcgttactcccttcgtttcataatgttagtcattataacatttttcacatttatattaatgttaatgaatctagatagatatatatatgtatagattcattaacatcaatatgaatatggaaaatactaaaataacttacattgtgtaacggaggaagtatgacattatcatcagcaatatatctccgcagatatatacatcaaatcattatcatccggctacgctagctgtatatataaacgtttgaatttgaccggtgcaaagtcagacatgttcacgtgccaaatagtactccttttgttcgatattataacaagtcattttaattttttttcctattcaaacatatttagatgatcaaactcataaaaaaaattagcaaaaaacatctacttccgcgccgccaacaccaaccacctcaccgccctcatgggcaggttcaagcgtacgtacatgcctataagcatgcacgccacccggctttacataaacgtttttttctgtacgatagccactataggtactataggtgttgtaggtggatcttaactgatcgcgtctgcaaaaatcgatcttcattttcatatacggctacataaaagacctacatcaaaaatctattttcacaggtgtgcatataaaagtgagcatattttctcatgtggtgttttaagaggccacatggaaaaaaaaagattttcgcatgcgggcttcttcaatgatccgcatgcgaaataacccctcttctccacagatattttctatgctctctcttttccctttcaccacttcaaattttgtcacgatctctcctctcctctcctctccctctccagctctcctctcctctctctctctccttgtctcctttcctccccctctcttcctctcctgaccgcgctggagtgggcagcgctgacgaggcgggctgggagcgggcgccgccactgccgccgatgaggaggcggctgggagtggcaccccttgcatggatccagtggcagcggtcccttcctgcatagatccggcgctgggggccctcactcgcgtggatcggaaccgacgacgacaacggtggacacggatctggcatggaatatggtgggctcgggcggcagcagcgtcactgccgcatacggatcaagcgccgtcaacgactacggcgggcagtgggggcgagtggatccaacgccggtgacgacggtgggtggtgggggcagaagatccgatggcgatgatgatggtgggtccgacgcggatccagcaggcgacgacggcgggctagggttcagtcgatttgggttatttttattttttcgctgaaattattttcgcatgtggccggtattggtgacataccgtacgtaaaaatatgattttcgcagatcttttggcgcatactattgcactggccgtatgcaaaagtcacttttgggcacctataaaaacgatttctatactagtgtccatcgatcccctctcaaagttccacaatcgtctatgtgttcccgtgaatttcttgcatgtagtggcaatgtgagcgccttcatgcgtggccgtatatatggtccgaaccatatggtcgctagctgcaggtcagaagcaagcacaccacggctgcaccactcgtggatcgaggaaggttctggggttcatcagcgagacgtcgagcagtgcctcctgtactcgttctggccccggcaaaggcaacaagtacgtctgaattccgaaaagtgaaaaattcacggcaaagcccaaagagaaacccccacagatcggtaagcgtctttgggcgcgtggagtatgggccgcagcctgcaaaatcagcgcactccgggtccaactcgttcaccttaattcggccggacgcctgactctaaccggcaggtcgtacgtcgtcctagagcctagcaaaagtaaccaagtccaagttcagacacctcctccggcctccgttgcacggcctactacgagctcgtttatccacgcatagtccagtcgcatgcatggctggtgggctgcctaccgcgcggcgtcactctcaacgggaagatcggcaagtctaatttcaaaggattctttttttgcggggaaagggagatatattactcaacaaagctatccacaccaacaaggtgtgagatacaatcacagctattgtctggccagaaggccgtcaaggactcacttccgcccttgtttgctaggaaatcactaacacaattattctccctgtgaatcttcctaatgataatctccctattcccggacaaggggtctctaacctccttgaccaaaaacgctagctctgatctgtcactgctaccagcgccgacaagcttcaaaagctccaggctgtcagtttccacgataaatggaagcaacgtccactgaagagccataataattccttccctgcacgccagaagttcagcttccagagcgccgccgcatctgctcatgttcccgcagaagatcaaactgcctgcactattacggaggacagcacctattccccctgaaccatatcgagcgtcaaacgacccgtcgacgttcagcttcatccagcccgggtttggtttctcccaatgattaagcaccttcggatcaggcacctgggatgtccccttcatgcagcccaaattcgaaaccacaaattttcctttggcgaaatccgcccgagggaactgcttgatttctcgcaaagatgacacataactgacgataaacctgtgcgagacagacactggtggagcagatttcccatggtatatctcattcctgttgtaccagatgcgccaaagcagcatcaaaaacattgccccttcctcttttgcaatcagccctagctggtcaagaatccacccagagcctgaccaagaagcccccgcttcaaatgagatgtcctttgaactgcgcagagaaagccaaaggttagtcgcgtgagggcagcggcataatgcgtgagctacatcttcctcttccctgccacatatgctacagatggccatcggttctaatctccttgtcttcttattttgcagagtagccagactattagtagctgctttccacgcaaagatcttaaccttttgaggtatgttacagttccaaactaacttccaagccttgctaagatcatgcccagacgagctagagctggagttaacattagccagggaaacagccaaatgataggcactcctaacagagaaaatcccatgtttatcaggatgccatgccacaaaatcagcttcttgagatcgtgagggacgaatcttcagtataatatcagtgtcaatctggttaaaatgttgctggattctttcaagatcccactcaccattatcgttcagaagatcgggaacccatttaatgcggcagttacccttcctggtgatgggtctcctggagaaatccctaggaagccaaggatcacgccaaatgcggatggaatgaccattacccactctccagattatacctttcttcaaaagttcgagaccatattctatccctttccatcctggggaagagttccccccaaaacttgtatctataatcgaaccgttggggaaatacttagcttttaaaactctagcacataagctgttcaggttgtccaagatcctccaagcctgcctggccaacaacgcctgattaaaaagcttgaaatctcgaaaacccatacctccacactgtttcggtttaatcagggtgtcccaagccctccaatgagttttcctttttcctctgtcggcgccccaccaaaagttacggacggcttttgttagttcatcacaaaccgagtccgggatcttgaagatgcccatgacataaactggaatagcctgaaggacagacttaataagaatttctttaccaccaacagaaaggtggttttcaccccatagcagaattctcttccaaactttctcttgtaaactttggaatttgcctttattcattctaccttcgggcgttggaaatcccaaatatttgtcctcaaagccagcgctgcttatattaggtggtatttgggtcaaaggattctttaagcacatacactaaatcataaatcatgtgagaatcctatacatatataaagtttatctccactaagtacagttaatgttatttctctcttctttcgttaagtcacatcatctcaattgtttttgcacctggatgattgatctatagtctaaattgtctccctcatttcttctcctttgtttaatctgtggatgattaatctgtgttaccttgcttcttttctctcgataattgagacgtatcaccttagctttccttttgaatgatcaacctatatatgatttaaattgttataaaccacatcatcttaattatttataacttatttcatggtcgattaaagatgaaagttatataaagcatataaagttatgtcatctagctatcttatatgttatatgttatgtacattactattttacggaactcccatagcaacgctcggagtttcatctagttctataaaattcatataatttcaatttgggataaaaggattttggaggattcttacggtagttaagcattcatgtgaaagttctctaaacaaagcatgcttgaagagttggtagcggcttgtggcttcaaccccataaacccatgtatgactacaacatcaacatgtgaggagaaaaaaaatatagctagcctacacaaatttaaccatattaagcatttgatatgaaaattatattttcaatgcttacaataatatcattatatattgagcattaactaataggggacagtgtgccgcctagggttgtagttgcggggctttgccactgcaccatttttttttcttgattattcgattatgtgctcatcgagcatttgtttgtatgtaaaaatttgcaataggacacttaaaaacttgtggatttcgtcgcaggatatcctaaaattgtaacaccactattgggcaccctaaaaactgatagttagatgtgggataccgcggctgctattttagacaaaatttgttctaaggcatcgtgattttatgattttagctcctgacatataaaaagtcaatatttctcacttaagatatggttatttgttgatggacactagctcactaaaatatacatttatatactattataaaaattgaagatgtttttgctagtactttggtacgtcatccatgtatgagtcggtttttaagttcgttcgattttggaaatacaaatccgtatttaagtcgggttttaagttcgttcgcttttgaaaatacagaagaagtcgtataagatatctctttaaaaaactcgcatactaacttgagatgattggactcctaattgcagctcattattgtctagaaaaatatatatccaagtgaattcccacagtgaattttaccttaactaaaccgtataacaataataatactaaaataaccttcaccagttgcaacgcacggacattttttctagtgtaatgagatatgagaaagaaaccatgtaacatgtcaaaaatgtccttagccccgtttgttagattcttccttctcttcgtggctagcgaaaggggcatcaatggtggcggtacatatgcatgacgaaccactgaatgggtgctgcgggacgtcgattaattccactcagagtgatactaacactactacgaaaaccatctttcatggcggttattttgggttttcactggtggaatttggagctgctacaaagcaaaggctagtgaagatcaagatcttcactagcggttatcaaccgccagcgataattcattttcgctggcggtcgtcttaaccagccaccagcaaaaatccattttcgctggcaattggcttaagacggccgccagcaaaaatgaattatcgctagcggctatgttaaataggccgctagtgaaaatctattttgggccaaaaaatatacccatgcagctacccagccgccagcgaagatgatttggagaaaagctcgttgattcattttcaaaattcaaatccacatctagagatctagattagatgctcacttccaaattcaaacacgaaatacaaaatcatcattagcacatatcaaacatcatttacacagaccaaaacatgtgcatcatctggaacaacaacatgcacaaaaaaaatttcaaatcggagaagaggaagctgggagcacgatgaggacagcgtcacggtcggagaggagggagccgggagcacggggcagcacggtcggagaggagggagacaggagcacggtcgacggcgtcgaggtcggtgccaccctccccgtgatccggtggcggcggatccggcctccccgcccgcgcccgagctccacttcccgttcccgagagccaccgcccgcacccgagctcgccgtcgccttcgtcgcgcagtcctccgttgccggcgctggaggattggagggagagagggagtggagggaggtggaggagagataggataaggacgaggctggtgtgggggcggtgattttatagcgttaaattttatttcgctgacggtgctgtaacttgctgccagcgaaaacccgattttttatgacaggcctcttagcatcgccgctagcaaaaatagaactatttttttggtaggcctcttagcttggctgccagcgaaattttcgctggcggtctgtaactcctcacccctcattatatttttagtgacggtttttgcctattaccaccagcgaaaaattatagggtacacgtcgtagaccttgtagcggttcagcacgcccacctggtgatagaccttgtggagcaggcaaaatattagtggttaaacatcacacagtacgctggaatgaatgatgcagatcgatgctaattgtggtgtggtgtgcaattgagatcatcagtaatggtggtgaatggtgactgacttgtaccggttgacgacgttctacctggggcatcatccgagctcgtttgcggaggctcatggcgacatcgttggggacggcgccgaacatggtgaccaccttggtgagaccggccggagtcaccgaagaggccgggcaatgagtacttttgacctttgatctttggcattgtttccctctgacctgaaaatttatattttgatgttcagcagcaaatagttatattttgagagtttcctaaagatcgatttttatatgtccaaagaggattattctttaatttcatttgttgcagaggtaatgacgttgattcaattcctttccgttgcaaaatataatgagagagagagcagccaagccctggcctgcctagctcagcgtgtgcagggcaatctgatcaccacctcaaccggtcaacatgtattctttaatagctaccaatttaagttgtgatcctttcacataaatttttaaggtggtattaatctattaacattaattgtggaccaatgaaatttattagaaagaaaacgggtctagtctatttattgtaacagaaactaagtagaaattaactttccaaatataacattttttgacgtgaacattccaaatataacatgcatcatgcccacttcacatgtgcagattgcatcgaggaaagctaacgcgcgcgtgcgtatcgtcagcgcgcgattccagagaacgtatctaacccgcgtaaaatctattttcgtttttccttaaccagcgacgcctgaatatggagaagacgtggagtctactacatcggactcgtactacatgcatgcatgccctttttcctctttaaacaaagttttctctcaaattacttatccgatctataatccgattacaccattgtgttcgttacaattaaatcttcacaacaagatcttacatgattatattatgatgaaaaaatatttatatttataaattacttttattatatacataagttacttttatcatatatataagttacttttagatttaactaaattacttcttagacatataaaagtaaattcaataaagtttaaaagtaatttacatatattataatataaaagtaacttaaacggacgtaactttgtcacgatattagaagtaaattcgttgtagggataaaaatatgacttcgtgtcatatgaaaaaaaggcattcattaaagttattttctttttgttataagttacttctataatatatgtaaattacttttaggttttattgaatttacttttatatgtctatgaagtaatttagtgaaatctaaaagtaatttagatatatgataaaagtaatttataatttttcatcaaaatataatcatgtaagatcttgttgtaaagatttaattgcaacgaacacaacggtataatcggattataaatcggataagtaatttaagagaaacttctctaagaagaaaaaatacatagatattgagtgcactagtagctttttttttttggaaagaagagtgtctctctttagcactatccagctagcactctcggtgtagttgtgtccatctaacccgattagtttaggagaacataactaacttgattagtttaggataatgatggtaattaaggaaatattttcctttttcggaatttttttattgtaatagattgaaaataaatctatacatgaaaaaaattttcacgtaaaatttaaaactttcaacttaaaatttgaaactttaaactcattttaaaattttattaactcgaaatttgaactttcgagttagacataaaatattttgacttaagatttaaactttgaagttaaattttgaaattttttaacttgaaatttaaatttataaaacaaaatttgaaaactttcaactcagatttgaaaacttttaaatcaggtttgaaaactttcaactcgagattgaaaactttcaaatccatatttgaaaactttcaactcagatttgaaaactttcaactcaagattgaaaactttcaagtccatatatgaaaactttcaactctgatttgaaaactttcaaattaaaaaaataaaaaagaatgcaaaaaaaatggaaaatgcgctgaggaaaaaacatcgtggaaaaaagagaaaaaatcgcacgaaaagaatagctaaacaaaaaaatccacgtgtagcggtgttgggcgcgcgcgcgccatttccgtatatggcgcgcgcctcttcaatcaatatcgaacttgataaaattagtctcttgtgtcgttttggctttggttcgtatgcaccagatcagataagtttgtgtagtaaaatgagtatttttacaagtctatacactaaggtgcatccacctaacaaattatataccatcaatacaatttaatctatttaatttatcctataatcaaatcaacaatccgtaacaataatcggctcagcaataaatcaaacaaggcctaaaaataggggaaaatattcgtcctgtatttggcccctatcatagacaagaacgtttttgtcacgtcgctaaacagaagagagcatacaaaaaaaaatctattgatagtggcgtttgacagttgagagtaagaacaagtatgcatcgaggacattgtactagactagaggcagctagccgacgcaacgtcttggactggatttcttgatatactacctcgccgttgacttttttaaaaatatttgaccgttcttcttattcaaaaaatttaagtaattgttaattcttattttatcatttgatttattgttaaatatatttttatgtatacatatagttttacacatatcacaaaagtttttaataaaacgaacggtcaaacatgtttaaaaaagtcaacggtgtcaaacatttaagaaaggagggagtatattagccgtcaacttttcttatgtttttaccttttaggacgcgtgcatatatgtatatgcaattcaattagtcacttaagtacatactgacgttacatacatatataattccttgaagtctcgaagcaacttcttgaaatttaatcttattggcacatccagtacagtgtagaaatgtaagctaagtctgcgtttatcatttgaattctttagtactttatatagatgtctacatcacaaggcaaatttagatcaattgtcaagaaatatgaccaattgggttctcgaatttcgactctgacaggagcagcgagtatgtggttttggaaatcctcgctgcattcgtctatgggcacaagccattggttttagaaattccccacagtaacactgcacatataaagctaaccccctttttaaatgctaatatatactgtattaagcttatgatttacattccagttgatcatttccacgcccacgtgcacagaaagctacagcggaacacctgaccagcaggccatgaccagcaccatatgtgtgtgactgagactccagagagaatgttcaaattctcaattctaaatgccaggtggtgtaaaaagttaccgcctttatccacgaacatgtactccctctatcccataaaaaaccaacctagaaccggatgtgtgtcacatccggttctaaattcgtttttttaagggatggaggaagtaggaattttgggattttagtattatctccgtcccaaaatattgtaatctaagatagatcaaatttacgaaagttatctatctagactcgttattttaggataaaacccatcctaagttacaacatttttttgacggatgaagtattttcgtagagattaaaaataaaatggacaaaaagacacacgtaccctcatcaaaattacatgaaggtaagtgggtaaaaggttcaatattttaagatccctaagaaatataggtcaaatttgaacctagatctctatatttgtggacgaaacaggaaattacgagctgaggaacgaaaaacaaactctctctctctctctctctctctatctatctgatcgttaatccttgtcaacagtccttccaaattaaggtcattcagacgtccggtcataaaaaagaggaactaaaactacttttctatcctaattcacgcttcaagctggttaattaataattaaaataacaatttacaaacgaccggattaactgagtcgtgtcccatcccacctgcgcacccagcccggtaatctccaattattctccattctcccccacggtttaagatcattccgttcgccatgttcaacgagcacgtaagaacacacatgtacaccccagctacgtacgtacgctcgctcgctagctgcgagcgatggatcggcacagtataaatagagccccagtttcatcagctttctcaaaccacgcagccacgacacatcgatctcccatctccttgtgcagccgctgatctctatagctagcatcctctgatccattgatcatacaagcacttacctagctaagctagctcgcttgcatttgctatatagtttgaatttgtcacccacagcgtcgacgttcatggcacctgttccggccaccgccgccgccgccgcccctgcggccgtcgtcagcacccacgagatccggcgtgcgcagcgcgccgatggcccggccaccgtgctcgccatcggcacggcgaacccggagacgtgcgtgccgcaggatgagtacgccgacttctacttccgcgtcaccaagagcgagcacctgcctgagctcaagaacaagctcaggagaatctgtaagcattatgcatccatgcatgcacattgtgtatatatgttgttaatttcaaaccatttttcttctctttttcaccttagaaatatatgtagtagtaagaacaagattgaaaaagtatatggatgcacattgcattgggcaaagtgttaattaagcttcaatttccacacaaaaaaaacttccattttactatacaatcaattccaacaaattttagatcgattgactcattgtatatctttgggatggtgcgaactgaaacttatttttttttcaccttgatgcaaaatttaacttgcaatacttcatccggtacaaagtgtaatttagcgcattataattgaataagcaaataacaataattagtgcatttcatgtgtgctaatgtgtggatgtacgtatgtttcaggtaacaagtcaggcatcgagaagcggttcatgttcgtgaacgacgacgtcatggaggcacacccggagttcgccgaccgacacctgacgtcactcgacgccagggtggagatcgtctccaaggtcgtgccggagctcgccgcggccgcctcggcgaaggcgatcgccgagtggggccggccggccaccgacatcacccacctcatcttcagcacctactccggcgtcaaggcgcccggcggcgaccgcctgctggcgtcgctcctcggcctccgccccaccgtgtcgcgcaccgtgctcagcctccacggctgctacggcggcggccgggcgctgcagctcgccaaggagctcgccgagaacaaccgcggcgcgcgcgtcctcgtcgcctgcgccgagtccacgctcatcgcgttctacgggcccgaggtggggtgcaacgacaccatcatcgggcaggcgctgttcggcgacggctcgggcgccgtcatcgtcggcgccgacccggtcggcgccgtcgagcgcccgctgttcgagatggcgttcgcgtcgcaggccaccgtcccggacagcgagggcgccatcaccatgcagcacaagaagggcggcatggactaccacatcggcggcggcgtgccggagatgctcgccggcagcatcgagcggtgcctggccgacgcgttcggcgccatcggcgtcgccgccaggtggagggacctcttctgggccgtccacccgggtggccgaaggatcctggacctcatcgaggaggcgctcgggctggacaacggcgccatggcggcgagccggcaggtgctgcgcgagtacggcaacatgagcggcaccacggtgatcttcgtgctcaacgagctgcgccgccggttcgtcgccgacggcgccgagggagccgactggggcgcgctgatggcgttcgggccgggcgtcaccgttgagaccattttgctccgcgtcggaagcggcctcaagggaaattaaataaacttaagtaaatttaattattttacttatacatgaattgcattctattggaaggtaagtcctataataaaatgtgttgagtcctaccactttgtttgtccgtttgggtcatggacatttttaattagggcatcaagttgagggagtagctctgctaaaaggagagatgtttggaccttaactgggtgttttggaagtgaccttgaacccaaaagtgtggagtagctataatcatggtcatgcatgccatttgttaattactgcttaatgacgatctttgtaatatcaaaagttaaataaataaagatctttgtgcgcagttacagttcgtttacacagcaaaatttcgtgtacttcaacgcaattcatattttgcgaattttgtgcatttctgaatttaaataaaatgcgctaattggatgtttctgattatcaaagttcatactatatatgtccaatttaaaataacactttcctaacttaaactaaatgatcaagctagaatttcttagttttagaatttcgtgcgacacatcagtgtctaaccccacgtggcacatatcagattcaaactaataaaaatagaaactactatgttcgttcaaagaaaaacgaatttactataaatgtgtcgccatatttactataaaaacgaatttaacatatatttacattgtaaatccctaaattacatatgtaattttagtgtatttataatgtaagaccataaattacatatgtaagttctaaaattacatttgatagatttttatctaaaaatctgtcaccatatatttagatagacctaagaaaaaatagaattaatcattttaactagaatgtgaatttatagaggattgtgggtgtatgattttgattgttgcgcatccatagcaattaaaaaccggttcaagagaaacttcaagacatctggtacttaccatgagaaagagtgagtaacagtgttggacttgtataactagctcctcttctaagcacccaaacgagggaaggtgtgatggagtttggttggccctgctttagtggctaagtggtttccgaattcattatgtcacaagagggggtgggtgtgaacggtcaggagtgagttatgcgaagggtcttatcataatcatttgcatggagacgtgtcagatttgtaacatgatggtagattgtgtcttgtggatacagttgtatatctttggccaaagtaaaactattcgaatagctaatccataattatgaggcgatcgacctgcttcagtgcaattagtcccacactttttaattcgcttgacttaataaattagtgtagatcaggtgattcgttgagcttgtccaacatagtgttgtgttgttcaatggagattaatcttactttaatcaattaaccaatttaatgttttaaactataaatgttcataactgtatttatgcaaagagccataaacctccatttactagtgtggcctgctaagtacggtggttgatactcagcctttttataatatcttctttttaaaagtttagtgactaaatgctgaaaatgaagttactggaccaaggcttatatcctacttaaacatgccagtcgagtggagatgtagcttcgtataacgtccgtgtatttcttaaaatatcaatttaaattttatttaagcgtcgctcttttctcccctgttcaaaatctccaaaaatttcaaagttacttttaatcttgcttttattttttcccggccaaaataattttttttctttccatccgaatattttatatattctcggaattttccttctccggagtaatttttccggagccgggagttcgtcctttttttttcctctcaccagcacacgtgcaagcatgcgcgccttctctcttttcctcaccgagagacaagcagactcatcaacctttttcatgcatgcacaagctcttctctcttcctcctctgccaccctttttcgtaaactctctgcaaacccagcggttaggcacagctctgcctcctccttgacagagcttcctgcaatcccagatggtcgttaggcaccgttctgccgtttcacagtgaaaggttggtatcaaaacatgaattcggcaataataaaagaggtagcgtatgagacataaaagtgaatgaatgcggagacaatggatttagaaaggttcatgccctctcaatgacaggtaataccctactcctgtttagagatttgaatccgccgagtatagtatagatatgacgatcatatgtgctcatacctcctagagggcctcctacctaccttatataggatggggggcaggattacaaaataaccttaaccaaatacggtatcggttttctaaatctactttacaatattaacaaaccaggattttatgccgttccataatatagaagaaaacataatacccaaatcatgatctgttatatattccatagatataagttatcctctataataagtcggaataactagtcagataaccatgtcgtgcggctacggcgtattcatagtctccacagttggcacttggcaccgctccgcctcttcggccgagcaaggtaggcggcgtcggcagcagcagagagagctgtggatgaagaagcaagaacagtcacaacaatggcggacgttctcgttgccagactcgcctgcggaatcacaacagagagtataaataccccactgcgccgccttgccgtcaccatgacgccaccaccacgccgcctccctgcccgtgagcctgtgcgccgccacccaccaccgcgcgcgccgcccggccgccgcaccttgccgtgccggcagccgctccgctcggtcgagagagagaagaacgagagagaagagataagaaaggaagagaagaagcatgagaaagaataagagaaaaggaggtgggacacatgggccccacatctccccctctccctttgacccgttgacctgatgccggacccactcagaatattccctgaaatattcctttctgttctttcagtaaaagaaatcctcgtaacttcaaaaatccatatctcttcatccctaactccgtttaactccattcaagtgccaaaatcttctaaaatcctcctctatttaatggcactgtatttttttttgtgttttgttttgtttagcagtagttttatgtattgtttattttctcgcatatagaacccgaggtggatggaggattcgcgcaggagttcgatgctccgtttgttctcgcaggtcaaggcaagcccccttgaccacttcttgcacctatatttttaactaagtattttgtttgccaaattgcatctttaggtcgcattgtttggccacgattcgaatatggattgttgggccttcctagtagtcacacttttattttgtagttgatgacccctttcttcgtagctccactgtatattttcctcggtattcacactgccgaagtagactacctatataggttacgattgtgcgtactagcgtgtgggaaaacttggatactcattattactcatttatttcgaagacctgacgagatgtcagtgtggttacgaagtggagaagtgttttataaaaacttgatgatgcgggagtcagtacctggtcgtttggctacgtattatccataagtatcgtttcctttgagaaattcattcaaacataaaacaatacgaccaaaacatgctggacacctacgttttagctacctgcgatagtgaccgacatgacgctataccggatgtgccccttcgggggtcagaaggtatatttcgagcattctttttttccaaataaaactaatagttttattagtttgtcgcatttcatgctttttcaaatcatgaaatttgactaagttcggggcaaaaggtttcccccgaaccccccttccaaaaggtaaatgaaaggttgagaaacttccatttgatttgggaaggtgtttctcaaccactacttttaggaacaaacaactctaacgactaaaacgggtcttggcaagacccttaacggagaggacttcttcttttaacacgaactccgcgaacggtccccccaaaccccccgcaggggctccagctcgcccttcggggtagaagaacttgttagttgtagttgttccgaagggacaagttgctcccctctgctaaccagaggaagcactttggaaaataaaaacttgatgtatacctccgggcagcagagcagagggaacggagccctcgtcccgaggggatactaattctctttcttaactacttattaatatatgatatagaggaatacctattcctatcagtagatagacaagcatactataagatgctatctgggtagatagcatcatatagtatcaatggatagcagagcctacaatcgggttggagccctccttttggggtcttacccaccctcgagtccaatctcgggtgggcgcttatggcaagtcccattccctagaacttatccgtggatcacctcccctttacccgaatccacaatcggatactaagatttactttttaaagtagcaatctttctagtgttgattttaccaattcaatgtttcagataattgcatctttttttaatcaagtatttttattttataactttcttttttaaaaagtgctttgttaaaaaaacacatgtccctaacaatgacaagtggtgttatagcgctcgctagaaggcatctcgaccctttttgaattgaaggtagaatcatacaaggaccacctcaaactagctaaatagtgaaggcccacaaggggtagttctctctagagaaatgagctagaaccacggcttcctttttttttaaagaaaactgacgcaaggttactttcgtgatagctgaatgcttcaagaaaggccatacaaccaggttaatattgccaaattaggtaaaatggtgccatatttatgacttaaaatgaccagtgaaccttttgttgcaacagcagttgtttcctgagaaaccaatcatccagtacagccacgccggtagggttcgattcccccaagcctagaatctggaatgagggaaggtctcatcttgtcgatagcctagcttagaagtgccataggaacctatctggaaaatcagcccccggggataatgcaaaactctgacttcgaactcgatgttagggacattccctggcaagaaaaggttaaagagttgagcaacaaaagatgagaaggcactggttgtggaccacttttcttgtcgctagcgggaagagcccactggatggattccaaggggatcctatcctgcgatagtgaccaacgcgacactatactggaggtgccccttcgggggttagaaggtatatttcgagtattctttttttccaaataaaactaatagttttattagtttgttgcatttcatgccttttcaaatcatgaaatttgactcagttcagggcaaaaggtttcccccgaacccccttccaaaaggtaaatgaaaggttgagaaacttcgtgggatgccattggccgagcaagtagctaaaacgtaggtgtccagcatgttagcggttgaggagcactggtatggtggtgtatatgccaatctcctgtagtgggaatgtgttggagtccatatggtggggcctgggtagatgagggcctgagcctggcctgatgcttggtggagagattccacccaactgtgggacatgtggtatttatgggttggttatggaaaagccttgtagtgaactcccctttgtcatccatgtctgatccacaagtgatcgtaatgtgaagcgttcactacgtgtgggtaaagcgtgcaacctctgcaaagtttagtcaaactgtttaaacagccgtcccacggtcatgggcatatgtgaggtgtttctcatagtgtagtgtttgttttaaacttattaaattgattcttgggatgggaatcgttaccagagtttgcctttgtggcagacgaccatccttcgtggttgggaacgagcctatgtggttcgggatgccgattggcaccaaggtgtggtttagggctaagaccaccgtggtagagtggctgagatggccgagttgtgttgagatggcacggtgtttgtattttactcattactacagtgacaggtgcaaagcaacctgtggaatggagtgtggtgtgagccttactctgaaactaaaacttgacactctagaggtttgcaactaaattatttaaaaaccttgggttttccaaatgaaactgttccactccttgttttaaccttgcatgtcatatttttccctgacttgctgagtacactgagtacttgcccttgttgatatttatatttatagagttagaagaaggatacctcaacccttctgccgaggcctactttcaggagcaggccaagtacgatttctcatggtttcaagcctagttcccaaacatagcttttggatttatggttgtcatcctgcttttatgctttcgcccacgtgtaccttatctttctagtgtttctacccgtctagggtttgtccatgacggtagtagtttgagacctccaccaatgttgtaataaaactttgttatttctggattccactattattctgtgaatactagcttgtgtatactgggactggtactgtaatcacaggtaatgttgtgacccccagcctatgccggtttatattcttgactggcatagtttggggcgccacaccccgttaggatttagtgcctaattggtaagtatttgtgttttatttatgtttgtatctgcatattaatttttcattttgcatatcttgacttggttcctgcatagagatttaatatacacaaaatgatctaaaattgacttttttttaatatgtcaccggggggtgaaatgcccacctgaaaataatatatatatatatatatatatatatatatatatatatatatatatatatatatatatatatatatatatacacgtcaaacagacttagacagggcaaagcaataactgcgcaagggcaggcaacagagagaatacacggggaaatacaaggaaagagaaacacaagggcaacagaaccaccctaaacacacattgatgttttccatcaacaagatcacatagccaaacacccaaacctaatgctagctccctagcttgacaccatctactccacaagcaacctagaaacaccaagagttgagaaataccgggaggcattctaccacgcacaccggctcggcttttggagatcaaaggttgtggttgtcgaagaccacccgcgtaagccatcaagagtcagatttcatcgtattgcagatttagatcaatgaccaccaacgtccttcgggagaaggaaaccccaaaggagggagagccattgaaggttgcggaaaaggctgcccgcatcaaataatcttcaatccagcattatcaagttgctagccaatttaacgcccaccaacgtctcccgggggaaggaagccccaaaagagggcgagacactgaacgtatgctgtcaaggacaaccaagtaaaggagatgaagactagacatgaagccagacaaaagagatgtggtgaaaggtagcaatcctattagtggaggggaacatcaacgacaatggtggagtcaaaaatcgccaaggaagcccgggaaacaaaccaacttgtagacccaaactatcaatcacacgagcatgccagagagagtagattgaagaaagagggccaaggaaccgcatactcatgatatatggtggatcaagggaaggttatttaggccggacaaggaacaacgaccgaaattaacaccaaccatgagatgaacagggagagacacaggggaacaaaggaggggatgaggcaaaccgaagctggagtaggcaaagggaggagaagaacaggaggagacgaacaccggagtaggcaaagtgtcgaggagtgatactggcggatcggatgtgtagagtattggggtacgttggaacgaggatctacatagtacgacatcgagcagacaaaagacaaggattatactggttcaagccccttatcaggtaatagccctagtccagtttatatcagattgatgatgatgagaacagattacaaagagagtagtcgaaatagatgttactgatgagatcgtaatcgaaggattcgacgagatctcccagcgacttggctccatgtactccggctttgtgaaatttggtggatgtgttcgctctagaattggataccctgaacccctcccagggggtcccttttataccgtggatcatcttgccccccaagaaaggtttgaggataccggacctggtacggtatagcagaaactctatcttttccgagtaggactttggaaatcacctgactcgaaaacatattttctataatttgtaatggtttccatgcgacatttacgggaacaatccgtatatgcgaaggtataccttattggtatattccataagtagcagaataggaggtatgccttatctgtaaccctgacacaaaggtaggagaagagtaagaggagacgcatgtcgaaggacaaatagggagacatcaacggatttccaaatgtgcggccttcaacaaaggaaggacatcgagaacgacatcgccgtcacacaccaaggaaatccagagagggttttcaccccaagacgaagtggtgtagggataagccacgcacaccaccccgtatccagcagagccgacaaaggagcagcggatctgggcgccgccagcctgtcacgccctgaagttcccctccttgctttaaaattcataaaataaatcgtccgaagaaatgatttaatttaacctagagatgaatccctaattaataaatgcaaataataatcggaatcggtatgtggaatttttcttggattctacatgtcaaaatatgctaacaggatttttagtggaattttcagagcccaaaaaataattttaaccaattaaaaatgagcacgtgcaatatttaatcccaggaaaatcccttttcctttcttctttttattttccctctttttcctttgttgggccgtcagcccattcttcccgcgctggccttccctcggctgggccggcccaagctggctcctcccttccccctccgggtcacatacaggtggggcccatctatcggccccttcttccaactcccgccgccgctccccaagccggcggcaaccaccaccaaagccgcccgggccgccgcttcctccgctccacctcatgcccccactccgctcatgtcccgcgcccacgtcacccgcccacttccccactcctcccactcgcgcgcgcaccccgcaacggcgggattcaaattcgaatccccctctctctcccccacctgcccacgtcgtcggcgagaaatccggccgcccccagccacgtccgcctcccctctccgcctataaaactctccccgtgtccccctctctcgcttttcgctctcgctgctctctctcgtgccctcaatcacgcccgcgccgctcgccgctagcgccgccgccgccaccgatccccggccgcgtgccgccgccactacagccgccgccacaccatgcaatcgccgctgctagctacgccggtgccacccgcacctcgtccgccgcacggttgccgccgcttgccaccggaaccccttcttcctcgcgcgccggtgagcattcccattttccccgccttcggccggcattgccgctcgccatggacatcctctctccctctaaatcctcccatttgctcccctaggtcactccggacatcgtccacccgctcgtctcgccgttcgccgcttgccgccgtcatccaccgtcgcctcttctcgcgtcggtcaaccccatggtgagaactccctctcctccctctttctcccctcccttcctctctctctgccgcgccgcccgccgcttttgccgtgccgacgcgcctcggtgccgccgccgctcaccatgaccggccagccggcttgaagccaagccaagccagcccgccttcctcctcccctttgagccaccgcctggtggggcccacccgccaggccacctcctcctcttgtgccgctgacccattggtcccgcttgccggcgccgtcccctccttgatgacgccagccctggggatttattgcgcaataaacaaatatggacttttctttattagtaaaaacacagataatcttccaaaaatcataactaattcatccgatctccgattaagtccattcaagtctcagtaaatacataaaaatgtatagaatccaataaaaatggttttgtttcctgtttcagtagacttatagcatgtttttcttatgtgctttgtttgtcgcgtagatttcgaccgttttgtcgatccgcggtttcccgaagacgttgctgtggtctcatcagtgcgctagcaacgcaagtcatgcattacaattgatcatattgtacccaatttacaaatgtcccgcatttttattaaatgttacattgttttacaatatcatgtggaatgggtcctactactcagccatagattgtttaccttatgccattgataacttgggttttaaaatgactagatgttggttaaggaaatgcttagccatgcttagttcaactagtactcaaagggcaatcacattaatgcatagactttgattattggcatagctttggatttagttaattaaaatacactatatggtgggctgtgggtgcatggttttgctagtcgtgcccatggcgattaaggaccggttcgcgggatgccctggaagaacttatcgtacttaccacaagccagcgtgggcaacggctgggcttgtagtgtagctttcctctagccgacgtacccaggcaagggtgggcgtgatggagttgggtcggccggggtgtccggttgatcggctgccggattcaccgtggcacgagaggggactgcccgctgccttgcgaggagtgggggtgaaacctgaggtgtggtgcgattggttagagggggttatgcgaagggtcctgtcacgtcctctttccggtatgtcgtggtggcatgtcggcgcacggaaacgtgtcgtagggctgtgtcttgtgggtacagttgtacacctctgatcagagtaaaactattcgaatagccgtgctcgcggttatgggcagtcgactagattcaccgtgattagtcccacccctagttagcttttgaactggtgtagttcaggtggttggttgggcctgttgtaacgtagtgtagcgttggacagtgattggtttatattgattaattactacaacagtttttactgctttcaactactgcttttaaatgctagctttatgctaaagaacctttagcctcccttggatatatcctgcatcataccttttcttccggtatgacttgctgagtacagtgggtagtactcagtcttgctctcttttcccccacaccagagttgaagttcttctcagttggagctgtctcgttgaggttggtttcatcgctgccgtcaaggattgcctgtggagtggagtcgccccgctgcagaagtcaagctttcaagtctaccttgttttactttttccgctgcatttgtaatcttttatatttttgtaagacgtggatctgtatgtcaacaattgtcgtttgtgtaccctggctggtcctggacaggggtttaatacacattcagcttagaaattctggttcgtgaatttctgggcgtgacacagccctgcggcatggccagtgccgaccaaaggtacggtggcagaagtcgaggcaaacaccaccgctgcagctctccttccgtcatgccccgccgcttgcgctccgcgtcgccgctcaccgccgcgcacgcgctgccctgcgccgcctagactcgctgtcgttgcccgccgccgccccgccgcagtgcactacgccgtcacccgtcgcgtctcgcggccagatctagccgtgggagcatgagatccggcctcagcgaagccggagtcactgccttccgccggcgagtgccccgcggcgaccggctcgtcgcgcgtgaccccgcctccctcgcgccaaaggcggtgtgcgcggcgccacgttttggccccatcgccgccatcctggcaccccacacggttgtctggcggcggcgaggcagagagaggatggagtgtgggcggcggcggcggctagggtttgcccctgagctgcccgcgcgaggggcgacgcgagggatagttgcccttgtgtgcgcttgtgttttcgagttgccaaattgactaaatttttagctgtgacattggtccatttatatttctagagctatcttaaaggtacaaaccaaaattgtgaatagggtccatgcataaactatctatatatcctaaacattccgatcatatcctaaatgctatctaggatgtttgtataacgcatcgctgggtccgtcaacaaatttttgaactgtaaacttcagtgaacaaaacttccgatcatgcagcctcttcaatatatctaacgtggctgacacgtacgctataactaatgggctcacacgtcaaccacccatatgagaaggcggtatgtcatcctgtccactcggattgtcccattccaacctcgagggcagattgggaggatatagctagcttgactcacaacaaaaaatcatttctaggtttaaatatggatatgtatatttaaatctagaagtgagtaatttttttttgaacggaggaagtgctaccctgcaacaagcagtccattttgtgatcgccgtggctttgtgaacctgtggtagtgtggcggcaggcatgagtctgtagcttgtgtagcaaccttgagactgcgacggaggctgttgggtttcgttgaatcggcggggaagcacgactggtggtgaaattatgggtgtataatactatccattaaacttaaatttgatgtatacaaatattacgcacatacaatttttaataaaattttagtgagattaaagaattgtggtattgtatgtgtagtggtatatgcgcgtgtgtctctggtatgtaataaattaaaataaaaaaacataatgactttatgcatcagtgggtgaccgccctacgtgcgaggccacgacgtcactcgttcgtacctcatgaggcagcagcggtgacactaacggtagtttgttttttttccctagttttttttttagaactgttctttctctaggttatcactgccacttgcctaaactggtagcgaagccattttattatctactggtgatatagacctttttgtttttaaaaataaggtccataaacatgaatgaaagaaattattttaaatatattacttttatgtttgatgatgttgatttttggacatgtgtgataatggctttgtgcatccttggacgaccggtccgtgtgcgaggccacgacatctcttcgtgctatacggcagacgcggtgacagtaacggttttgtttttacctagtatcttattatcactgccaaatgcataaacaggtaacaaagccattttattatttagtggacctatttcttctttaaaatggagccataaacgtgaattaaagaaaccaatatttttttaatttttgatgacgttatcttctatacgtaagtttgactattcatcttattacacaaaatatataattatcatttattttgtttgtggtttattttttcattatgccagttgaaaaacccacatatataggtaccggtttcccaaccgacatccccaaagcggcaccaatgaggagaaatgattggtgccagtgtctaggaactggcacctataaggtccaacaaatcaaaaaaatatcccgctcgatgtatcggttcgattttatcccacagtatctcatcaaagaacaattcatcgatatcttcattcatcaacatcccatccaataagaacaaacaaccatactccgagatcgagattgaaagatacccaagaacatcaatgaacaaaattaagcacatgagaatttcaagcacacgagactccggatctggaagacttggaaagctctgaggccatcgggagggagggagggcgccaccggcagcgacaatgtgtggggaggtcgctagccgccccgctgcacgccgccatggggaggccgccagccgctcgccacgcgccaccctggaggggtctaccggccacccgcacccccacgtgccaccatgggaaggcagcattaaccctaccactgccagcgtctgccgcgacaggccgatcgcccatacgccgactcccctccccctccccgttgctgcccaccgcgagtagtcgctcgccaagataccgaccccgccacctccgccgtccaccgcgaccggccactcgccctggctagatgcagaaggagaatgggggaagagagaaggagagagagggacaggtgagtggagggggccgggcgagtggataaggacgcatttatccatccactcgtgcgactttatccacttgatcggtcgcgcccccggttttctctctcgatcaactcggctcgtttgataggtgccgattttcttaaaaaacctgcatctataatatattatatgtgtcggtttttatttaaccggcagctataatatattaaaggtgtcgtttttttttaaaccgacaactatagtataatataggtgtcgatttttctgttaaaccggcacctataattacttaaaggttccccttttttgtattttcagcctgtggaggtggggaaaacacctataattaccaatgaactagaaaaaatgcccgtgcgttgcaacgggtgaggtctattttaatcttattattgttatatggtttagttaagatgaaattcactgtgggagtttgcttggatatactgtatatatttttagaaaatcatgagctgcagttaggaatttgattgtctcaagttagcatgcgagtttttttaaacatatttcttatatgattccttctgtattaaaaagccgactcaaatacggatttgtatttctaaaagcaaacgaacttaaaaaccaactcatacacggatgacgtaccaaaataccggcaaaaacatcttcaattttttgcagtgcatatttacacataattttataaaatcaccaaatatatgtcaaaaagttaacgaaataaataaaaacagtgggagtgtactttattcattggttggctggtgtaatttttgttactcgaaccatttgtattgtacaagtactccctctgtcccataatataagggattttgtctttttacttgtactgtttgaccgttcgtcttatttaaaaaaatttaaaattattatttattttatttgtgacttattttattatccaaaatattttaagtacaacttttcgttttttatatttacacaaatttttttgaatagaacgagtggtcaaacagtacaagcaaaaaagttaaaatcccttataatatgggatgaagggagtagaatgtaataaggtggtcggtgacacacacaagtttatttatacttagtaaaatgcccatacgttacaacgggacgtctcatatgaaaattggaataaaaaatgaagcgtggtctggcataattaagtgtcccatgttatgttgtgtcgcatggtacgtttgtttcagttggcaggtttgaactaattaattaaactgcataaaataaacaaggcattggattagactgagcaatttcataagtgaaactgatttgtatgaattatcaatcaagaaactattgccttcaagatctaattttgaccattaattaatttctgctccctccattttgggttataagaaagtcaaactattttaagtttgactaagtttgtaaacaaatatagtaatatttataatattaaattagtttcatcaaatcaataattgaatatattttcataacaaatttatattgggttaaaaatgttactactttttttacaaatttagtcaaatttaaagcattttgattttgaccaaagtcaaaacatcttgcaacctaaaacggagagagtaccatggtacatatacatatgtaaaaccaaaaaacagtgaaatccagtaaaattataatcatctcccgtgcatacatgctcctgatgaccgacgtggtcaacgcggtgatctaacgcccagcgcctccaacacgaattgctcgtacacgagagcaaatagttagaacacttcttaaacaactatagccggagatttaaaatcttgcttaatttacctgcctgtcctcgttcccatcttcagggtctatcgctaggttcctcgctcgcccgatgcctcctgcggtttagccatggccttgctcaacgttggacaactgttataaaaccgacccgatatatatctcggaaactgaacatggaagaaacatcataaaagattcaaacatgaagacgacaccgagatacgatatttgataatagagttcagccgatgtctacatctcccggttaccgattacgggcgctcctccctgatccagcatattacagtgtatccggatatccacgaccctccaccggctaggccgccggcctatcgtacccacacctatgctactgtcgtctttcggttacaattggtgtgcccctctatttaagagaaaggctaggatagagtccgactcttactctagttctaacacctattataactccaagttctaaactgtaacagactatatacacatattcaacacaaactctaacaacagcaataagaggaacacaacgggatagggcgtcgttgggggtgagcatcaatttaatttgcattggcggcgagcttgtcaagaggaaggtggaggagaatgcggtgggggaagacgatgttggggagcgacatcgggatatggcgacgttgggggacaacatcggtggcagtggtggcagaagtcgagagaggcggcgaacccggcagataaggaatgcggagatgcgtagagccgagtgctgcacttggagccggggccatctagcgtttacgtcctagcgctgcgcttggagccaagccgacagagcattctgtcggatcattgcgttgtccacgtgttggccaccaggagtgggtttgcacctggttactacctttttttttcccctgcggtttctctgcttcatcttggagacggcgggtgaaacggaattaatacaaaatcgcacttggattcagacgacgacataccaaaattttgattaaaaacatcttcaatttttataataatagagatagagaagagatatgaaagcattcgcaacttgcattaatttcactttctttttgaaatcaccgagtgtcgtatatactacttttggtccttgcaaagatcgataagatggtcgtaaaaggaggtagtatttgaatcacttcccttcaaaactcgcggtttatggtggttaatcaaagcgattgcgtacgtacgaccaacgtactcgaccaatttagtcgtgcctaagcttcaccaatcaccagagatctccacggtataaaattaatattgagatggcaccgtacaatataaatagagcctagtttcagctttgcccaaatcatgaaatcaagtagctctccccgatcgattgagtactgcacaatactcgacctaagctaagctagctagctcgcttgcattgccaggcgatactcatggcacctgctcatcatcaggcagcggcggccaccaccgtcaccactcaagatatccggcgagcacagcgcgccgatggcccggccaccgtgctcgccatcgccacggctaacccggagactcgcagatcgcaggatgaatatgccgacttctacttccgcgtcaccaagagcgagcatctccctcagctcaaggagaagctcgagaggatctgtaagcacgcatgcacatcgaccgtatacgttaatttgttcctgccgtttccaaccattttttcgcccatcttattatttgaaacgtaacaacactataaaaaaaaagatttttgtggacctcggcattcttctgcaagcggaccaaatgtaaaaagaacgtaggccatctcagggccacagaccgtctagctgtgaaagcctaattctacaggctattacttaagaaaaccataaaaaaaagttctattaatattttcactggcgattttcctaaggtaccacctataaattctttcaaaaaaaaggtatgacctataaaaatagaatgatttataggtgattattttaagaaaataaggtatgtaaaaatcaatttatttggacggttaccacccataaaaataggagcgaacctatttcaagagaaaatactacctttgtcctagaatattaaaagttttaaggttgaacacggtcattaagaaagtggatagaatttaatggagggaggttgttattggttgagaaatagaggtaggtgaaaaaattaaatggtggaaagttgtgattggttcgaaagagaatgttggtgaagaagttgttatacttgggacagattctgaatgttagaagttgttatatttttagacggatggtgtatcttttttacatgaagtcagatgatgaaaaattttatatgaaattatagctctcgatgaaactttacagttgaaagttttttttatttgcgatcattgaggggccaaaatatgtgttaaagctcttaaatctattttttaaaatgttttcttatttttttaaacaaccttagatgtagacaagttctatattaacactgtagagctctacgcaatgtacaactttatactagaaaggtttgatatttagatcattttggtgtcttaaaaagtatagtcattacaagctcttgtatctattttgggattctttacaaagttcaaactttgaaaatttcttgcaaattcgcaagccccatcaaggtaaaatattcatatatgtgtgtgtgagagagagagatcattgtagtatttcctttaatatgacataattagaattttcttagaatatttcttatatatagtgattcactaatatcaggttgtataacatatcgaatcatagtctacgtaagtaaataatcatattgaaagaaatattttaagaagatgggccttgccatattaaataaaatattgtaagtctcatataaaactttgattcaccttaattaaagctaaaattagttctctataattttttaaatttagtcattatcaaagaataaagaaaaagtttttgcaggacaaaatcttaaagaaccaccaataaaatgatttttataggtgtactttttaaatagtcataggcagttctcaccaaaaaaaattcctataaatatcaactattgcagacggtttcttataaaattggaccttaaatatgggactatcactggaatatgaaaaaaaaatcataatactttttatatgaagtcggatgatgacaaactttacggatattgtagctctcagtgagatctataacttgtagtggaacctgttttcatttgagattgtttattaagggtccaaatattcatttgaaagaaaaaaaatgacattttgagtttttcaaataaactcggatagagagatatgctctatatcaaagttgtatagcttatcacgatctacatatttaatttagttgatgagttctccaattgatgtcatttaattaatgtataaaatatgtgttaaaagttttagagcggtacagagttaaagaatagcatccaacccatagtcaacccattatagtgtatatcttaggggcaagattgttgtatctgcacaagaaaatgccattattaacagattcctttgctaacttctggagcaagtcctcaattaatacacaacaatgtttttttggtatcaataattgtggggaatctaaaaattgtgacagaccctcgaagaattctatgccaattcatactctctgatcttcctttgatgacatgaatagatatttctatgatagacttgatctagtaggtgaggacagtgataagagtggttatcttgccattttataactgacgcaactataatttaatcaattaaaatgatttagaaaattatattcccatagatcataaatatttgatatttaggatataattcgatcaaatcgttgaaacttagcccataaaattctagtatattataataaggtgataaaatttaatacctttatttttaaaatatatggtgctcttaacttttggatatgtcatttgatcatttgtattatttataaactatgtaaatattatttattttaattctatttgtttcatcataaaatgttttttaaccatgacttatctttttacgtatttgtagtatttctttaaaaaaagatgaagaatcaaatacctgtgttcgaaagtcaataatatcatacaagagtacttaaaatcagagagagtaataagctcaaggtattataattgtatttttcaagaaatatcaatgtgtgtgcatgactatgtattttataatggtattgagatattattgatggctaaaagtttcaattgaatttataaacgttaaatatttatgatttgagccagtgttggaggaatttgcgtgcttatattatataattaatatggttgatatatgttacaggtaagaaatccggcatcgaaaatcggtacacgtacgtgaacgacgaggtcatgaaggcccatccagagttctccgatcg

SEQ ID NO: 29315 - DNA, 1308 bp, Oryza sativa
accccttgtgggtttggcgccacgtgtgtgggttaggtgagcacagcggcgctcacctaaccgcgtttattgcgggttggacgagcgccccacgccacatttaatgcagcgcagcacactcgttcggtccgtgacaggtcacagtgtgtgaccggtcacagaccggtcagatcgcgggttaggtggcaacaggcggcctgacacacgcctcgccccgtcccgtcggaatgatgagagcctccaggcactcgtccctagccggagccggcgtgggaactcctggagttggcacgtcagccccggccagatacattccaggcttcatcgcaaccattgcaaggaagtcattgtatgaagaagggcagacgtgtagcatgctgaactgacacgtggtggacaagaatgaccggtctgtgactggtctgacgccgtgtaacaccctgaaaattcgaccgacaaaaccaaaactctaaaaatacggattttcaaaaacttttttaaactaattgcatcatgccgatcttattggtctattttatctggagttgatctcgaagattattaatcgtgagtaaagaatagttaattagaaataaaccttaaaaacaaattggtaaaataaatataaattaaaaataaagattaggtgtggatagtaataaataaaatattatcgcgaccatatttggatcaattaaatttcattgcgatggaataagaattaaccctaattaaaactcaaataaattatataaaaataaaatatgagtaatattaatctagggtgaattcattagttaagataacacgaatattgagtaaaatgcatatatgtaaaattaggaattgtggaatcaaatttagatggaaaatacactaaaatcgggataaataggaaaagtcactgttcattgcgcctaaggtgttcgatgtggtccctaaccttccccctcctctcccacctctgcccctagccgccccgagcccgtccatcgcgtagccgctgccgcgccgcgtcgccgtcgcgtcgccgtcatcacgcgccgcgcgccatcgccgtcgccatcgtcaccgtcggcctcgcgccccgtgccgccgcctcgagccccgtgccgccgccttgcgccccgcgccgccgctgccacgctgtcgccgcgccgcacgcccgcctaccgccgtgcaaccgtcccgtcgccgcgccgcgcgcccgtcccgtcgcgccgctgtcccgccgccccgcgcgccctcgcgcccgtcaccgaccgttccgtcaccgcgccgcgcgcccgtcgtgtcgccgctgccgcc

SEQ ID NO: 29316 - DNA, 888 bp, Oryza sativa
actaaatttggctaccacgacctcgtaaaggccaaacagcggggatcccgtgattagccgacttccaaagcatggcctcctccgccattgctttcgccacttcggtccaagacctttgttgttgattgaagatttggttgttccgttctttccaaattgtccaagccatcagtgtcacgacggtgtcgaagcctcgacgatgccgctccccaatcttcattcggctctcacaaagccaattgtggaaggatggctcattgacaagtaagcagttcggactccttattgcctgaagcgtccaccaccataattgtctcgattcagggcatgctaccaagatgtgatcaatgctttcctcgtactgatcgcaaagaacacagcgatccgggtgtggcaaccctcgactgcgcagacggtcagcggtccagcatctgttaattgcgaccaaccacaagaagaagcagcatcgaggcggagcgagcgacttccaaattggggtggaaaggaaggtgacacgaccagaaaacaaggccttataggcggattttgagctgtattggcccgaactctcccatttccagatgattgaatcaggagtagtaggatcaagatccaccatttggacaagcgaccaaagctttagatattctagaataggctagatcccaagtgctcctcggatgtctttgatccattggcgacctgttagtgcctcaaccaccgttcgacgccagcgcacgcgtggtggaattttatcatagatgttcggagcaatggaccgaatgcaaccctcttgcaaccagctatcttcccagaagagaatagtttgtccgtctcttaattaacagacggtagaggctgcaacgaaattcgtttccttttgcgacc

SEQ ID NO: 29317 - DNA, 2681 bp, Oryza sativa
tgaaaggatgtttcgccgcgaagctcgagagcagccgcagcgagactagtcagactcagactcagcagcaacacgtttccgccgctcctcatgacaataccagggccacctcctctcatgtcatcaccagcgatatcagcatggatgcaaacacgatcggtgccagtgctgatgctgacggcaaggcagcggcaagcggcgttggcgcaggtgaaattgtcctcgccggagcttcgtcgacggatatggccatgatgatgtcggtcgaggacttcgcgccgacaccgttggcgccatccgccgtctcaccgttcaagaagaaggggaaggtgcacgagtgctccatctgccaccgggtgttcacgtcggggcaagcgctcggcggccacaagcgatgccactggctgacgtcgggcgcaacggacccgctcacgaagctccagcccgtcgcccaagaccacgccatgatggccgccatgtgccaccagctcacgctcgggcgcccaatattcgaccctaccgaccagcggatactagaccttaacgtgccgacgaacccactggcagaagcggtcgcggccaggcagcagcagcagcagcaggtcgccgctctcaacgacggcgcactctgcctcaacgcggcggcgtcggtgtacctgcagtcctggacagggcacagcaacgggagccacgtgaacaagaccaccgcgacgagcagccgcatcaacgacgcggccggcggcgtgaccacggaggacgatgaagcggacagcacgagcgccaagagagccaagatcggcgacctcaaggacatgaaagggcaggggagtcgttgccctggctgcaggttggcatcggaatttcatcagagagcaaagaaaagaacactcaagagaaacctagtcatgacaaggaggtcatgccgactaatgaactaagaaattaattaattaattaattagtgctaatctaatccatatatatatatacatattgtaggtgtacgtactatatcaatgctttatgtgatcgggatatatgtatgtgtatatacatccaatgtaagtatttacaagtagggtcaattcatgtgttcctaaaggtttgaggcaacatctagggacgtattgcttgggggactgtaaattaataggctagcaagcttgattctaaaaggtttccttactgtacgattctttgaggagccttgctttttatttttatttttttccttttattttttctattttgtaactaaccgattatttaatttgctgcttccaaaatgtatatatgcaagttgattttgtccttgtgttcactgcaattagacaagctatatgtgtgcctatatatgtttttttcttgcatttctacactatatattactctaaatatacgacgttcttaacttttaaacataatatttagctatacgttttatttaaatttattgtaaacataaaaaaatcacgccagatataaaggatctttaataatgcaaattagtaaagataaaaaaataatgtttaaagtaaactgaatgataaaataagttaaagcaaaataaatgaaacttacttcatagctaattttactgcagatatgcaaatgtataagccattcttaacaaatcaaatcacaataaaataaataatacttaacaaatttcatgtcaaaaagatatattcaaaaatggaggtggtactattctgcgggaggtgaggaacgtcaatttttttattcatatcgccacggtggagaagcttgctgatgttcgttaccagtccagttcgatggtgcatgtaaataggtcgggcaggcgcccgatacttataatatgtatataaagtgtatatatacgtatagacaacgtatatgtataatataaattttatgtatatgtattttttatgtataaaaatatatattcgtataaaaactttgtatatgtatatgtatacttgtattggtataatacaaagtttatatacatatgtattatatcaatataaagtttatgtatgtatatataaataattatatgtataaaaaatattggcgtataaaaatatacacgtatacaaagtttatatacgtacgaattaaaaaaaccgaaaaagactgccacccctctctccgtgcaacacatggctgcgacgcgcgggggaggagcatgcctaattagaattggaactagctaataatctgtcgacagtttttaaggctcaaaactttcaaatttttaaccataggatttgtcatcaacagttgaaatgggtactgttaacagtaaaatttggtaatcccaaagttaccatcggtttagagtcagtatcggcttcaaagttcgagaatcagccgatgggagtcaagtcgccacgatgtcgtgttcttggtggagttggatcaatcaaaggaagcttatctagaagagttcgagttcaagaaagatgcgacatgacagttatctattaattaggcatagtttattagtttccttttatctttaggaaagtgtgtttagtgtccgataaggactttatcttttcctttttagtttctttcttgtccgacaaggactagtatctccctatgggtataaatatgtacaaccggggtcattgtaatctatcaatctatcgatcaataatactctcggcgcatcgccaccctcttcc

SEQ ID NO: 29318 - DNA, 1430 bp, Oryza sativa
  unsure (1)..(1430): unsure at all n locations
ttttcttttttctaaggccttcgggcctcttttttgtatagatcaacttaatctgtaatcaaaaatgaagaaatttttgtgttaatttcatcttgctgtgagtatgagatgaggatgatctgtgccgtggtccttttgtgtcttaacttgattaagggttcgtgcccaggtcccagtcctcaaaaggcgcgggtcggggctagtgcctggggagatccacatgtcgagactggccaggccgggaacgtggtgaccgaaggttatgggtaacccgattgtgggtttttgccgattcccccccggagttcaccacgccccggggcacggctcggttctgggccccgtttggcgattttagccgacccgagcccccgagggcaggattgagcacgagtgacctatttcaagtcaagattcttcaaaaggaaaaaacagcacagacacagcctttatgaaattgaaactgtctttattgaaatatttgaataagagaaataagaaagtgcatgtgtggcagnccccggccaaccctgcacgcccgagggggtgcggggttggcccgagcccgaaccctgacacccgaccccccctcaggggtagaagcgccgaaagtgttcgatgttccacgggttagccagctcagtgccgtcgcccgtggcaagccgtattgagccccgccgggggacgccgaccactcgatacggaccttcccacattggtgagagcttgctcaatccagcacgcgtttggacgcggcgtagnacgaggtcgtcgacgcagagtgatcgggcccggacgtgacgctgatggtagcgccgcaggctctgctggtagcgcgcggctcggagggccgcgcgccgccttcgctcttccaagtagtcgaggtcatctctacgaagctgatcttgatcagcctcgcagtacatggtggcccgaggagacctcagggtgagctcggatgggagaaccgcttccgcgccgtagacgaggaagaaaggcgtttccccggttgctcggcttggtgtagttcggtttgcccagagcactgctggcaactcctcgatccatgaatcgccgtgcttcttgagtatgttgaaggtcttggttttaaggcctttgaggatttccgcattggcgcgctccacttggccattgcttttggggtgggcaggtgaggcgaagcagagcttgatgcccatgtcttcgcagtagtcgccgaagagttcactagtgaattgggtgccattatccgtaataatacggttaggcactccaaaccgggctgtgatgcccttaatgaatttaagtgcggagtgcttatcgatcttgacgaccggataagcctcgggccacttagtgaacttgtcgatcgcgacatacagatactcaaacccgcccggggcccgcctaaacggtcccaggatattgag

SEQ ID NO: 29319 - DNA, 710 bp, Oryza sativa
aacccgttctacttcgaggtgctcatcgagttcgaggacggcgacggcgacctcaacgccgtcgacctgatggaggccggctgcggctggacgccgatggtgcagaactggggcgcgctctggcggtacaactccaacaccggcaaggccctgaaggcgccattctcgctccgcctcacctccgactccggcaaggtgctcgtcgcaaacaacgtcatcccggcgagctggaagcccggcgtgacgtaccgctccctggtgaactactcctaaattaattacagctctctccacatctcctgcaagaagctgcagtgcagagttgcggtaaattggtaattacagatttataattagcctcgggttaattatatggcgggaaatgtgcgtccgggtgttgcgagaggcggtgtcagaagaggaggaaaggaggtttaagaatcgtgttcttccctccacggtctctgcattcccctagtgatgtgactgtgtcgtcgtcgatttgtctgtaaaattttatttttcttagttatatcttcctctgttattgtcatgttgagggagaagcttgagctgcaactaatgttgcatgccgatgtatcaagtttgtgtgtgtgtgttttttttgtaccacgcaaatctttcagataaatggattagtactgtcagaagatttctgtacttcactggaactcatgcattgttggggt

SEQ ID NO: 29320 - DNA, 681 bp, Oryza sativa
taacagcatggaaaaggagagcatatagggattatcagatcataccaaaacaagaaacttgtcagtttgcccactgtacatgtacatccaattcctactggggaaataatgttgtgcctgagaacagtacttgaaaccacaacagaagggaaagtcctataatttggccctgactgttcgtgtcatgtttaagaacagtgttcaaatgccaatcaggtatacagcctgaaacttctatcatctaaggacgacaaaccactgctattatatacaacaaattttctgatttcagtagttggcactgcttctgagtactgacagcatgtgcgctcattttagtctctccgtgctggcatctcggcaagaggtttcaaaacaatcggcttgcttggatctaccacaagtgaagaactcgtttacagaaaagccagtgaccaggggagctttcctgtcctagacatcttcaccattgctctctcaacactagctatctgattgtcggttgctgcatgctccttgattttcttctaatcagctttcttttgtgcatcttttattgcctttggcatcttctatgctgctctcgctctcttcttctccaacttgatctgtttccagttgaggcacaaaaccaacaaagtgtcaaacgacaactctgactatatcccaaattaaaataaa

SEQ ID NO: 29321 - DNA, 1348 bp, Oryza sativa
tgcttgtcacgacgcacgcaaaccacggggcccgtgcatgcatggcagccgtcgtgaaccggtcgaccaactgtgtgatctcttcctctcgatcgtccgtgatcgatctacatgcatgctaccgtgtgtgcagggtgccgtgcaaatggcagggggtggacatcgcgttccgggtggacgccggctccaaccagtactacctcgccgtgctggtcgaggacgaggacggcgacggcgacctgtcggcggtggacctcatgcagagcggcggcagcggcggcggcggatcttgggcggcgatgcaacagtcgtggggcgcggtgtggaagtacaactccgggccggcgccgctgcaggcgccgatgtccatccgcctcacgtccggttccggccggacgctcgtcgccagcaacgtcatccccgccgggtggcagcccggcggcacgtaccggtccaccgtgaacttcaggagggaggattgatgagatgatatgtaggggatatgtagggtggtggtcgcacgcgcgcgcatgcacggtccaacggccgccggcgtacgtggcgctagcttagtttaattatgcttggagctatgtatatcagggcccaagtggtttgtgtgcgccattgttgcgcgtggagtgatggagctctctgtcagctcgatcgactgtggtagaagaataaacagatccttcagctaagctatttgccacagttgggcacttgggcgttggctccggtccatgtaccgatcagccagcgtggtccggggctccgggccgtcgcgggggataacgcgacttgtgctggcttccgcggttccacctacgcacttcgttcggtggaaaaagtcctttttatttttctcaactaaagttttagtttgattcgcatccatggacagcaaaatcagatagagaggctaccttaacaatcaaaattgactcattttatcttttcgagtgatttaggtaacggttttttcctacatgacacattgaactagagaaatttaaaatgatctatgaaggaaatcatgacggccatggtggcagcgccacggcaatcgagctcgagataggagaaatgatgccacgggtggattgagtgtccaatggctgcgagtatgatacacgtcgaattattgtctttgttggagacctctagagagcgagctccgccccctcctagccgttggtcatctcgacgcttgagctcatccccctcgccatcagccagcctccccaactctttccttcccttcatgccgtagtagacttcgaggagcgctgctgtaggattgagcttgacaagaaggcagcggggttatgggacatgcggatct

SEQ ID NO: 29322 - DNA, 1162 bp, Oryza sativa
ccacgcgcgatgccgtcgacaccgctcgcggtgcctctccccgcgacggcgatggcacagcgcacacaatgcaacctcgcgaggatgccgcggccgcagcagccaaactgcggcggccgtcccggctcgagcagaggcggcgccgtcggcttgtcagcagccggtcgaatgctggagacgccggggcagccgcacgtggcgcccaacggctggcctgcggggcacggtcacccggcgtctgggactctcgccgccgccatggcatgctcttctcgtccggtggcgcggcagcagggcaaccggagagagcaagggtgggacgcacatcaggctcaggttggtgctcaacaccaaaatctcccgcgatttccaccgcagcaaggcggtggcaacatcggcgagaggcaggggcagggtcagttcaggccgggtacgccgtcctatgtgcaggagcagcgaccgccgccgcagtcgtcgtcgtcgcacgaggcgctgcatgcgggagagcggcaacaagccaacaacaacagcagcggcagcagccggcagcaaaggcaaacagacacagcaacggtggcaagcaggcgcgaacccatgagtaagtgagcatggcttgctcgaagaggttactgcctttactggcgtgagaccgtgagtgaccaagcagggtttctctgctcctcatgcctaggagaataggagggttactgggaaaactgaaggattgctatttcttgtgttagaattaacgaactgagtttgattaatctgttctcataggttgacttgaaagcaaagcattttcacatttcgtttcttttcttctatttctagtgtataggacttttacaatctttagctgacactagcacttcacgtcgcaccaccttcgaactacaatgcggcaagacagaccacacaaaattcatcaggaatacaatgctacaaactgtcaaaagtgccacgactgatggctcccgtcacctcccataattttacagttcaattttccaagcataatgccgcattgagaattcaaatgctgaattgagacaacatccaagacactgtgagtcaaggataattcaaacatcaaacagatgacatattcggccaaactatggttcagtcaccactggagtgtccttgactcctgaacctc

SEQ ID NO: 29323 - DNA, 1730 bp, Oryza sativa
ctcaagcttggaccacatcaaaggcagtcaaagggtgacacaaaggatcaaaatgagaatatttagaaaacttatccaccacatccaatatagagttatacctgccagacttaggcaatccttcaataaagtccattgttagaacttgccaagcaccatccggaacagggagtggttgcaaaaggccaggataccgagagcgatcaggtttggactgcaaacagacagaacaaccagcaatagcgtccttaatcccttgtttcatcttaggccaagcaaacaaagccttgatccttctgtaagttactggaaaacccgaatgacctcccataggactactgtgcaaggcatcaatgatcttgtgctgcaaggacagatgattgccaagccaaacacggcccttatacttgataatgccagtacacagagaaaacaatggtctggcagtagggcagagggccagatcagacaataactgagcagagtaagggtctgaaaggtagccatcacttacttttgggagccaaacaggggtacaactgtagacagcattcagtttagaggagtcctcagaatacttcctagaaagagcatcagcagtcgcattagtactgcccttgcggtaacaaattttaaattgaagccccaacaacttggtaaacgctttgtgctaccaaggtgtgtgtatcctctgctcattcaagtgcataaggctgtgatggtctgtcaaaataatgaatttagcctgctggagataagagcgccaatggtcaactgccaataaaatggcgaggtattccttttcataggtagagaggcctctatttttcaaactcaatgctttgctaatgtaagcaatagggtggccttgctgggaaagaacagctccaatgccaacatcacaagcatttgtctccactataaaaggttgagaaaagtcaggaagggccaatactggtgctgatactaatgccatttttaaggattgaaaggcctgatctgcttcagatgaccaaacaaagggaacatcctttttgagcaagagagtgagaggtcggctgataataccaaaattcctgacaaatttttgataatagccagcaagacccaaaaaacctctcaacttcttaagagttgtaggtactttccaattaacaacttcttccactttagactgatcagtggtaacccctttatcagaaatgatgtgaccaaaataagaaagttgtgtctgtgcaaaagaacatttggacatcttaactttccactgctgttcagagagaagtgtcaaaacttgtctaagatgatcaagatgggaagtcagatcaggactataaataaggatatcaaaaaaagacaagtgcaaacttaaaacagaagctaaagtggcattcatagccccctgaaatgtggcaggtgcacccgtgaggccaaaagacatgaccctgtattagtaatgaccagtatgcgtttgaaaggctgttttatactcctcaccctccaccaaacgaatctgatgatacccagctcgaaggtccaacttagaaaagaaacgggctcctgagagttcatcaagcaattcatcaatgacaggcataggaaacttccatttaactgtgatagcatttaattacctgtaatcgatgcacaaacgccatgtaccatcttttttcttaaccaatagtgcaggtgaagagaaaacactggaactaggctgaatcaccccagca

SEQ ID NO: 29324 - DNA, 1042 bp, Oryza sativa
agcggggagagggcctgctccggtcgtcgggggccttgggccaccgtccggctcgggggcctctcctccctgctctctcccgggccaagccagcacagggtgggggtgcacggaatgaagattgtcctcatcgcgctccacgatcaacgccgcactaaccacttgcggggtcgccgctaagtagagtagcaagggttcatttggctccggggcgaccagaactgggggagagctgagatacgccttcaactgagtgagggcacgttcagcttcctccgtccaagtaaacggcccggagtgtttgaggagcttaaataagggtagcgccttctctcccagccttgatatgaagcgacttagggcggccatgcaactggtgacgcattgcacatccctaagcttgctgggggggcgcatccgctctatagctcgtatcttctcggggttggcctcgatgcctcgggcagagaccaagaacccgagaagcttgcccgcaggtacaccgaacacgcatttatcggggttcagttttatgcgggcggagcggaggctctcaaaagtttccgctagatctgaaagtaacgtttcctggttgcgcgtctttacaaccaagtcatcgacataagcctcaacattacgtctaattggctacccaaagaaattcgagtagtacgttgaaaagtaggacctgcattctttaacccgaagggcattgttgtataacaataagtttctatgggggtaatgaacgcagttttttcctcatcctccctagccatgcgaatctgatggtaaccagagtatgcatctagaaaacacaaaaggtcgcaccccgctatggagtcgacaatctgatctatgcgaggcagggggtaaggatccttaggacatgccttgttaaggtcggtgtagtcgatgcacatccgaagcttgccgttcgccttggggacgaccaccgggttcgccagccactccggatggatgacctcgcggatgaatccggcctccagaagtcgcgccacctcctcgcggataaaggctt

SEQ ID NO: 29325 - DNA, 2433 bp, Oryza sativa
ccatgcaaacaggaaaagtctaggaaaaaattgcaaatgccataggaaaattacgtagattgtattaaatatctcacagacaaatagacttgggcaaacagccaactattacgcaaaacatgtaaaatgatgttactttattccatcatgttgcccctcaacataggcagctaagattctagcttaaaaaacataacgctagtcttgattacaatttgacatgttaaggcactcattctcgatgattgtgaaccaaaacagcaagctcctggtaaaatctttcaagaactagcaagtcatgtgcctgcagaaaccagatgtcttactcaattgacctcaattcatcaaaaaaaaaaagaaaacttaacaagcgaatctactcctgtgttttggaggattcgtgtgtgaaagagctacaaagtatgaaccagcctcttccttgttctgggctgctaatctggaaaggttcagtccaagaaaaagaaaaaccccctctctcggtgggcaaggtcctccttttatatcttaagaggataccacatgcaccatttccctcttttttgtggggacctcccccaccttttcataaatggacggagatttgtatagttgccatccgagtcaccttctgatgggacggcccacaactacccccactttcgccgggagcagatgcgacgtggaatcgtggccgcctgctgacgacatgaccggagtcagaccagtcacgtcggtcattcttgtccaccacgtgtcagcttagcaatctacatgtccgcccttcttcacacaacatcttgcttgtaatggttaggatgaagcctggcatatatctgatcagggctaacgtgccatctctgggaggtaacacgctagctccagctggggacgagcgcctagaagccctcgtcctgacgggatggggtgaggcgtgtgtcagatcgcctgtggccacctaacccgcgatctgaccggtctgtgaaaacccggcagtccgcgaggtcataaagggaagtgttgtggccggtgcaccacttgccggttgggcgctccctgctgggagcgccggcctctttctttttgtcacccgcaggcctcccctttcgggtggcccgcggagcgccctcgacggcgaggacatgaccctcgtcgtcggtatgggctgacctcttcttcctcctcctatcacgccgccctgtctgagcggcggatccgggggcggccgaagctgccacaccggaaccggaggggttccaggtccatgcctcctccttacgagccactcggtccgcgagctgaaaaagctccgcggtagtctggggctctttggaggcgatcttttcgagcatgcggttgtgccgcacaccccccctgaacgcgtaaatcaccgcgtgtgcagggatgcatggtatggtattacggacttgacagaaccgctgaatgtacgagcgaagtgactcatcatcccttcgctcgtactgagtgcaagtccgcttcctcaccggggcgcggatatgcgccttggaagttcatggtgaactgttggcacaaatcctcccaagagtggacagacgcgggtggcaagttcattagccaaccccgcgcctgttctttcagggccatgggaaagaaattcgccatgaccctgtcgtcacccccggcggcatcgatcccggttgtgtagacctggagaaactcggcggggttgacgctcccgtcatatttttccgcgatggtgggccggagccttgggggccagcgaacattccgaagactcgccacaaaggctctacagccgacaccaccaaccgggggcacggagggctgattcccgcgtccgtgttgaggtgacactctggacgagaaagcgccctccgttgcgtgggcagcacgtcggtcaatacaccggcgctcgatgctggtgcgggcgtccggccccccacgcagatcttcccgggtcgaaggagtcgacgaaggagtggcggccgaatgcagaacaacggctcccgctcgtcgtgccaaccgtcttgacgacgcgaagccggtggtagcagcaccaaaggcattggtggtggaggaccgcccaccagcatttaggcgctgccgtgcagtcatgaccaatttggccacatcgtccagccaacgttgggatggagactccgggtcatggacgacggccgggtaacgtaggagcgcgcctgcagcttggagcgcgccctggggcgtgctgccgtcgccgtagacgaggaggcgacgctccccatctcgccgcccttctccacctcctgtggatgtcgaagtcgcggatccttcagccctctcgagcgccttctcccgcctaggactttggcgtggagggggcggtggagtacgagctctacggcgtgggtttggctccccgtagtcaccgctcatactcggggagaggtcgtg

SEQ ID NO: 29326 - DNA, 3196 bp, Oryza sativa
atgctagtagaccataacttcctgagtttgatcccagtttagcattgacaagggttgacttgaagtcttgaagtacacgcccactaactaatgctctcttcgtttcatatataagtcgtgttttgatatttttttactaaacaaacttatttaagtttgatcaaatttataaaaaaataataacatctataacatcaaattagttttattaaaactaataatgaatacattataataatatatttgttttgtgttgaaaaattaatgttactatattttttccaaagcgacttgtaaaatgaaacgaactagctggatggcctgcacaattgcgcggctagcacctaaaaaaatcacatattttttatatgattttacttaaaatttattagatagctatcttattgtcttaagactttgaaagaccaacccttatcatcctcgtatttctagtttttaaaagtcacaccagttgctaccccttatgtcatctcgttctttatttgcttgctcgatataccactatttctttttattcttcttggaacctttaaaaattagattttatagtttctagagtttattgtcatgttgggttttatttttataatttttagatgtcccgtcaaacgttgccattatactcatctacggcccgtctaatgtctcttctctttattgtcattgagattttaaaaatcgaacataattattgtctaggttcaattttactttctaaaagtcccgccaaaccgtctatggctttaccattgtactcctctatagctcgcccgctgctttccttctttattgtcattgagattttaaaatcgaacatgattattagtggttttttttactttttagaagtttcgaacatttaaaaattggacttgtagttccattttttatattttttagaagtcccatcaaacgatgccactatgcccctctacagcccgtccgccgtctactgtttattatcattgtgattctaaaaatcgaacataaataccgttggaattcattttttattttctataagtcccgtcagccgtcgacggctctgcaactatactcttgtgcaccccgcccgctgcttctcctttttattgtcattgagatttaaaaatcgaatatgattatcaatggggtttatttttttttttttactttctagaagtcccggtaaccgccttactcgtttgcttcacggcctgcctgatgtccctccttttaatcgtcattaggattctatttggtgttttattaacaatttttatatgtcgtatcaaccgccaccactctacttttttataggcatgttacttaatttatctcatcatgtgttttagatggtctcttatttcaataatctttatttttatcaaaaattttagttatttataaattgtattcctaattgaaatcttatttttctttttctaatttcagaattttttttaaaaaaatagttattaccgtattgtgttcttttaatgtttttattttttattttcaatttcagttgtttcaaaattgtattcctacttgaactctcttttaaattttctaattttggatattattttattttttatcctaaattttaattaatctcgtattgggttcttatatggattcttctttaaatattgcttatttttaattccgaatttcagctaattttaaattatattcctacttgaactcttcttttattttcttttgctaatttcggatttatttatttttattccaaatttttattaatctcatattgagttcttatatgcactcttcttttaatattccttattaatctcatattttttttattaatctcatactatgtctatatgaattattcttctaatatttcttattttttattcctaatttcagttgttcgtaaaatgtatttttacttgaactcttattgaactcttatatttgatttttctagtttctaaatctattttattttttattatggatttcaattaatctttaattgtgttctacatgaactcttctttcattttttattgtgttatttcaaaatcaaataaaaatccgtgcacatgccatcatgctattctggttgctgacgtgtgcatcacccaaatacggctcactgtgcagccgcacggcttgacccgctgcttcggatttccgtcgctcgctgctagcatctatcttcatatcaacaaaaacgcatccaaattactgttctatagtggttcgttgcccgctgctttatttatatatgtgtattatagcctaattcatctctaactctggttaattggtttaggaaatcggacaaaactcttttgagtccgtttgcatgtaaaggtcctagctagagattgattctaattctacacgcgtacggtactccgtatctcttaattaacatgccaagtttgtcttaaatctcagacattgaaatctatgcctcttacaatccaacggtataaataattcatattttcttcgattaacgtgggaatttctagcctccacggtgaacgtggtgtctttttttcgagctgtattaataatataatagataaatcgtattaatcgaagagtggagtaaataatccaatccgttacaacaatccgatggctaagcttaaaaggaggagcgtataactggactgaacgaccgctggtgtggcgtgtgttgttcctcgctctcctgagagtcctaagtcctgacccagattggaaccgggattattcacagtgagggtcatcagcggatcagcctgttgtttttttggctcaaaattttctcggatttttggcgttccgatacgtcaagcaagaggcccagatgtcgtcatgtgcgtgacgacgaaaggcagcgaacctgcggagcacccggttccgcgatgcgtgcgccgtatatgggcccggtttattcgccatcctattgggccggaccagtacagcccgaactgccctataacataacaagcacatatctatctcctcatggattgagggcctgcttggtacagctccaactcctaaatttagctctaggagttgggtctggagtggagttgtggagctgcctaaacccagctccacaactctagttcattttgtgagagagctccacccagctccactcccagttttggtggagctgaaactgtttggctgagctccagctccagaa

SEQ ID NO: 29327 - DNA, 1702 bp, Oryza sativa
tttagtaggctataacctggtcaattggtataacttgtgtgcttcgatcatggttgtcaagtcgtaaagtcgagtcgaggtacccctgaaccaacttgtcgacttggtcgactagtccacgactagcccacgacttggtcatgcaaaaacagtggatgcaatatataatctttactagtattatactgtgctaaggaatgtatataatataaactatggactatagagttgcaaagcaaaacaataagtcgacaagaaataaaactaaagtactaaacacaataagccaattagcatggtgaattggtgatttgctatgactaatcacaactaatttacggctgaatttacgactaatctacgactaaccacgagtaaccacgactaatcgcacgacttgctatttggtcaagtcatggctctttagtcgactagcttgaccgactttacgactaatcacgactagtcgggcgacttgataacaatggcttcaattgtgcatatccatttgacagaagaaagtgaaatatttaaatgaaattttcatcaaaatagtaactcggttcggtctatatacttagctttaattaataatacttatattgggaggaacaaaattaactggatacttaagatgcctcttaagattaagatttttatgtggtatttgcttaaagggatagtgttaacaaaggacaatttggttaggagaaattgaaatattagtgtgagatgttgttttttcaataaaaatgaggggatccatcatttattcatggagtgccattttgctctggagagcattacaggtttcttatggtttatatcctccacatagttcatctcatatctttggggattggcttgtgggtattgataaagaaaacatgaaacttattattttaggagcatatgctatatgttggattctatggtttaggagaaatgatttgttttttttttgacaaatcaccgctcaaatattatatgtaggttttttttgggcaacgtgctggatccggttttaggctcaactataaaggtgtgatgatgacattaagctaataaatactgcatgtcgtaaactcgagtcaaatggtatgcaacttttcaccatcttgtggggtctttaccttgtattggtgcatattagtttatgcttgcttcatgttatttgggcgagcttttttagatttgttggtgtgtgctcgttattgtgtgaatttgtgtaataattggttgtaactcattaagtaaagatgaaattttattatgttgtctactccctctgtttcaggatataagatgttttgactttggtcaaagtcaaactattttaaatttgaccaagtttgtaggaaaaagaacattttcaaccaaagacaaatttattatgaaaatatatatttaattatttatttgatgaaatcaatttagtattataaatattactatatttatctgtaaaattagccaaacttaaaacagtttgactttgattaaagtcaaaacgtattataacctgaaatggagggagtagaaaaaatagtaggcgtcgggaaacagtagtgggtgtgtgcttttaggtcttgatcgaaagtgcttcctcgtaggtaaaaccattcaatctgagcgtagctttattcgattgatctttctttttagttgttactaaaacaacttttgtagactcttcttacct

SEQ ID NO: 29328 - DNA, 1847 bp, Oryza sativa
aacctcaatagtagttttattatgaaagatgagatacacatgccaacccaaaagaatggacaatgccaaagctagtggacacaaaaataccccgcaaatgatctgcacatttgaaacatattattcacttagcatattatacaaggtcatattatacagcatgactgaaacagcccttctgaggtacttacaattgatgttctagaagaatcactgcctaattgttcatttttaggcaaactgtgcacagcacctcctataaccagaacctgttataaatgttaatcctcacattcttaatttcctaacaaggaatagctgctaaaataaaccaaggatattgaagtaccagtgaatataagcttgcttctacagcatacagcacaaagactaggaaaatcttgttttttcatgtccaacacaattgttaatccatatacagtgatggtcctgcatatattaaaaaaagggaataatgcaaattggaactacaaaatagaaaacattgaactcaacactattactacaagtcagcaccattcttagaacacatctcttgcagacacgacaatgatgagcacggggaggcttataatgggaacatttctgacaatatctcaaatcgccaccctgcaatgacaggcatgcagaaataagcaggcaaaacacataaagaatatgtgatgagaaataattccagtactaacaataatgtatataagtgtaatgttccaaagagacccatggcttttcattatagagcaaaaaaaaatagctttccttttcaaaacctttttctttacacaaaatgcccaattggtgtgttcgtgcgctaaatgcatgtgaaatctgaccagaataatcatcaatgtttcatttgaaactactggaaacaaaagaatatcttctaatgcaagaacatacgagcgcaacaagtcaacaaccggtaagtctactgaaggcaggactagaatacgccttaatggttcaacaagactaactgatagcaacataattatagccaatgaaaccttagtaacaagcaaaagcaaagcagattgaatgcaatacattatctttatgcaggcacctattgtttaaacgccccaaatgatgtaaagcccttacacactgccaaatgggaaataaataatactatcagctgagctaccataagctcagaaaataattaatgataattggtaactatccagcttcctcatcaaccatcattatgtatttaatgtgtgcaatagatcccaaaacattaattttcgaaatctattgcacacattaaatacataatgcaaaccttccaattcaccaaccaagcactcggcatgcaagactagacctaagattcgtacttagatccaagactatataatccataatacaaaggccctcatctcgcaatatgtgcattcttagcagaagtacaccccgtaagttcaaatatggatcataacagtatgtgaagatcgaatgcaaaacgcgctcacctcaccccctccatagccccatatcctcggatgcacacctacatgctgttactctcttcctccccaaagacctcaacgttgagctcaaaattgccatcccactctgaagatctaaagcccacgcacggaatatcagctcaggggatcttcctaatcggcaatgtccgaaatctaaacccaaaggtatcaaattttgaggccgaactgtccaattctgctagcttcccactccaaggatctaaactttgcagcgcaccgcggggggcgcccgcgagatctgggtggccccgacggaagagggtggaccggccggtgtaccttgcgcttgatctcgtggatctttta

SEQ ID NO: 29329 - DNA, 1258 bp, Oryza sativa
tattagcaaatgtttcttgtaacatcacattgtcaaatcatagagcaattagtctcaaaagattcgtctcgtaaattagtcgcaatatgtgtaattagttattttttttatgtatatttaatattttacgtaggtgttaaaatgttcgatgcgatacgatataaaatttttgggtgagaaataaacagggcccaactagtagcaccacgtggagttctagagtcaatcagtgtcactgtgcacgcggggttgaaagcgcgcgccgcaggtaggttgttcactggcgtagtggcacaccagcggaagcaagcggccggagacattaattccagatcatgttcagagaaatacaggatggtgcgaagacacgcatgctttcatatacatgcacatgccatatatagtctgaatcactgtgctgttgaataatctccaagtgcacgtcatcaccgaaaacgtaattaattacacgaacgccgaactgcaagaattaacatccatctgcatcgcattaaaacggcggctaatgaacacaacagcgatgttttcagatgagcagtctttttcagagaagccgaaatttgcaggatcacggcaatggtaacatcatctccggtgaaaatgcaggagttactacaagtgcaccagctcccgatgcagcgccaagaagcacgtcgagaagtccaccgatgacccggagatgctcatcgtcacgtacgaggggtcgcaccatcacggcccgcagccgctcttcccgccgcacatcgcccagccaccgccgccgacgtcggtagtgggcttctccgccgcctccggcgctggcccgccgccgtcgtcgcccgcggcggcggcaaggaagaggaagaactatgtcagggcggccttctcgccgacgacgtccgaggacgacggcgacggcgccggccggctacggccagagtggccacaagacgatgggacgtcgtgtgacgtcgccgagttacgacgacgtggcgacgcggagcacgccgcgccgcgtcgtgtcgcgacggatcgctcgtgcgacgatggcggcggcggcggctcgacctcggcctcgtcgtccgtggcgcgcgctgacgccgctacggcgctgtcctctgactcgccgccgaccatatggtcgtgcctggactggccgtggtcccaggaaacactgtttctgtagctgaagtgagtggggagttgacttgggaagatgactcgatagtacagtactggatatctacttgcaaggtgt

SEQ ID NO: 29330 - DNA, 520 bp, Oryza sativa
ttgataaactttcccaagccaggttacactggttttccaagccctgggcaagaccactaatatctacagaggtgctcttgctccaaatacaatcccataaaagcaacaagaatactctcatcttatatatatcaaataaaaatgtactggatgaagcatgtttgtgtacctctataacaagcaaagttgccaaacgatccttaataaacttaagaatcagggctttatacttctttccctttggttgtcttctcaagtattccaacaaccagtaacgtaagttgaggctatggagtctcctggcaactttaacatgcatgcttgcaataaaggtcattccttctagctcaacagctgaatagggtggagattcacctctaagaaaagccttcatctgcaatttaatacatcttccatcagcactcgattttaagtagaccataagtaggacgatcggatcaagatacaatgagcctagactgcactcataacataaaacacaaggtgggtaattgataat

SEQ ID NO: 29331 - DNA, 675 bp, Oryza sativa
atcatttgtcctttttggcacagatggttggttgaactggaattagatatttgaatgaatcagtccccccacccttttttttttcttttgcttttgctaattggagaccaccatgccagtggttgtttctgctgcctcatggaaaaactcttgatcaaactgtgtcgttccaagtcaacattcatacaaatggactgatttgtcaatattgtctactattgccaccagttttctttatgtctgatctctacagctatggattattttcagttgttttaattcaataaaatcatgtacttgtaggtgagccatgacatgggaatcgaaacaccaattcctattagtgtaaaggttgagggatttgaacaatattttctgccggatagtccatgcggcgcagcagcctcatttgagcatcccagagactgaagctgggaaaacacacaggcaataccgtcaacttctgaaccgttccctcacggttgtctcaggtaagttagtgtcaagcttctgcctctaaagtgtgtttctgtatttgcctttatgctctggcacaaatcgatcatgccaattactacagaatagtaagagcacaggtttagtaagacaataaaatctaaaagtaatagttatttatgattttgagttgaaactgaatagtggttttatcttaag

SEQ ID NO: 29332 - DNA, 716 bp, Oryza sativa
gttctaacagagcttcagcgagtacagaagatgctaaagaatttaaggaattgtcaacaaccaacaaacgaaacctgagctgctgtcaaaatggtttcttgactatctctggcaatgattttgcaaaaacgggttttattattgttacacagagcagaccctggctgtttcgcgacaaagggaaagcacaagacaaaataaatctgacaatccaatgaggaatactcttattcagctataatgacgttctaacactataattttttttcgttgttgttttgtacacacctgtggcttctacaatctgaattttctaactgtaaattcacaaagtgcagcgagcaatgtattcttctacagagtgtcgctcatcttttgtacaccttggttagaagagatgggagaatgattggtggaccttctgtactcagtacaaagcttcaattctggaattcttctccaccggttttgtttgatcttgttgtggtttaatcgtgatactttgagaaaaagctcatcagctcagaaagacacttcagctcatctgtcctacttcatcagattgatgtcagttcctacaaggcaatggtaaaacaattatgcacacttcttccatgttcaaatcaattaataaaaggacccaactaccaacatggatcagataaaccaggtagaatttgtagactggctatgaaaagtataatgcatctcaattg

SEQ ID NO: 29333 - DNA, 1458 bp, Oryza sativa
tgtttctcaactgttttcgtgagagccattctttttgaccttgcccggtattgtggtgaaacatcaaagctctttacagaaccatcaagagaacccaatgacaaaaaagatgtagttttgaatgactctggtgtagctgtagcaggttccatccccatgggagtgtaaaatctatcagtatttgatccactgatcttcatctcactagctgaaacaggtgttgatttatcccgttttcttctttttaatattgaaggagtacctggaaaactgttagcagcactcttcaaaattgaatcaacactaagctggcttgttaattttccctttgttggagggggagtagtgcagccagcaggtgacaatatatcatccccacaatgttcagatgtatggttcccagtaagatggtcagaaaagagtgaggaactcacagggactacatcttccatgttagggatctggtaacaaagtggaccaagagagcgtgcctcattcttcaaagataattctgcttcacctttggatggtgcagcttctagttgaatggtccaagagttcccggtatgatcaggtgccgagttaacctcaagacctttctcatgaacagaatcaatttccaagcccttaccacggacagaatcactttccagagcttgcgccactaaagtgacagcggaaccatcaactacagatgcctcacgggaagtaagtggctgagcagttggtaatgaggaacgagatagaaaccctgagcaattagaccgatgagctgttccaggttggtcttttgaattgataatgggtgccttgttcaaatcaagatgaccctccatagccatcagctttggtttatccttgaacttatcatgaacaagcagtttcggaactaccatattattgctggtattgtacatatcttgcttctttctgagagaactattccaatgatcctttatagaaataatcagtcctggaaaagcaaccatacgaagcactgtgaaggtgatgtaaagtgtgtcttttcaaaataataacacaactcataattctgatttacgaacaaccaaccaatattaaatagtttaagaccatcgcacaggtatataagcagttgaaagtagaacttgaaccaaaaatcaaccaaattaaattgcacaagcgcgttaaaagatcaaggccagcgtgattttgacctagctcgatgaattaatgaaagcaaaaaattccaagggaagtaagctttataaaggtaccttccaggaagaacttttgctatctcggcccatttattcccataaatccgatgagcatttatgagggcttgttcctcctcagtagtccaagcatctttccttatttggggatttagatgattgtgccacctaagattgtatgacttcatacttagctccgtataatgtattgtatcatgccaaacttaagcacttttttcat

SEQ ID NO: 29334 - DNA, 888 bp, Oryza sativa
caatacttatctgacgatcaaatcttcctggtcttagcaaagccttatccaggatgtcaggcctattggtaccagcaagaacaacaacaccagatgtagttccaaacccatccatctctacaagtaactggttcaatgtgctttcacgctcatcatgtccaccagaaaaacctccacggcctctagcacggccgattgcatcaatttcatcaatgaatacaatactaggtgaacactgccgagcttcttgaaataagttccgcaccctggatggtccaacaccaacaaacatttccatgaagtctgaaccagaaatagacaagaagggcacaccagactctcctgcagtagctttagcaaggagagtctttcctgtgcctgggggaccaacaagaagagcaccctttggtatttttgctcccagttcttcatatttcttgggatttttcaggaaatgaacaaattccataatttcttgtttggcttcatcacagccagctacatccttaaagaacacctgtagcacacaagaaacaaggttacttcagtagaattatatgaatatgttattgtatgttctttgtcaatggtgaataaagctacagaacaaacatttacaaaaaaggatatgaatttcatgttttgttcaaaatagcaagagatggaaatagcaaataaaaactaaccttatttttggagtttttatccaattttgtcacttgaacttttccaatactgaaaatgctacggcctcctttcccaggaccacccccaacagtaaatccattttgtatccttttcccaagcaaatatattaatccaataattagaacggttgggacatacttcattacttcctcaaaccattttgcttcagtagtgtaagtg

SEQ ID NO: 29335 - DNA, 665 bp, Oryza sativa
catttcgcccggttaaccacaaattaataaccttttttttttgtttccaagaaaaaaaacagagacaaacgttaccgtgcacgagtactgtgcttcctcctgcatcttttttggcgcgtgagagaattcggctccggaggttggtaacagatcaaatcaccaaaggtggacggagaagattccgtgttcctttctcgtaacggagatgcatgggattgtgcatttgttgctccgaattaatgcggtgtgtcactgtcgtgggatctgagcgtggtactcgacctaacatttttggtccattggaaaagcaaactctgttattgggtccggctggtgtcacgtaaacaaaatcttagttgcgacatagctaggggagctaggtgcgctttccattcatgcacgtcgccgtcgaagaatttagctggtgattagtgaatattgaaacgtgctgactctggttaccgttggcatgcgtgcgtgcgcgtggatgcagacacgttcaagctgaaggtgaaacccgggaaaacgtacatgctgcgcctcatcaacgccgcgctcaacgaggagctcttcttcgccgtcgccaaccacacgctcaccgtcgtcgaggtcgacgccgtatacgtcaagccgttcaccgtcgacaccctggtgatctcgccggg

SEQ ID NO: 29336 - DNA, 664 bp, Oryza sativa
ctgaatcaaatgtgctcacagactgaaaataacaaaggcatgtttagtacttacctgactacgacgccactgtgcacgaagggaagcagcttcttgaagaattctcagttcttcctcttcttccaggttcatatacagtagttcagttgcactctcatatgttaacatgtaggtaggttttatgattgaattctctatactatattctgcaatactatgaacaacacaaatatagttctcaacaattttgctataacaagcaagagaaaagcaatattaagatagtaggataccttccatctggctgcaaaatcacagatacagtaacagatttacaacccctgccttgttgcaggctcatagcattcatagcaagcctctctgggaacattggaaaggtagcagttggtaaaaagatcgaggttcctctgtgcattgcttccctgtaggaaaaaaagtaatgttctcttatacataccaatactgatagaaacactagaagaaggagaagaacaagaacctgtcaatgatgctccggggttgaaccaagcttgttgggtcagcaacatgtatccagacctttatcctaccatcaggtaatctagcagcacttagtgcatcatcaagctgagtcaccaaaaaaaagtgtttaatggatctgtca

SEQ ID NO: 29337 - DNA, 718 bp, Oryza sativa
cacccctgcgccgtgaacgggacgtgccaaggtcccaacgggagccggttcgcggcggccgtgaacaacgtatccttcgtgctcccctacacggcgctggtgcagtcgcactacaccggcaggtccaacggggtgtacgcctccaactttccggccatgccgctgtctccgttcaactacaccgggacgccgccgaacaacaccaacgtgtccaacgggacgaggctggtcgtgctcccgtacggcgcgtcggtcgagctggtgatgcagggcaccagcgtccttggcgccgagagccacccgttccacctgcacggcttcaacttcttcgtcgtcggccaagggttcggcaacttagacaccgtgaacgacccggccaagtacaacctcgtcgaccccgtcgagcgcaacaccgtcggcgtgccggcgaccggctgggttgccattcgcttcctcgtggacaatccaggtgagaatcattgcattattgcaacattttattgattttttttattcttacattgcatttctgatcaataagcgagaaaacagatttggctgcgcacacatgagttgaaatttgcaactaattcgctacttttgcttgaacgtgtgcaggggtatggttcatgcattgccacttggaggtgcacgtcagctggggcctgaagatggcatgggtggtgcagatacgggagcctacccaaccagaagatcc

SEQ ID NO: 29338 - DNA, 549 bp, Oryza sativa
ggcgaattcgagctcggtacccagtctaacacagctgtgtcagcatttactcatctccctgaagggcctgccaggagttttgccaacatcagtgtgctccgtgctgcagaaatggatttccaaaaacctgtaccacatggtgtcctcggtattcctggttatgtacagttcacctcccctattcgaagatatgttgatctgctagctcattatcaggtaaatatgcctctgttattcctgctaatagggagaactttaacagtttccaggaacatgatggttacaatttacaaagagctttcctattatcaatttcccaccttgtgttttatgttatgagtgcagtctagtttcattgtatcttgatccgagcgtcgtacttatggtctacttaaatttgagtgctgatggaagatgtattaaattgcagataaaggcttttcttagaggtgaatctccaccctattcagctggtgacctagaaggaatgacctttattgcaagcatgcatgttaaagttgccaggagactccatagcaacaacttacg

SEQ ID NO: 29339 - DNA, 1179 bp, Oryza sativa
aatggtgacgagcagggacagtgcaggaggaggcatcttcaccagaagagctccggccgttgccacggctaaagagagcaaggtaaagaaggcagcaacactacggcggtgcaccttgaaggagctctcctcctcctcggtcaagaaggttgggggagccatgttcttggccgtcgtctccttgccaatgtgctgcaggtgctcggcgtaggcgtacccgagcaagccggccgtccagcctgtggcgaggtgcatgacggcgaacccggcgtcggggccagcgaacgtgtcggcggcgacggccacaaggacgccgtaggagacgcggaagaagactgtggagggacgcattgtgcgtgagaggctggagatcaagaagaagaggtgggtgcacatgaggagggcgatcgtccacaggagggccagcgggtcaccggagtggcggcgcagcagcggcggagagcatacgaggaaaaggaacgggactgagatcaagattatgcgagctcgaatacgattggagccttcattgtagacagtggtgactctgcggcctcggcccgatcgactcgccggggagatcgtcgccgagcccgagtggtcgccgtccgagtcgcgcgacggcggccgaatgtcggagggattgtcgtcgggggaggatgagtcactcgccacatgggtggtgtcgtcgatggcgtctccccgcaagaagtcctctgtcttggcgccggtgacgatcgacggggtcttttcaccggtgatggtcgacggggtcttggcgtcgacctcggcgtctgcttcgccatccgcggcgatggccatctcagtggtagggtactagggttgtggacttatggggttgtaaccgcgagcggggtggcgggttttataatggaggaggagctgcccgtagcgggtagcggggcggaaggagaggattcggattacccaaaaaggaaaaaggaaaggcgtgcaaaggaacaggaaagaggaaaaaggaaagtaaaggaaaaaaaatacggtaacgctaattcgctgcgcgttaggattaatcgagtgtggattctaatccctcgaggggatatccccttgtatatctttttcttccaaatttgatgcaaatagttgtgaaaaattctgaaaaaaattgataatgtagagtataatgatacggggatc

SEQ ID NO: 29340 - DNA, 5960 bp, Oryza sativa
agctagacaagagagaagtggcagatggggggaccctacggatggaattccaacaactgcgacagcagggaagtgcttaagatcagatgctaagccagccaaaagagagccatcagttctaacaacaaagacctaagccatcaagcaaggagcatgcctaaaagagatccagagagaggtgaggcacgagcaacacctagatgatggatgaaagcctagctggtcagggcaaggagcagcgcaaggatcggtgactagagagacatcacagttgtcggtgacatgggaccgggagtatcatgactagaggcttgaggcagacacaatcgcccacgtggcctggcaccctcggggggtgtcacgcccagaaatttagcccaaatttccagactattttgtgtattaaatccctgtccaggaccagccagggtacacaaaacgacaagtaataaacagttccaaacgtaaataaagcgtaaaatacttacagaagaggcacttagtcctcacaccgaaacaaaagcagcagcagcggaaaaaggcgatcctagcggggcttcagctccactccacaggcaaaactcaactggggtctgagccttggtcctctaacttcgtcttcagctcagaagcactacgcttctgaaaaagggggaataatagcaagattgagtacaaccaccgtactcagcaagccacaccaacgatgcagacgtgcaaggggatccaaggatggtttgtggctatttgcataaaggcggttgtaaaacattttattgagcaaaacagtaaaactgttgagtaattaaagtaaattagatctccactgatcaacgctacaccacgttgaacaggcccaaccaacccacctgtactacagtgcattgggtcgatttattaggggtgagactaatcacggtgaatctggtcgatcgcccataaccgcgggcacggctattcgaatagttttactctggccagaggtgcacaactgtacccacaagacacaacccaccgacatgtcaccgcgtcatcatgtgcccatgatgcacacgtcaccatgtcgagtgattgtgacgagacccttcgcataaccctcccctaaccatccacaccacgctaaggtttcacccccacccctcaaaaggcagtgggcggtcccctcttgcgccgcggtgaatccggcagctggacaaccggacaccccggccgacccaactccatcacgcccaccctcgccaccggtgcctaggaaagggtcgagctatacttcagatcaagcagttacccattcccgcttgtggcaagcgctgtaagtcttccagggtttcccgtgaaccggtccttaattgccatgggtgcgactcacaaaaccatgcacccacagcccaccattcagtcgcattttagttggataattacgaccataaaacatggccaggtgtttcgagcacgcagctcaacaagatactagaaaggtctaaaactgtaattatcccatcaactgagctagtggtaattaagcatggctaagcatatagttctagctaggtcacataagtaacacaagctagtcgatttatcacccaaggttgacaaaggacagatatcaagtaaacatggcacaagcgagcagataggtaaaccctattcccatgtaattagcaagacatgcatgtttatttgcaaacggtaaaacatttataaattgggatcaacatgctcaaggggaatgtgtgacttgccttgcttcttcacttggatcttctaaactcttttcctcgcgaccgcggacttccgaaacgacggaaactacacgctggcacgcaaaacgaggaaaaactctaataaaaaccaaggaaacagtacataaaaactaaacaaacatgtagagctcaattttagatgaattttgcaagttgaatggctcaattcggagttcgaatgaattagatatgaattttagaagttttgagccatttaaatgaatttctataattaaactcgatttattgcgcaattattaattatttttacaaaggaaaaaggatctcgctgacgtcagcaaggggcagccggcgccgacacgcgggccccacacgtcagcgggtcaaggagctcggtgcaccgtggaccgggaccacaaggacggtccaccgccggtccacgggatggacggcccagatcgggccaagccgatcgggcagctgaggggagtggtggcagggcacgggcacagccagggctggcccgaccgaccacagagggcggcggcgcgcagacggccggacaaccggcggcggcggcggcgcaacgcggcgctggcacgggaggcggccggcaaagaggaaaaggaggagggaggcggctcaccgagaggcgcggcgacggagggagcggccgcggagggaggcggcggcgctccttgggtcgacgacgcggagggacgcacggcggtggatggcgagggcgaggaggcagacgaggtgcaacacacgacgacgaagccgacaaaggtgacggcaagcggcgaccgcggctatggcggtgatgattgccggccggaaacggtgaatggatgtggtggctcgggtgtgtggtgggaaggtggtttcggtggtggcgagggagagaaaaacggtggccgagcttgggcttgtggcgacgaagccggcggtggcgacggagcagtgctgcggcggttctagcgacgggaggcggcagccggcgctcacaaaggcaatggcggctcgggttggcagtggaggtggcagcccggtggtggattgggggagtgtagcggtggacgacgtgcggcgtggagtggtgatgccgacggcatgggttgcgcggcgcggcggtggcgctagcagcgacgaggtgcggctggaggcgacgaatgggtcggcggcctcgggtgcacggtgaagaagtggttccgggggtggaggagggaagggaaacggatgccggggtgaagcgtgggacggcgatgccgatggtggcgacggcgctgcgcggagatggcgagagcggcggctagaggcgaccggagctcgccagagagcggcggcgcgcgggagcggcgtggggagagcgggagaaggcgagggaagcgccggcgaggaggggaaacgagagaagggagcccggggatggattttataagctcggggagggaaaatcgttgccgggcgtggcggatttggggcggcaatgacccgcgacgtgggtgacatcgtgggcgaagtggagctcgatcccggcacaatttttgggggaaacatggggagagtgtagaggaggtggatgggaaccgatttcatgcggtttgggcgcgagggcgcgagcggaagaggccggaatcgtgggcgacgtgggcggcaatggcggcacagcggtttggatgagggaggctggaggtagaggaagggtctgacaagcgggtcccacggccccacttgtcggcctgaggggagggaggaggcgcgcagggacgcaaagcagacttggggaggggaggcgcgctgggccggcggcccgaggagagaaggaaggagggggaggaatttgggccgagcccgaaagggaggaaggggaagaaaggagaattaaatttgttttctttttatttaattggttaaatgatctttgtgactttaaaactatttctcgagctccgaaaattcacggaaaattccggagagtattttagggcacaaagaatattgcaaaatattcccggccaatgatttttaagggaaaattttaattctcccattatttcacttggataaattgatttaacttttatttaatttctagaaaatgcattatttaatgatttttaatcccgaacgaaaatcggggcgttacaaatctaccccccttacaggaatctcgtcccgagattctgggatggctagaaagaaagctggtgctggtcggcggtctgactgatctgcacattgaactgccacatcctgcttcgaactgattgattgactggttgatcaaacctgcacgattgaactggctggattcgacctttctgttcctttgctttgccaaaactggaccgactggttctgcttgaactgacccagactaggactgcggatgctcctgaaacttacttatcttggactgaactgttgaggttggcaattttggtaacctgagaattcaccacgctggctataagaggatgaaaattgaatctggcatttgtaaatcatttaccctatgtccgcttcgactggtcccaattcaaatgacaagtaattccaggaaaacctgcttgacctgcctttcgtctgtactacaactgtcctcgctgttgcttttctaagctaaactgttgacatgcttcacaggtgtaccttagaatcgaacctgtcgacctgagattggggtgactctgctgacaccttgcaactggcttcttcagtactacccggattgttgcactgggttgaaccttcaactaaaacagcgacgaagtgagccaaaactcatctccgagacctaccccccttacatggagtagtcttactttctcctgactaggaacaattggactattgtccttgaaaaataaccaacacttctcttgcttacaaaggccctcactttgaaaactgaaacttcaccgattcatcaaaatagagtaatgacggcgcactttcatcccagcaagatttggaacttaatcctcagttgctgatgggagattccacataaaagtgactctcatttagctcatgaacacactgactcttgactaactttcccataagttctaactactggcatgactgtcctgcttctatcttgacttcggtgtcgagttgcaaaaactgaactaaccgactctgcattggaactgacacaactcgaggagttggggtgtcgctaacaaagctcttgatgtgatgacgctgacgccttactgtggaacaaccctctgagaggtgccctgtcgtacatcttccatggatagttggacactttgcaaaaactgctcttgaaaaccataaccactataggtagcatatgttactcctgggattggtggtggcttagctgtgctgctttgctgaggacttggtggcgtactatctgaggttgtgggtgcttcctctttgaaaacaaattggctttggctctgatcctaattccagcttgcatctaggcttgtacatgttgttggagacactggtgttgcatctgctgcattggactctacggttgctgtatcaacatctgacacatccatcatctgacattggctaaccaaaatctgcccagagagaggtgctctgatttagcttgtagctggctgccttgaactgatccaatggctctgaccgcaacacactactgctggagttatttccgctacatttgaccaggtgtcgaacctgcatctcccacatcgatacacccatcttctgatcttggacaccaaaagttgatcatgagcagggttcatctggcgttggggcaccttgcagctttcaactaaaccattgatctgtggctttaattgatcttatctctgacactgaccatctgctgctaggacggaagagaggtggaagagaggggtcgctaaagataaggtactaaaccacttgcctactgatctgttgtgactacacttttattgttcaagttgcttaagcaaacaacctagtatggtcgcatccccaccaatgatgcaaaccatacccctacacacaagcaaacaacacacgatctagaaagctaacggaactactcttctgggaaagattgggtttaggtcaacttcgggaaaactccacttgatcttcgcagaacgacgactctgaactgatcttctcgctccttgcacgaagcttgaggctcgaattgacttgacttccgaacagacatgaagctgacagctggtcctctagggttgacaactaaaagaa

SEQ ID NO: 29341 - DNA, 1728 bp, Oryza sativa
ggcacagcggtttggatgagggaggctgaaggtagaggaagggtctgacaagcgggtcccacggccccacttgtcggcctgaggggaggaagaaggcgcgcaggaacgcaaagcagacttgggaagggaaggcgcgctgggccggcggcccgaggagagaaggaaggagggggaggaatttgggccgagcccgaaagggaggaaggggaagaaaggagaattaaatttgttttctttttatttaattggttaaatgatctttgtgactttaaaactatttctcgagctccgaaaattcacggaaaattccggagagtattttagggcacaaagaatattgcaaaatattcccggccaatgatttttaagggaaaattttaattctcccattatttcacttggataaattgatttaacttttatttaatttctagaaaatgcattatttaatgatttttaatcccgaacgaaaatcggggcgttacagggggcgtcgggcccgagggtgatgtgttcgccctcctctttgtctccccgagggggttgggccgcttccgcctcggccccgagggctggggcgccccgaccccttgtggattttgcgccgcgtgtatgggttaggtacggcgctcacctaaccgcatttattgcggtttggacgagcgcgttacgccgcatgtaacgcagtgcagcgcgctcgtttatccggtctgtgaccagtcacagaccggtcagatcatgggttaggtggcgacaggcggtctgacgcacgcctcgccccatcccgtcaggacgagagcctccaagcactcgtccctagccggagccggcgtgttagctcctggagatggcacgttggttccggtcagatatatgccaggcttcatcctaaccattacaggcaagatattgtatgaagaagggcgaacatgcagattgttaaactgacacgtggtggacaagaatgaccggtctgaccggtctgacaatggtcatgtcatcagcagacagccatgtttccacgtcgcgcctgcttccggcggaagtggaggtaggtatgggccgtcccgtcagaaggtcattcggacgacggcgatgcaaatctccgtccgttaatgaagagaagtcaaattggagggaagagaggatgagtccccacacaaaagaaagagagggagagatggtgcatgtgggatccccttgagatataaaaggaggaccttgcccactgagagaaaaaagaagaaaaaggatccgagcttaatcgggggctggctggcattttgtagcttcttcatacacagatccaccaaaacacaggagtagggtattacgcttctcagcggcccgaacctgtatacatcgcccgtgtcttgtgtgtttccacgatcgcgaacttttcacatacagactaggagcttagaatctcacccagggcccccggccgaactggcaaaggggggcctgcgcggtctcccggtgaggagcctcacgctccgtcaacagttatagagcacctcaaagaggaggaaggacaaaggagggaagatgttgctgggcaaggttgcaggcaccgaagaccgcattcgtcgaggccacagcccgccgccggcaccacagagctgaccacgagccgctgatcggtgcaccgcagccgggaccagctacggtgcacaagctgtcgaggccaaagcctccaccgccggccgtaagggggtgggtgggtgg

SEQ ID NO: 29342 - DNA, 12162 bp, Oryza sativa
  unsure (1)..(12162): unsure at all n locations
gcacggaactctggtagcacactctggtgccggcgaggggagagagaggagcagaaagtgccggtgggggcgctaggttttcccccgagtcgcccgctccccgagtcgcccgcgcgcgggcgacgtgggggccaacagtttcttcatttgtaacagtattgatagaccagagtctgtcgcgcgggcgacgcgggggccagcagtttcttcatttgtaacggtattgatagactagagtctgtaaccgtgcatgtatagtcagcttccttgcgcaagtggatcaggaaggatgacgactccgtttttacatcactaaagaaattcgcagggaatttttctaaaaaaaatggtgaggaagatacgagaacagaataatctgagaacccaagcaatggccttgcggcttgtttggttattaccctgataagaatttgcctgacctaaaactagcctgacttatcttagtccttgtttggttgccacactgagagctcttctcctcggccttggcctgacggacccgggcaagtgattagcctgagctctacgcacacgcgcgcaacataaattaatgataacccattggagcgagtgttaggaaacgatcggcagataaacgataaaaaacaatagaacgattggcagataaatgataaagaacgatagatcaatcacgaagacacgagatttaacgtggaaaactctcctaaaacaggagagaaaaaaaccacggttgccagtcagcaaagatctttactatattatgtgagattacaatactgaacagcggcttacaggaagtatatatataggtgaaaccctaaaaggataacgttctgtatcgcttcgctccggcccaagcctctagcgacgggcctccgcttcgctccatccgaagttggtgtttatatgtgtgtaaatgaatttgtatcacaactcaccagcgaggacccctgtgcgcagcatgaggcccatagcaccactacaccttcgccgccattgtcgtcatggcgagaaaagcccagacctccgctgtcgtacgtcgccgcgtgaagcccagacgtcccatctgccgctgtcgtcgtttcctgaagctccactgcagtgtcgtcgtcgcgctagatttggccatcgctatcgcaccgaagccaccgactgctgcttgctagattcggcgttgtgcgcgcgaagacgccccggacgcttagctaggatgttgattcgctgagttccggtcacgcggcctgcctttccgcacgaagcacgcaacaggtcagcaggtattgtcttcgatggaatcagataactttgtacagtctgcagttgtgccactgatatgtgggccccactttagtatggcccacatgtcagtggcataactgcaaactgcacaatattagaggagtctcatccatcttcgatgctgggtgttcccaacccttctccctcatattctgcgtgcacacttttaaactgctaaacggtgtgttttttttgcaaaaagtttatatacgaaagttgcttaaaaaaatcatattgatccattttcgaaaaaaaatacttcctccgtttcacaatataagtcattctagcatttcccacattcatattggtgttaatgaatctgaatagatatatatgtctagattcattaacatcaatataaatatggaaaatgctagaatgacttacattatgaaacggagggagtacctaatacttaattaatcacacgctaatagaccgctctgtttttcgtgcgcaggagatttgttctcaactgcccacaacgaacacagcctttgacatgaagttggagtttaatttgatgcattctcctaattgtttcccctctttagatatgtgatagatttgtcatttgcacatggaaagctaggtagcagatagatttttggtgggccatgcattcttgccaatcccacattgataattgatggtggggaagcacaacttaaaagatagtctcatccattagacaagtcttttgggttgtatagtcttaagacctaaaattgtggcctcagtcgagcctgtggcggagcgagcccaatgtgattcgggtgacccacagtaagtgagccaggttgcgcactctaacaaatattttgcatcttattccgattatcacttgacttagggcctatttagatcctccaaaatggcaaaagttttatcattttggagcactttttaccattttagatctaaacactagtagcaaaagttggcaatttggcatttgtcatttgctagtctagggtagcaaattttgccaaaaatgctctgggaccatgcgcgtgctctctctctctctctctggtactaaaatggtaaaactttaggatgcatctaaacaccaactacatgccaaatcttttcccaccaaaacttttaccatttaccatttgctattccaaatgaatcaaaacggacccttagcaaaaattatgtaccgcctaatcatacttctcaggcggcagctgcaaatcgaacaatcaaatatcccgcctgcctgaccaggcaaaaaagtagggggctgtttggttgctgccctcgcctggagaccattgctcaggcaggtcgatccgaccgcaggcgaccgaaatcggacgcctgagatcgacgcctgagccaggcgcgaatctgagggcagcaagcaaacgcgccctagaactcatctgtcaggcatgaaaaaaaatctcaggtatgctgttcaggataccatggtcaggcggcagctgcaaatcgaacaatcaaatatcccggctgcgcaaaaaataagggggtatttgggagagaggggctaaactctcaaaaacataagtccctcccataggaacttatatttttgtgagagagactaaattgtttagccccactttagtcccttcaaccaaacaccaactaaagctcatctgtcaggcatgaagaaaagtgtcaggcatggtgttcactgttcaagtgttcagggtaccatgatcacacaaaaaatagaactcatcggagaactgtcaagcatgaaaataaataccaggcatggtattcaggataccaaccaaacagacccttgatgccagcatgatcgaagcatggaactggcctgttgggcttgctgaaatgggccgagatcaaggcccattaaaacgccacgtggtcacgtggagcgctgctctccctccttggcgggcacgccaagcttagcacgcaccgtaaagtccaaatttgaccagtcaacaagtcaaagaaaggcacaactccaccttatcatctccactatataaaattcattttcgatcgatcgatcgctcactcacccacttgtctcacactctcactgagctcctctgcttctcgcatccatggccgccgccgccacgggccctgtccccttcaaggacgccgacgacgacggcacgctcgccgccgccgaggcgcgctcgcctctcccgaaggaggagttcggcgacctcgtcgcggcgctgccgcggaaggagcagtacctcgacgggcggctctacgaggggttctggctgccggagcactacgcgccggggatcatcgcgttccgccgccgcttcacgccgcgcgccgacgacgtggtccttgccagctaccccaagtgcggcaccacgtggctcaaggcgctggccttcgccgccatgacccgcgccgcctacccggcggacgaacacccgctgctccgcctcaacccgcacgacgtcatcccgttcgtcgaggacgtcttcaccgacggccacgaggccaagctcgacatgctcccctcgccgcgcctcatcaacacgcacacgccgtaccagcttctcccggagtcggtcgtcgccggcgacggcggcggcggatgcaaggtcgtctacatctgcagggaccccaaggacatggtcgtgtcgctgtaccacttcatgcggcgcctccagcccgacctgtcgctcgccggcgtggtggagtccgtcgccgacggcacggtgccgttcgggccgatgtgggaccacatcctcggctactggcgggcgagcgtctcccgcccggaccgggtgctcttactcaggtacgaggacctgctccgcgacggcgccgccggcgagcacgtcagggcgatggcgaggttcatggggcggccgttctcggccgccgaggaggccgccggcgccgtagcgagcgtcgtggagttgtgcagcttcgagaggatgaaggcgctggaggtgaaccggcggggcacggcggggtcgtacaagagcatgccgcgcgacgccttcttcaggaagggcgtcgccggcgactgggcgaaccacatgtcgccggagacggcagcgaggctggacggcatcttccgcgaaaaattccgtggcacagggctcaccattgttccatgacacggatcgagcagttggccagcgacgtcgtcgtcagtcactgacatgtgggccatagcaaagtggaacccacatgtcaatgacccaactgcatgtcagaggatctgcttccgtgtgcttcatttcattgtgattttgctgctgtttcggacatttttgtttggcatcgcttgtttttatttgtgattacccacttttctcggttccaatcatggaacggagatgtgacgaaaggcgcatcgaataaagaaatgagagtgattcgggcttgatcatcatccacttgattttgtgagcatcatgatacaaattattaaatgaaatgatgtattttgtacgaaaaactttaaaatataagataaatctatttctgagtttaaaacaattcaaacttcgagttatgaaattagtttttttattcgtgtccgaaaaccccttccgatatccggtcaaacgtctgatgtgacacccaaaaattttcttttccccaactaaactaaataaggtcttattttgtttgggctatttattgatttgggccgagtttgtttgttcgttttggacttttttgtgtgggccatgtgttctgcatttgcccaagtcaaagccatgaaaagatccaaaagagatggtggttttgatgaaacaagcagagtaagaaaacgagattgatcaaaaaaacaatcacacacaaaaaaagataaatcagaaacacagcatgagcgaaatacactactagaaaaataattttttatggtgttggtcaataattttcgctggcggaaaaataccaaaaccgccagcatggtcgtaacgagggggtgaggggtaccatgttatatcggccgccaacgaagatatgttcattttcactggcggtcacttagatgagccgctaacaaaaatggataatttttgctggcagttgggttaaatagtccggtagcaagttacaattatttttgctggcggcccacttaatcaaccgccagccaaaattgatttacactggcgctcttaaaaaaattcgcacataaaaaaatcaccgcgcgcccatacctttatccacccaccactacagaataaaaatatctccacttctcccctccaaatccagatccacttcctctcctccaaatccaagcaccctcctctcctcttcccctccagatccacatctcctctcaggcggcgactgcggggttctcgggtggcgacagcggctccggcagctatgcgtggtggcgacggcgacgggaggcgggcacgtagctgcgacgggaggccgtcgtcgggggggtgcggcgacagcaacgggaggagccgtcggggggcgcgacgagctcctctcctcccctccccctcccacagtggcttggtgctgcgatggttgcggcgacggctcgttgttgcgggacatggcgagctcccccctcccctcccctccccttcccttcctctccctctccctctcccagatctagccggaggggagggggtggcggcgaccacggcggtaacggaaggcaggcggtggtggatctgacaacgggtcggcggcatgagagcaaccgcgacgacgacgacccgtgaccggggcgacgacgacgacgatgctgcgcgccggccgggagcacggcttttagcgggttcttccctcccctccttctccctttccaagaggagaggtgnaagcggtggccgtagcggcgacgacaggtgggcggaggcggcggatctgaccgcggcggccataattattagaaccggaccggaccggcggtccggccaggaaaaaccgggaccagggcaccgcccggtaccgcggcagccatagttattagaaccggaccagaccggcggtctgaccgggaaaaaccggaaccagggcgccggccggttcggttcagatataagatcagcgcgcaatcaaaccggagagaaaccggttgaaccgggcggtttactgcagaaccggagaaaaaccggggtggttcaaccgcttgaacggcgtcacacgtgaggtggcgacgctgtagagtacatgcgtcacatgaattagagaaaataggtaaaaaaaagctgtagaacccaaaacctccatgcttccaccgagaatctctaccagcaggctatgtgatgggttgtgaaacaactataacacacacctatttgaacctctttaaaccgacggtttgaccagtccgaccaataaaccagtgacccaagtgacttaacggttcgatcaccggtctggtcttaataactatggcggcgacgacgacgacgaccgcaatcgtcgaccacaaccgtggcggcgatgacgacgacgccgctatcgacagctctatgcgtgggcggcggttgtgatattgatgtttgcttgttgaaaatgtggtgaaaattgatgtattgttttctgcatgtggatttgaatatggatctgatgccgatttgaattgattttgagtatggattgaaaaaaatccaactgctcaagaggtcgattgctatttttttattggaaaaaaaatcttttcgttggcggtcctcttaaggatccgcctgcagcggttctcttaagggtctgccagcgaaaatctattttcgcaagcggtcctcttaagcgtccgcctgtgaaaatcctattttcgcaagcggatcgcaactgccagcgaaaatcttagatcttcactggcctttgctttgtggcggctccaaataccgttagcgaaaacgcaaaatgaccgccacgaaaaatagttttcctagtagtgataagaggagatcgaataaaataaaataaaaatccagaagtgttttaggtggaacctgaatttggttggttacggaggtaatcttgaccctctcacgcaagatttcgttgattttgcttactctttgtttacttgatctcaaccgcgtcaactttttttttgttcgatttgttctactactcgatgaaacaattgcagctctgtgaaacttcaagagaagcctccattgcttcattgttggcctttttattatcgacgtttaatcattctaccattataaaaaccatttgtcgcacataagaaaatataaaaagaaaattacactaagctccaaatgtacaaaaagttactttggcttcatcacagagtatgacaatatcgatcacaactattactcctctctctgtaaaaaagataaattttataactaagaatatgtgtctagactcatagttaagatgaggcttaggatatgggatatagatcgacgttcagagtcgcaagaaggcctcattcaatacaagaacgagagaactagagaacagaaaattttctgaaatactcctccgtttatatatatattagtttcaaaccattacagagcaacaaggaaacaagcagccatcccgatcgatcgaacgaacatactcgaccatgcaagaaagcatctagcattaataggtagaagtagaaccacaagcaacgatcacaatgcgtgcgtacgtaatgtcgtcgtcgtacgtcgtcacgcggcggcggcggtgcggaggaggtagtagtagagcttggggttggcctcgaaggccacgcgggagatgaggtggccggcggcgcctggacctttcatcatcaccaccggcgccgccaccggccaaagcagcaggctcaccgccgcgccgaccacggccgcggcggccgctccgacgacgaatcccagcgacaccatggctagctctcgatcgatcgcggtctcaacctcccaaggtcgactacttctgaacttcccaagatcgagatgactagtgctagacgtggtatatataggcaatttagtctgcattaatttgcttgttttcctcgggaaggggatgggttggaacttggaagctgatcacaatttgaaggacggtatagatcaaacggctcgtagtaaaatgtgtgaagacgatgggacgatgctttttttttttcgcaaaaactaatcagcgaggcctcttgatattgtcttatcgggcgacgccaaccatagaagccgtggagaagccagcgcacatgcatgcctttttttctattacacatcatgtattgttttcccttcttacaaagttttctctcaaattaattatccgatctataatccgattacaccattgtgttcgttgcaattaaatcttcaaaactagatcttacatgattatactacgatgaaaaaatatttatacttgtaaattacttttgttatatacttaagttacttttatcatatatataaattacttttagatttaattaattactttttatatattcataatgctttaagtcgattatatttattatagtttttagtcaattctataatttatgacctttaaatttaatttttagatacaaaatatttttctctcgaatttacttctaatgttgtaacaacttacttctattttgtgctaacttacttctattgcatagctaagttacatctattgcatagctaagttactactacaatttaaataaattacttttaaattaatgaaatgtttgaatatattcaacatggatttttttatctcatattttatgtagagtacaatgatgtaaatagatcatgaaaataatatgtgatttaaaagatataagttattaaagagcttaaatctaaaagtaatttatgtataggacaaaagtagcttacatatataataaaagtaatttacaacatagatatttcgtgtaagatcttgttgtaaagatttaattacaacaaccataatggtgtaatcggattataaatcggataagtaatttaggagaaaattctctaggaagaaaaaaaaggcatgtactgttgagtgtactagtaactgtttaagagaagggcgtcgctggttagcgatatgccgctagcgcgcgcgatctagccgtgtctttttttcccacgcttttttgggactccggccggtaattgatccttcaataaagttctacaattaagtgagaagcagcactgagaggatgcccgtttcgtttacccgagtaattaagggggtgtttgggagacttcagcccctctctcaaaaacataagtttctaggatatggacttatggttttgagtttagcccctctctcccaaacaccccctaaatctgtgagcagacgataaattctagtagtagtgtgctccttcccccaaataaaccatctcatttataaaaaatcttagagcaagtttaatagtatagtccactactagttttaaatcatctatagccaatgtaatagccaattcatacaatagttgcttactatactattaatacctggtcccacctatcatacacacattccgttttggagtccgtgctacagctggctatagacttatagcccgctgctcttctctcttcctttatctatttaaaatatgcttatagctggcttatagcgtgctattgtaattgctcttacatagacgtaggtaatagtatagtaggctagtaacaccctagttttctccatcctaacaaaaagtgaatctagaactctagtacaactaatctatatgtgttacattcaatactagattatttttttatgggatgaaaggattaatttttcataggacggaagaagtggtatgaaactcaacgtagcacaaaaaatctagaacattctcatttataaaaatcctatatagatgtaggtagtagtaggctagtaacaacatagtaacatatgaaactcaacatagcactaaaaatctggaaaggaagcttgtttggttggtttagaatatagtaaaataaaaattaaaaatcaccaacatttgtaactaaatttcactcacactaaataagttgtcactcacatccgtggaccttttaacttctaacgataatatctaacttttaaaaataaaattagatatgcattttttatccagatcgatagatccgttaacattgactcagactcgttcgttcatgatttttataatctatgggcatgtttaaatcaattttctgtggtaaaagttttggtgacaaaaaaaaattagcatttgaagttgaagttttaatagttactgtttagatgcatattctaccatttttctggtagagagagcactcccaacgcacttttcgacaaaatttactactctagattttcaaattttcaaatgacaaatattaaattgataacttttactactagtgtttagattcattttgacaaaatatgcttcaaaacggtaaaaacttttaccattttagaggtttggaagaactaaacaggccctaacttcaccaataaacttcaccaataaattgctcgatcgtgcatccacataatgactttaagttgatttttttatatgaagggattaaagttgatttttataataggttaaagttgatatattttataggatgaagggattaaagtttatttttttaaggatgaactaaaggagtacgcgatgaccaattcgaatggaacatactatttgggcgtgtatccatgcaaagctaggatgcacgatctgttgagattatagacatataatgatttaatttattccataaataaatcatgacattacagatgaaaactagcatgaacgcatcattagatctacatatgtaaactatacagtataacataaacagatcaaatatgcgcaacatattgaacacgtaccgaggtgacagaaagaccggctgcttggtcgaaacttttcgcaggtgtctacgaaggcacgaaacacgcgagcgaagaggaaggcgagccgtcgcgaacgaacagggagcagtcgcgcgaagcgcttcccaaaaaacttattgccgccttctcccggtgcaggacgtcgaaggcaaaggttccggagacctgctctcccgatcgccggtgcacgctggcgagcgggatggagtagtctacgagcgacggcgcagtacagagtaggaggcaaaccctagattgatttcgtgtgtgttgcgtgaagacggcaggtcggtttatatagagaagggtcgcttgatcagggcgcccgcacgatctctactgcgcgtaaccgaaccggataagtcacgcgtaacttatctggactccacgccgtttgcacgcaccggatttttcggaagaatctgaatttgcagcaaaacaaaactgcaaaaagaggctgcatctgcgcaagggtgaggagccaatttttcggaccattcaacgcgtacgtcgtgcacgcgcgccgcatgccctgccctgccctgccaggccaggcgaggcgaggcgagcgagcgtgcgcgtgtgtttcccctcttctctccaccacacatgcttcaagtgactaggagggcatcctcccttttaaggaggtccccctctcctagaataagcaaggtggtactaaactccacatgcatgccatcccatgaggtgggcttttgtgattttccaaagaattaatcttcgagtgggctaaggcccattcattaattccaacaatcccccaccaaatctcaaaatcccactgagatttgccttttccaatatactgtttatataccagcggttcgatggagaccaattaaggttgaacatccacctagaactccaagctacacttactcacaacttgaacaatggactacgccttgaattgcaagtcttgtgcaagcaagtttcactcaaagtcttatctggtactagaccgtctgtagactacccctcgggtggagcgtataagtc

SEQ ID NO: 29343 - DNA, 11509 bp, Oryza sativa
aggcgaggcgagcgagcgtgcgcgtgtgtttcccctcttttttccaccacacatgcttcaagtgactaggagggcatcctcccttttaaggaggtccccctctcctagaataaagcaaggtggtactaaactccacatgcatgccatcccatgaggggggcttttgtgattttccaaagaattaatcttcgagtgggctaaggcccattcattaattccaacaatcccccaccaaatctcaaaatcccactgagatttgccttttccaatatactgtttatataccagcggttcgatggagaccaattaaggttgaacatccacctagaactccaagctacacttactcacaacttgaacaatggactacgccttgaattgcaagtcttgtgcaagcaagtttcactcaaagtcttatctggtactagaccgtctgtagactacccctcgggtggagcgtataagtcatactcctaggtctttagtaagcttcctagaagattcacccaaaatcttcatagactgcgaccaacagtcaagctcacaaaggtgagttctttcaagaatactctgcaggacaacatcttcgctaattaaagccaacagaactcattaaggcatagccaacctgccttgcagctcacgagagtatatgcatcttcacttggagagggtatatatattggtactctcctctagtttattaatggtttgttcttcccaggatctaattcacgggatctccgatcacatagactgggttaccaccatagtataactcacatgggtctcaaacccatctccttcgatgcattgtctatcacatttcgtgatagtcccttcgtgaagggatctgccagatttctcgctgtttggatgtaatccaacgttataactccggagtttcttaatttcctgacagacttcaatcgtcttttcacatgtctagacgatttcatattatccttagaactattcactttgacaattaccgtttgattgtcacagttcataaggatagccggcaccggtttttcaacaacaggcagatccattaatagatcacgcagccattctgcctcaacagtagcagtatccagtgccgttagctctgcttccatggttgacctcgtcaaaatggtctgtttgcaagacctccatgaaacagcaccaccacccagtgtgaaaacatatccactagtggctttgatctcatccacatcagagatccagttagaatcactataaccctccagtaccgcaggatacccagaatagtgaagccccaattccacagtacctttcagatagcgcattactcgctcaagcgcacgccagtgatcatctcccggattagaggtaaatcggctcaacttgcttacagcaaaggagatatcaggcctagttgcactagccaggtacatcaacgagccaatgatttgggagtattccagttgattcctagcaattctcttgttcttgcgaagcaacaagctaggatcataaggtgttggagaaggcttactatcaatgtagccaaagcgattcaagatcttctccacataatgggactgcaagagtgtaatcccattctcacctctaattagcttaatgtttaagataacatcagctactcccaaatccttcatatcaaaattttgagacaagaatgatttaacctcatttatcacctcaagatttgtcccaaatatcagtatgtcgtcaacatacaagcacaaaataactccctcacccccaccatggtgatagtacacacatttatctgcctcattgactgcaaagcctgcagatgtcaatgttttgtcaaatttctcatgccattgcttaggagcttgtttcagaccatacaaagacttcaacaatttgcacactttgccttcttgaccttcaactacaaacccatcaggttgatccatatagatctcctcatccagctctccattaagaaaagctgtcttaacgtccatttgatgaacgagaagaccatgtgaggctgctagggaaagtagcacacgaattgtggtcaatctagcaacaggtgagtaagtatcaaagaaatcttcgccttctttctgagtatagcccttagcaacaagtcgagccttgtacttttcaatagtaccgtcaggcctaagcttcttcttgaacacccacttgcaccccacaggtttacacccatagggtcgctctgttacctcccaagtcccgttagcgataatggaatccatttcactacggacagcctccttccagtagtctgcatcaggagatgcatatgcttctgaaattgacttaggagtgtcatccacgaggtacacagtgaaatcatcaccaaaagacttagccgtcctttgtctcttactccttcgaggagcttcactgacatcctcctcagagacaagttcatgtgtatgttcagtttgttctggtggtgtgattgaactgggaattatttcagagggttggttcgaaccactatgtgtatccttcattgggaaaaagctctcaaagaaggtagcatcacgagactccataattgtaccaacatgcatgtccggtacctcggatttaactattaaaaatctataggcaatgctgtgatgagcatatcccagaaaaacacagtccacagtcctagctccaagtttgcgcttcttcgttattggtacattgactgtcgccaagcacccccatgtgcgcaaataagaaagtgatggttttctaccaatccatatctcatatggtgttttgtccttatttctgttaggaactctatttaacacatgatttgaggtcaacaatgcctccccccaccatgccttaggcagtcccgcggcgtccaacatggcattcaccaagtcagtcagtgtgcgattcttcctttcagcaatcccattagactcgggagaatagggaggcgtcctctcatgtatgatgccatgttcctcacagaataagtcaaactcgttcgagaaaaactctccaccacgatcagacctaagcctttttatctttctgtcaagttgattttcaacttctgccttataaattttaaaatagtctagagcctcgtctttcgttttcaacaagtacacatagcaaaatctagtagcatcatcaatcaatgtcatgaaatatcgttttccacccttcgtcaacaccccattcatttcacaaagatctgaatgtaggagttctagtggtgccaagtttctctcttcggcagccttgtgaggcttgcgaggttgcttcgattgcacacaactatggcacttagaacctttgacaatggaaaacttaggaattaaacacatgctggaaagccgagacatcaagccaaaattaatatgacataaacgtgaatgccaaacattagcctcatcatccacactgccacaaatatggttcacagacttattgcagaaatcagaaagggaaaagcggaacaggcctccgcactcataacctttaccaataaaatatccatgtttagacacgactactttattagactcaaaaaccaacttaaatccgtctctggtcagacgggagccactaacaagattcctgtcgaaaacaaaaacgaatccgaatttgcagcaaaacaaaactgcaaaaagaggctgcatctgcgcaagggttaggagccaaatttttcggaccattcgacgcgtacgtcgtgcacgcgcgccgcctgccctgccctgccaggccaggccaggcgaggcgagcgagcgcgcgcgtgtttcccctcttctctccaccacacatgcttcaagtgactgggagggtatcctcccttttaaggaggtccccctctcctagaataagcaagtggtactaaactccacatgcatgccatcccatgaggtgggcttttgtgattttccaaagaattaatcttcgagtgggctaagacccattcattaattccaacacgatcaaccacactgcttaccctacaacaaaaccagcagctttttcccgtacgtacgtggaggataactatgtactagtgtagctacatagtacttactagctagctatagcctataggtgtgtagtcgtctatccagcagcagcaatagctaacggagtggagtacgtacgtcgccggcgccgtcgcgcgcgtcaggcggcgacagcaaaagcggcggcggccgccttggcgcctgtcacatcctgattttcgtttcaggatttataaattatttaataaattattaatagaatttatattaaatgttctttaatttacaagtgaagttaaatgtgggaaataaaatttccctaatataaagcatggatggatttaatttttattaaattctccatgattaagtcaactctctgaaatcttctcaaatttttcggagctcaattcctaatttttaatcatacaaagaacatttcagtaataatccacatattaaattaatcattaaatggtctggttttaatattgttaaatactttgagtgtccaagtattttcatgatttttcttgaaattatttgagcattggaagtatttttaacaattcaaagatcatttaagtgattattttaattgggaaagtaataaaaatcctcctcctccgcttgggccattttcggcccattccttcctcttctctctcccttgcgcgcgtgctgtgcagcccaagccggcccaagtcaagtgctctgttctgttctcagccaaccgaaaaaagtctagtttgcctccctggcactgttcatcttccagctctggacagagcccgagccagccgagcctgtgcacagtgccgccttcttccaccaaatccggcctcctcgttgctcctctttccaaattagttgaggggaaatattcctcttattctcctcttccttttccccaagaaatccccaaaattttatatggaaatcctttccaatttcgcggatcaaatcctttcctttttccggcgaagataaactttcccgagtttttcccgtcgttttgggcccggacccgagcttccaaggctataaataggaccccctagtcctcctctttcgtttgccccctctcccgagctctctagtgcctcgtagcctcgtcgccgcgcgcgtttagttcgtcgccgccgccggccgagtgcagccgcgccgccgcgccgcttctgccgtcgccgccgcttgccgccgtcgccaagaggtgcgccaaggggtggagaagcccggccgcccgtcctttttcgccgccggccgccgtagctcgccgtcgtcggtaaggtccaagccgccgccgcctcctctcgtcgccggccgtcgtcggacgtcgaatgtcgttgtggtgagtaccgttgggttcgcctcgtcgtcctctacgtgtgcatgccctccaaatccgcagccgggcgctctatctccggcgaggtcgtatcgtggttcgccggcgccgctccagcagccccgcgccgtcgctgtggtcgtcgccttcggtcgccgctgccgccgttgggttcgcgaggaggagaagaagaccggcctccacttccccgtcgtcgaagaccccgggaagcccgtcgtcaccgtgaagccgatccgttccatcttcagccgcgccgttcgtcgccgtccatcgccgccttcattcaccgtcaccaccctcgggatcgcaggagcgaggtgaagaccgtccgccctcggttgttgcctctcgtcgccggaaagccgtcgccatcgtcaacccaaggtcgccgcctttggagctcgtcgcctgccatctccctcgccgtctgtcgtcgcataagtggtggtaagggtcactttgatcccctctcgctcccggtgccctccgtttgcgtttgtgccgtggttcgccggcaaccgccgctcctttgccgttcacctgtgaggttttccctagggccttaatccgatctaatctaatcttgtttggccctaacgtcatcatcgtctccgtgtgtgtcgtcatcgctgtgtcgtagctgctgcttgccgtgccgctgctgcgcgtgtgccggctgagccgcttagctgcagctgcttgccgctttgccacagccgcagccgtgccggttgcgtttttgctcatagccctgctgttctagccgtgcatggttgctaccggctgtgccgtcaccctaaccctagctttgtgtatccgctgagctgccgcctagccaagccaagtcgccctagtgccgccgtgtcgcagttgtgtgccgcttaaacctagccgctgcttttagtcgagttgtgcagccgtaggtgcaaccctaggttcctaccggtctatcgtttgtcgtaccggggttttaccatgaatcgtttctagtccaccggtttagccgcagccgttgttgagtcgttcgctcgttcgttcgaatgaggtgttccccgtgcttcgttcgttcgtccgtgttgagtcgtcctttagttcagagccgccggttccgttcgccggtttcggttgatcatttgggtgatcccgtgtcacgtagaattgactcgttgagtcggtatctcgtgaggcccgcttgccagatcaatctaagccatccgatcttggtcaactctcggtcaagattaatctcagccgtccaaaatcaatataaattcgttctatcttttcaatggcatattagtcctttttctttttatcatgtcatctaccaatataatctaatcttttccggaggttgctttaatcttctgtctccgttataaatcatttgtaaattgtttaattaatttggaatagtcttttctttaataggtttaattggaatttaatcttgtaaaattcataataaattcatatgaaatcagaatgaggccgttcaagtctcataattcatctaaaattatgatctacatgtttgtttactttttatgtattgtttatttggtttttattagtctttttcttcgttttgcgtgttagcttgtcgtttccgtcgttgcgaaggttcgcgagtgcgccggaagtattcaagaagattaattgaagaccgattattgcaaggcaagtcacacagatcctaaacacaatcctttgagcatgttgatcctatatttaaattctctatttatttcaactgtgcatttattttcgaatgtcactgggtggtgtgaacctattcctttgttatggcctgcttgcattgattactttaatccttgataccttgggttattataatttgactagttgagctttatatattagttcagctagatattagatgtgattgcttagccatgcttagaaacattagcacactattgggataacttatgattcgttattatttaatgatggtttaatggtagctcacgatggtcaaacgtgattggttaattaattacttgccaactaaaacttgataatggtgggttgtgagcacatggttttgagagtcgtgctcatgacaattaaggaccggttcgcgaggtactgttgtgaaacattaaccgtaccaaccacaagccagcgtgggcaacggctttaccttttgtatagcatggttcattgcggagcaccagactgagaagtggcggaaataagcccacgggggtcgctggggagtccatgccttgttttataagggggtgattatgatccaggaatggtgcactgtggtgagttgtgttatgcagagggtattgtcacagcctctattcgggtactttccagtatcgcgacgcatggtagacatgatgttgaggctgtgtcttgtgggtacagtggtacacctctggccagagtaaaactattcgaatagccgtgcccgcggttatgggcgagttgaacaatgtttttcgtgattagtctcacacctctcacaataattatggatgctataactggtaataatttgcttagctcctggtttggagttaaatctgtacagccgggtatggttgttcaggatggttgggcctgtgcagcatgggtgtgctgttcagtgttgattaaaatttttaattaattactctactgttttactactcttaactctttgctaaatgctgcttttgcaaatgagcctatattatgccatcctttggtatccttgtgcacttgcatatttgctgtgtggcttgctgagtatgtcatatgctcaccttgcaataatcaatcaacctcagttgaagaaaaagaatccagaaggagaagacgtttggcttataccccagttgagctgcctgtgggagtggagccggagcttcgctagattttattttccgctgcagttttcttcttggtgaggacttagtgcctcttaagtaagtatttatcgttttagttaatttgatgaatctgtatattaaattgtcagtttgtgtacctcggctgattcctggacgaggattttatgcacaaataagttcggaaattactagtgaatttccgggcgtgacagcgcccaccgtgcgcaggaggtggaagtagacctgcgggttcgccaggaacgccgcgcgggagatgacgtagccggcggcgcccggcgccttcatcatatcatcgccgccgccggcgccgaggccggccacagcaagtacaagaaggcggtcgacccgacgcccacggccacggcagcgatcatcgacggcgccgcaaccatcggcactacaagtttgtaattccagatcgcgcgcgtggagaccaacgaacaatggaggagatcgacgaagagatcaagcagagtgaaaggtgcggccactggtggtaaagctagtggtaactggttttatagaggattgcaaaacacaggaaagacatagaaatgactgtttgattgggccgcaggaaaaacataggaatttgaggagaaataaagactcaaaggattctttccatgaggttctatctcatgtcaaatttcctccaaaacttgcaaaacttgtatggaaaaagataatccataggaatttcataggattttataggatcaattcctttaatttaaagggctatatagaaaaaaaatcctacaggaataaaaccatctaaaatttctatgaattctttttaatcaaagggccctaagttgctggtggttctgttcatggtggctgggttcctccggaagggccgggaaggggcgagggtgcacggacagcgggacaggtggcagaagtgtgggatgcatattgcctggttttttacttttacctggtccgtctactcgacacgcgtacagggatcgagatcggtaggggcggcgctccaaggagcatcacatcggtagagacggtgacgaaggagatcacggcaggctcgtatgttatcatcaatcaaatttgtatgctttacacgtgagatctacgtgttatatatttaaacaaacattattacactataaatgtatgttgtgtgttcttatttatagggatactagcttaattaaagaaaaacagattgagaaaaaaatttataaatgataaaaagaacgttgattggggaccaaatcagagtattccccaagtctatttgaagattactacgtcacttttagttcatagaagataataagatataaagtttttaattcggattcagctctcctaacaccatcaatttcaaacggatctagccgctcatatagaaggaatctcgggggtccatgtcacgccccgaactagtcccgaccggaactagcccgtgacgttccaaattaacctgttaatcgataccagtcccaggaaacagtgctggtatcacagggagacagaatatcatagcatcagaggtctctttattatagagtagaggtacagtcatgttgggctgcggacagatcccgagctcacaactgcattacaaaagggaaacggaagccaggacttggaccaatcaacacaggcgcgacttgggaactaggccgaaaccctaaaactcatcgtagccggcttgctcctggaagaactcctcatcagcagcttccgcttcatcttcttcagcaacttggggggggtcatttatatagagcaagggtgagtacgggagtactcagcaagccatgggaaataagtgtttaatgcaagcttcaaggaaaggctgttgtttttgcaattgtttttatttgaactcttttctaaaacaactaggtgagtgcttctcaaacgacacggatgagacagtgcgtctcgtccggtcggagtatgtgcaatgtatcagtctttagaattgaaacaaggttggcacccggccaacagcttttcaaacggccacccgggccaaccacttttcaaacggccacccgggcctagctgatcccatcacctgcagaattttcaaacatcgaaccccttttcacaacagtaatttcacaagcagtagtcaaacaaaactacgctaggaatcacctcacatccgcccatgaccgtgggcacggctgttcgaacagtttgttaacctctgcagagggggtacactttactcacacgacattactaacccggatcacccagcccgtggggatcagccacgtcgggagacctccaagctttcatgacaaggcatttccaaagccgacacaggtttaccatatgccgacgagaggagtcccagaccaacaacaggttaggtcccagaccatactgtgccaagaagcccaggggtcctccccgacaccaccccggcgaatccacatgtctctcggcatcaaggctcccctgataagctagttactcagccaagggtgtcccattccacccatgtggtcgtacttgtcttatgtttggatgaaattccaaggaaatcggtccttaagtgcgagagcgggaaaccgtacacccggtacgttccccggtccgcggttttggaaattcatttagttcgcaagcaccgacccaggtgtcgggttttccaaatcttttgtaaaacccaagttttacgcaagttgttattcagattttaagtttgaaggcgtccgtcgatactcgcacagggtgcacgaatatcgagacgcaactagatggttacaaggggacatggtataacaattaacaaaagaaggatcaaatacaacaaattagataggtccgccaatctgccttgcagacgggacaaacagattaagtgcgatcctatcaatgcataatatttttcaagcaacataattaaatttcaaatataggctcaagatgttcaaaggtagcttgccttgctcgagatctggagcttgatcctcgaaatcctcgcactgcgggtcttcgggctgtcacgccctgaagttttcccccctttgcttgctttaaaaattggttaaataaatcgtccgaagaaattatcttaattaacctagagctaattccctaattaataaatgcaaataataatcggaatcggcatgtggaatttttcttggattctacatgtcaaataatgctaacaggatttttagtggaattttcagagccttggaaataatttttaccaattaaaaatcaccaaagtgcaatttttaatcccaggaaaatccttt

SEQ ID NO: 29344 - DNA, 9267 bp, Oryza sativa
tcctgcttcagtagtcttatagcctgttttgcttgtgtgctttgtttgtcgcgtagatttcggccgtttcgtcgatccgcagtttctcgaagacgttgctgtgatctcatcagtgcgagagcaaggcaagtcatgcaatacgtttgatcatattgtacccaatttacaaatatcccgcatttctattaaatgttgcatccttttacaatgtcatgtgggatgggtcctaatactcagccatttattgtttaccttatgccattgataacttgggtatcaaaatgactagatgttggtttaggaaatgcttagccatgcttagttcaactagcacacaaatggggatcaccttattacatagactttgtctattggtatagctttagattggtgccaccgcaatggtgttagttaattaaaatacactgaatggtgggctgtgggtgcatggttatgctggtcgcacccatggcagttaaggatcggttcacgggaaaccctgggagacttaccgtgcttaccacaagcgggagtgggtaactgcttgatctgaagtatagctcgaccctttcctaggcaccggtggcgagggtgggcgtgatggagttgggtcggccggggtgtccggttgtccagctgccggattcaccgcggcgcaagaggggaccgcccactgccttttgaggggtgggggtgaaaccttagcgtggtgtggatggttaggggagggttatgtggagggtcttgtcacgatttccccctttgcagtatcatggtgatacttcggggcatggcgacatgtgtggaatcgtgtcttgtgggtacagttgtacacctctggccagagtaaaactattcgaatagccgtgcccgcggttatgggcgatcaaccagattcaccgtgattagtctcacccctagtttagcttaatgaactggtgtagttcaggtggttggttgggcctgttgcaacgtggtgtagcgttggacagtgtttggttaatattgattaattactacaactgttttactgccttcaactactgcttttaaatgctagctttatgcaaaagaacctctagcctcctttggttatatcctgcatcatacctcctcttccggtatgacttgctgagtacagtgggtagtactcagtcttgctctcttttcccccacaccagagctgaagatcttcctagttggagctgttttgtcaaagttggtttcgtcgctgccgtcaaggattgcctgtggagtggagtcgcccgctgctgaagtcaagcttcccggtttagctcgcttttatcttttccgctgcatttgtaatcttttctatttttgtaagacgtggatctgtatgtcaacaattgtcgtttgtgtaccctggctggtcctggacagggatttaatgcacattcagcttagaaattctggttcgagaatttctgggcgtgacaagttggtatcagagccgaccttgaccgtaggacaagccaactggaaaccctaagagccctctgaacccctttttcatctgcatatgcctttttgcacctggaattgtttcgggaaaatttggagttttgcctctttggtttgcgggaaaaatcttggtcgttctttcggatcggattttttttttttttaaaaaaaaaaaaattagctcagtctagggctttagaaaaattttagttggagtttattcgacagtcagtcgggaatttattgggggttatgcattaggtcgtgtctatattcgatgggggcaatgttatgcgcatcattttccatgcaactagtctatgcattaatttattgtttagttgcattagtgtctttatttgagttcatgaaaaatgttctatgcataaaaatcatcctgctcggttatttatttgagtcttcttttgctttgtttaatttggatttgagcatgaattggttcctatcccttgtctactttagatgtcagtcctatccctcgtttgcaagcgccgccccgagcttcagagtcgccgcccttagctttatcgccttcttagtctgtttgcttgctagttttcgtgtttaggtttgttgcttgtgggttagtcggcggtcgatatcatgtgtcagtggtatgactgcctcaattaggagttgcgtgcctctttttcagtgttttaatcaagattaagataattgcacttaaattcataagcaagattagtttctgagccccctgtttttcttccttttctcatatttctacctatccccttcagatggagataaggaatggttcacgcgactcgaacaacgccagtggcagcgaagagccgatcaatggagcacgtgccaacggtgcatctgacaacagtccgtccccaccgcccgagaacccaacaattgctcaggtgttggacaatcagactcagataatgacaatgatgatgcaacagatgcagcaacagtaccatcaggtgatgcagcaggtgcagcagcaagcacagctgcagcagcagaacctgcagtttggtcctccacctcctcagtccaaactgttagaatttcttcgtgtcaagccgcccactttctcaagcaccaccaacccaatcgaggcccacgactggcttcatgccattgagaagaagctgaatcttttgcaatgcaacgagcaggagaaggttgcttttgctacacaccagctacaaggtcccgcttctatttggtgggacaactacatggtgacccgtccggctggggcagaggttacttggacagagtttcgtcatagtttcaataaagcacaggttcccgagggaattgtgggacaaaagaagagagagttccgttccctgcaacaaggaaccagaacagttatagagtatttgcatgagttcaaccgcctcgcgcgctacgcccctgaggacgtgcgtaccgatgccgagaagcaggagaagtttatgtctggtcttgatgatgaattgaccaaccagttgatctctagagactatgaggactttgagaagcttgtggacaaggctattcgtcaagaggagcagtgtaacaaaatgaaccgtaagaggaaggcagcccagttcaggactccccaggggaagtgtcagaagcctcgttacacgatgggacgtcacggtggaccttccaccatgattatccgacagcaccgtccctaccacccgggtagcttcaataagacccaccatagtgatagtcacaacaacagtgagcagcacagcctcaaccctactccgagttcactaaagattccagctcaatcagttcagccagctctgccagaacagcccaagaggttgggagaaaaacccgaactctgcttcaattgtaacaaacccggacacacggttggaaagtgcccgaagccaagacgtgctggacccaagttcgttcaggcccgtgttaatcatgcatctgcagaggaggcgcagtcagcaccagaggttatattgggcacattccccgtcaactcgacaccggcagtaatattgtttgattctggtgcaacccattccttcatttccaagcgttttgctggtgcacatgggttatctttagtgaagcttaagataccaatgcgagttcatactcctggaggtggcatgaccacaactcactactgcccatctgtgacagttgaaattcaagggttgatttttccagccaacctcattcttctcgaatccaaggacctagatgtcatacttggaatggattggttggcaaggcacagaggagtgattgattgcgccagccgcaccatcaagttgaccaatgcaaaaggagaggtggtaatcttccagtctccagtgccgcagaagccagggattagtttaaaccaggctgctggtgaagaacaagaggtagcagtggagaaaaccactaagaaactagaggatattcctatagtcagagagtatccagaggtttttccggatgatctgacaacaatgccaccaaaaagggatatcgagttccggatagacttggtaactggaactgcaccgatccacaagaggccttacagaatgggagccagcgagttggcggaagtcaagaagcaagtcgatgaacagttatagaagggatacatccgtccgagcacgtcgccttggggtgctccggttatctttgtggagaagaaagacaaaaccaagaggatgtgcgttgactaccgcgcactcaatgaggtcactattaagaacaagtaccctttgccaaggattgatgatctgttcgatcagctgaaaggagctactgtgttctctaagatagacctgcgatcaggttatcaccagttgaggatccgcgaagaggatattccaaagacagcattcatcactcggtacgggttgttcgaatgcacagttatgtctttcggactcactaatgcacctgccttcttcatgaatttgatgaacaaggtgtttatggaatttctagacaagtttgttgtggttttcatcgatgacatacttatctactccaagtccgaggaagaacatgagcagcatcttcggctggtacttgaaaagttaaaagagcaccagctatatgccaagttcagcaagtgcgacttctggcttaaggaagttcagtttctcggtcacatcgtgaatgctcaaggagtagctgtggatccagcaaatgtggagtcagttaccaaatggaccccaccaaggacagtcactcaggttcggagtttcttaggacttgcgggttattaccgccggttcattgagaacttctctaaaattgctaagccaatgacacagctattgaagaaggaagaaaagtttatctggtctgctgaatgcaataggagttttgaagaactcaaacgacggttggtgtctgcaccagtcttaatcctgcctgatcagacgaaagatttccaggtctattgtgatgcatctcgccaggggctaggatgtgtgttgatgcaggatggcaaagtggtttcttatgcttcacggcagttgcgtccccatgaaggcaactacccgacgcacgatctggaattggccgcagtcgttcatgctttaaagatttggcggcactatctcatcagtaaccgttgtgaggtatatacagatcacaaaagtctaaagtacatcttcacccaacctgatctgaatccccgacagcgaagatggttggagctaattaaagattatgatatgggaatacactatcatcccggcaaggctaatgtggtagcagatgccttgagcaggaagagttactgcaacgtcgcatgggtagaggaactatgctgtgaggtacaacgtgatttggaacatttgaaccttggtatagttgagcacggattcgtggctgccctagaggcacagcccacactggtggagcaggttcgcatagctcaagcaagtgatcctgaaatagcagagctcaaaaagaacatgagagttggaaaagcccgaggttttgttgaggatgaacaaggaacaatctggatgggagaaagattgtgtgtacccgaaaacaaggaattaaaagacctgatactaaccgaggctcatcaaactcaatattccattcatcccggcagtaccaaaatgtaccaagaactcaaagaaaagttctggtgggtcagcatgagaagggaaatagctgaattcgtagcactctgtgacgtctgtcaacgagtaaaggcagaacaccaaaggccagcaggattgctacagccacttcagattccagaatggaagtgggaagaaatcggaatggatttcatcaccggtttgcccaggacgtcatcggggcatgattctatttgggtagtcgttgaccgactcaccaaagtggctcacttcattccggtgcacactacctactcagggaagaaattagcagaactctatctggcaagaattatgtgtttacatggtgtacctaagaagatcgtgtctgatcgaggaagccaattcacttcaaagttctggcagaaattacaagaagaattaggaacccggttgaatttcagcactgcttaccatccacaaacagatggccagactgagcgagtcaatcaaatactagaggatatgttgagagcatgtgcgcttgactttggtggagcatgggacaaaagcttaccgtatgctgagttctcgtacaacaacagttaccaagctagtctgcagatggcaccatttgaagcactgtatggacgaaggtgtcgtactccgctcttctgggatcagacaggggaacgccagttgtttggtacagaagttttaaatgaggcagaagagaaagtcagagctgtcagggaaagattgagaatcgcgcagtctcggcagaaaagctatgcagacaaccgccgaagggagctcgctttcgaaacaggggattatgtgtatcttcgtgtcactccgctcagaggagtacaccgtttccaaaccaaagggaagttggcaccacgctttgtgggaccatacaggatcttggaacgtagaggtgaagttgcttaccagctcgagcttccctccaacatgcttggcatccacaacgtgttccacgtctctcagttgaagaaatgtttgagagttcctgaggaacaggcaagtccggatcaaatcaaaatccaggaagacttgacgtatatggagaagccgactcgtatcctcgaaaccagcgagagaaggaccagaaacaaagtaataagattctgcaaggttcagtggagccaccactcagaggaagaggccacttgggaaagagaagatgagttgaaggccacccacccgcacctcttcgccagctcttccgaatctcggggtcgagattccgtttaaggggggtaggtttgtcacgccctgaagttttcccccctttgcttgctttaaaaattggctaaataaatcgtccgaagaaattatcttaattaacctagagctaattccctaattaataaatgcaaataataatcggaatcggcatgtggaatttttcttggattctacatgtcaaataatgctaacaggatttttagtggaattttcagagccttggaaataatttttaccaattaaaaatcaccaaagtgcaatttttaatcccaggaaaatcctttcttctttttgtttttcctttttcctcctttttcctcttcttgggccgtcggcccagtccacccgtcgcccgcgctcggcctccccttgtgggccggcccgttcccctttcccctccccgaagttctccctccctccctctctccttcgggcgccgacaggtggggcccacctgtcggtcgtcttcctcctctagccggttggagccgagccccaaccgccggggccccaccttcccacgccggcccgctttttccgtccctttccgcgcccgcacctcgcgcccacgttggcgctctccccccccccccacattttccgcgcgcgcgcgcccgcaagtggtgggggatttgaatccctctctctctctctcttcctccccactcccccacatcgccggccaaatcggccacctccccggccacgtccgccccctcccgcacctataaatcgctccccgcgtcttcctctctcgtttttcgcactcgccgcgccctcccgtgcttcctatcgtcgccgcgccgctcgccccttgcgccgccgcctaccgccgtctccggccacgcgccgccgccactatagccaccgccgcgccacgcagtcgccgccgtcgcgctcaccgagcccgcccgcacctcggccgccgcttcattgccgcgaatcaccgccggagcccttttctcctcgcgcgccggtgagaccctctctcccctccgtctccggccggcaattcaagccgccatggtcgccttcccttccctaacccctctatgctctctcctagggtgccgccgccgcccgttcgcgcctcggcatcaccggtcgtcgccgccgttttcttccttcgcgccggccgccgtgttcgccggtgaggaatcccctctcctcctccttccttccctccctcccatgagcgccgccgccctccgcgcgtgtgccgtcatcttcggccgccgccgccgccttcgcactggccgccgccgtctcccgcgccgccggtcaccgccggtgaccgcgcgtgtcgccgccggtcgccatggccgccggtcggctttgaggccgagccgagcccggccggcgcctccctcgcctcccctttgagccaccgcctggtggggcccacctgccagccgccccctccctctccccttgtgccgctgccagtggggcccgcatgtcgggccgcccccccccccccttggatgacgtcagccctggggcaatattgcgcaataattaattaaggacttttctttattagtaaaaacacagtttatcttctaaaattcataagtaattcatccgagctccgtttaagtccattcaagtctcagtaaatcaagaaaaatgcaaagaatccattaaaaatagttttgtttcctgcttcagtagtcttatagcctgttttgcttgtgtgctttgtttgtcgcgtagatttcggccgtttcgtcgatccgcagtttctcgaagacgttgctgtgatctcatcagtgcgagagcaaggcaagtcatgcaatacgtttgatcatattgtacccaatttacaaatatcccgcatttctattaaatgttgcatccttttacaatgtcatgtgggatgggtcctaatactcagccatttattgtttaccttatgccattgataacttgggtatcaaaatgactagatgttggtttaggaaatgcttagccatgcttagttcaactagcacacaaatggggatcaccttattacatagactttgtctattggtatagctttagattggtgccaccgcaatggtgttagttaattaaaatacactgaatggtgggctgtgggtgcatggttatgctggtcgcacccatggcagttaaggaccggttcacgggaaaccctgggagacttaccgtgcttaccacaagcgggagtgggtaactgcttgatctgaagtatagctcgaccctttcctaggcaccggtggcgagggtgggcgtgatggagttgggtcggccggggtgtccggttgtccagctgccggattcaccgcggcgcaagaggggaccgcccactgccttttgaggggtgggggtgaaaccttagcgtggtgtggatggttaggggagggttatgtggagggtcttgtcacgatttccccctttgcagtatcat

SEQ ID NO: 29345 - DNA, 725 bp, Oryza sativa
cgaaattggaaaggatttccatataaaattttggggatttcttggggaaaaggaagaggagaataagaggaatatttcccctcaactaatttggaaagaggagcaacgaggaggccggatttggtggaagaaggcggcactgtgcacaggctcggctggctcgggctctgtccagagctggaagatgaacagtgccagggaggcaaactagacttttttcggttggctgagaacagaacagagcacttgacttgggccggcttgggctgcacagcacgcgcgcaagggagagagaagaggaaggaatgggccgaaaatggcccaagcggaggaggaggatttttattactttcccaattaaaataatcacttaaatgatctttgaattgttaaaaatacttccaatgctcaaataatttcaagaaaaatcatgaaaatacttggacactcaaagtatttaacaatattaaaaccagaccatttaatgattaatttaatatgtggattattactgaaatgttctttgtatgattaaaaattaggaattgagctccgaaaaatttgagaagatttcagagagttgacttaatcatggagaatttaataaaaattaaatccatccatgctttatattagggaaaatttatttcccacatttaacttcacttggaaattaaagaacatttaatataaattctattaataatttattaaaaaatttataa

SEQ ID NO: 29346 - DNA, 746 bp, Oryza sativa
ttcccctcaccttcaactttgaaggctcttgcgccgaatctaacaccaccacgcgttataccacccctctctgtgacctcgtatgtctttttctgcttatcgaaacaccttgcagtgtgtttgttcgccttactttcttgcaccttcatcttactgtcaaccttggtggaccaacgctgccctaactggactcgcttcaaagcttcatcatgtctgttcacaaagtagtcattacacttcatgaacgtaaatgatacgatggccgtcactggaagcttacgaacaccaactagcacgctattgaactgttcggccatgttggttgtcatgtaaccccaccggcggtcatttctatcgtatgcacgagaccacttatctttatccaacaactcatcttcaagccatttacgaggaccttcgggaatacgctgccttagtgcctcaacatccctctcaaatatccacttctcgtcaatctgacatatccttaggagctcttttgtctgatgcttgtccgcaccggccttgtggaaattagcactgaagtgcctcatgtaccaccggtggtgaaccgatggcaatcctggaacaggagtcatcatggcattcattataccagcatgtcgatctgagataatacaaacctccctatgcggcccaaccacaacccgtcggacaagatcgataaaccagcaccagtctcgtgaattctctttctccaccaaggcaaagctaaaggtacaagt

SEQ ID NO: 29347 - DNA, 1622 bp, Oryza sativa
cctcaactactgcttttaaatgctagctttatgcaaaagaacctctagcctcctttggttatatcctgcatcatacctcctcttccggtatgacttgctgagtacagtgggtagtactcagtcttgctctcttttcccccacaccagagctgaagatcttcctagttggagctgttttgtcaaagttggtttcgtcgctgccgtcaaggattgcctgtggagtggagtcgcccgctgctgaagtcaagcttcccggtttagctcgcttttatcttttccgctgcatttgtaatcttttctatttttgtaagacgtggatctgtatgtcaacaattatcgtttgtgtaccctggctggtcctggacagggatttaatgcacattcagcttagaaattctggttcgagaatttctgggcgtgacacgggctccgaaactacacgcgaaacgggacaactcaacaaactgcgaaaataaagccctattaatgacctctaagcgtgccattagatagatctcgagatttgaggaattttggaagttgaacggagtcaaacggatttacggttgggaagatattgaatttctaagattattggatttttggtctaaaggaaaaggatttaattaaatcctttttggaaaagaaaaagaaaagaaaaggaaagagggagggattatagacttttcctcgggcggctagggcgcggcccaagggaaaaggagcggaccggccgagctaaatgggccggccggcccaagcggcccaagtgcgcgcgtgctgaagggaaggagagaaagggccggtggacagggctcaccgtgcgcggtcccgggtgggacccgcttgtcagcggctcggctcaccgtgcggagggagcactcggcgcacgcgcgcgggcgggggaggaacgtggtgcacgcgcgcggtctgcggaggaacggatgcggcgggcccacgcgcagcctcacggctcgcggtggaacgcgcgcacgggaggggctgaccggggtcggcccgtcccgacctcggctgagctggcgccgacgtggcgcctacgtggctgccacgtgggctggcgggaggtagacgacgacgccggccggaacggacggcggacaacagcggcgagcggcggagcgaaccacggcgataccggcgaaagcgagcacgccgggtggttgcacgagacgaggggagacgagccaacggctcggattcgccggaggaagcttgacggcggcgaatcgcggcggcgacaaccggcggggagggaagagggaaacggcgacgaggccacgaggggccgattcccggcggtgagagcatccacgcggccacgggaatccgatgctagcgtcggattgggcggagctacgccgatcgaggctggcgacgtgcgggtgctacggagctcgagcggcgacggtggcgagcacacggcgagcgacggcaatggttggggcggcgccggctagctacggggagtctactcgtgctaccaccgaagactaaggggggagatggagcgaggaggaagaacggagaggggcactaccgtgcgggtcggggcgctgtgacgagaggccgatggcgcgggagtaatctctccggcctcgggc

SEQ ID NO: 29348 - DNA, 1991 bp, Oryza sativa
ctgcccgagtggatcgcaagttgtattgcgtgggttgcgtcccctgaggcgcgtcgggaagctgtgacatgtctatctcctcggcatctggtgcgacgtagtcctcatcctcctcgtcctcatcgtcatcgtcgtcgctaggtggagccggcgccttcccctttcccctcccttgcttaatgcgtgacgacgacgagccaccaactccttcacgctcttctatcctgatggagtgtcgagcagtacttggacgcgcggattgaggtagtggtggtggtagtctccccggttggtacacgtcgtccaatccaaccgacctgcaacctaatcttgctgcaagtttccggcacctttgacgaactttctgcatttcaaaaaaaaaagaagtttgttaggcataactcaagtaatgcaaagtgctaaataaattttacctctaaaacattgcggagcgtgttctccgtgtcctcaccacccctcggagcttggagggcatgccccatttcattcacactcctgaggagctctctcgactgaaagcgtgaaaagatatatgttagggtctagggtgcaaatgtaagtaactttgacaaatgcaagaaaacttacgactttgtctctaagtggggcgtgctccatttgatatccaactctagtccggacatcatagggattccgcccctcatcggagtcgcggtcatcctctatgtcggcttccgtccaagtagggcggaggaacagtctatatgtcctatgcagccaacgaaggtactctgagaaaagatgattttggtgtatagtttcgatgtacctatcgttccttccggctgttcttcattcatcaatgtatctattatgctctaacccccaatctttcaccttctttgttctcaccctgtcatacctagacaagtagaaggtgatgaaatagtagtgagcatcgacaagggttaaatggtacaaaattgaacattgacaatgaaagcaaacaaagataagaaatatttacttgtgtaattcaactccagttgagatgtcatcaaccggccaatcttgtttcttcccgaactgtcgcatgacaccgtgcggaaggtggtactcaactgccccaaaacaaatcaatgggcactggtacatgaaatagtcagagtctcgattgcacatctagttcacggtcaagcttgaaacctcatttgtgtggtatggtaaccactcaatctgcaaaagttgaagagatgtccttggttagtatctcaattaaagaagtaaatgtctaactagaagtgatattggaagtactaacatgttgaggcttgaagcagtccatctcattgacataatgcttgtatcccacatcccggtgagcatgtgcagtgccagtactctcaaaaaggtaggccactgttttctccatgtctggctcattgtagggccaaggagtgaagctttgcctccacttaggctttccatccggtagtcttaaccacatccacatctgaatcaatagcacacaaccactcatgttggatgatggtgcctgacgacaacaggcctcacagagctgtctatatgtccacactaacactgctgacccccaactgaaacggcccagatcaccaaggttggcgaccaaaggaatccatatcgccgaagcaatgtcacccccagcatcaggaaacagaacccctcccaacaagtgcaagatgtatgcacgggcataacactcaacacgccatggctcagcatcgtcgtcaagatgtgagaagttctgactcagccaagacaggggtattccattctgcttcttcttccccccttgcccctgctcaatgttcagtggaatgccaaacagctgctgcacttgtgcatgccatccaggagtatctgtcttgcccgtcacggcatgcccccgtaatgggagggccaaaatcatagccacatcctgtagagtgatggtcatctcaccaccggggaggtggaagctgtgtgtc

SEQ ID NO: 29349 - DNA, 25604 bp, Oryza sativa
aatacttgcatgaagctatggtgtgacaataagtcagctatcaatattgccaacaatcctgttcaacatgatcgaacaaaacatatagagatagatcgtttctttataaaggaaaaactagatgagggaatgttgaagctagactttgtaatatctggagaacaaatagcggattgtctaacaaagggctttaggtgttgcagagtgtttgtctatgtgtaacaagatgggcatgatagatatctatcgcccatcttgagggggagtgttgggctgtaaatgtagaagtatgtctatctaggcccaagaggcacatatatccatatgtacatgtatatgttcagttgatagagtaatgaaaaagaagtgaagcttccagagaaaacaaacacaaaaaacttcaaaatatactcctagacaagttgagaatttatcctagaggatgctaattgataagattcgcaagagtacgagttgtactatatgcaaaatcaataaagcaaccacaagtattactactccatccgttctattttaagtgcaatcataagtttagttttcgtgtccaactttaattgtccgtcttatttaaatttttttaataattagtattttgttgttatgagataataaaacatgaatattactttacatgtgacttatgtttttattttttaaaaaaattaaataagacgaacggtcaaaatcatgcacggaaaatcatgaccgcacttaaaatggaacagagggagtacaaagtaaagccatttgttcagaggaaaatatgtaaaatctgtcattcagaaaagatcgaatactagtactgtgctcttcccgactcacatccttctttttccgcgacgtacgctatttaaattgctaaaaagtatttttctaaaaaaagtttctatatcaaagttgttttaaaaattcatattaattaaaattttaagtttttttggctaatatttgatcaatcacgtgttaataaacaacattgtttccgtgcgttaatgaactccacctcgggaactcagccttagcattaacctgctatggaacaatactccctccgtcccataaaaagagcattcttagcatcccaatgcaaatttagtgaggagtaaagacaactaaaatgtcccttattatttaaaaaaaaatagtaatgatgatagatatgtaaacggtatttaagggataaaacttctcgttttacgtgctgaaaataggcaggacagtagaagttgattttttttgacaaaatttaaacttcagaaattgagttttttttaagatggagtatatgagaagagattttttttccttgagattcggacaagatgacagtgatacagtttgaaacagagctgacaaacctcttccctttcagttaagggtttaaggcatctgacatcagatttcagataaccacttccctttcagtcaagggtttaaggcatctgacatcagatttcagataaccaggaagcgttttgattctcctctctaaaaaaaaagttctgaatcctactcttttaatccttgaaaaggcggtggcgctgttcgttttcttacatctgaagaacagatgaaaggaaatcacagcaggtgagacaagttaaaccacatctccgtcgattgcatacagagcacaacgacgagaggaaacatacacggctctacaatctcggaccaaggactactcatcgatcagagagaaaaaaaaatgcagcagatatgcaaagatcgttacaagacagatatagaacagagaagctcaaggcgtcattaaccctatgaagctttgacaagatacattacattaatatatattggctatgccgaatgccgatatatcaatatcgctggaagatggattgcacaacagtggctgccttagttggaagaaacatgttgatgttggccattgagtggagtgacgtttgagatcaacagatgccttcatgtgtgacttgtccggagcatccatggcggaagcttgctgttgcctgcttgtgccggagacggttgagcttctgactcccctgatcctcttggttggctttgactgaattaagatgaggaaaaacagcataactaaaacagacaatggagttgatgaaatagtagtaacatgctagatcattcctaacgtcaagttattgttcagacatgatatatcaagctgagaccaaaccatttggaggctttttcactgtttggttcaggcgctttcaggcctgggcttatttgttccaaacttccaatagccatatgaaatagaccggcagcatttgattgaacaaatttcaccggattaagtttcctaggcatagaccatcaaaaactactgaactgtgatagataatggaagtctgataaaagaaaaaatatagaataaaaatttgctgaagaacaaaacagagttttgttttatttatggtgagtgcaggggcaaaatatatggaagtaaaagcggtacctgttatttgttgtcgggatgggatctggagccgtcactggtgttggtgatgatgtgcttggtgttgctccattttgctcctcccggttagtgtttattatagcattgtttttctccttttctgtctccatgagctgctccgaagaatgtagacaaaagggtttgacctccaatacagcttttgtagtgatctgatataaaacattgttgtaaacaagaatgaaatttaccttttgcagaacattattctggtttttaagtgacttttcctgcagacaggaagatagcagattgtaagaatattcatcagcacgaacctatatcaacttcgtccatttctcagcacaatattaacatggctctgttgccacttgccagatcagatacagtaacaatcagtagtgcaggtccttttttttccctatgtttatgcatacattattgcgtaaaaggctaacggtcaagtccttgccatatgcatcgaagatttattttcccgtagaatgttcaattttacaacgtagtctgacttagtctgttctctctcccctagaatatatacattgatggcgactttcctgttatacccatttgacaacattgtgcatttcccacaatatgaccaagacaagtggcttctcgttagttccttaggtgattcaaattgactaatgatttcttcttataatggaatttctagaattgccaaaagacatgttttacatgaatatattctggtagaaggcaagaagagttagttgtctgaaaattgtttgaatgcaactttaatactccaaaacaatatggtataaacagactgctacattgctatttaaggagccacattgagggtaacctaccttcttctgaagctcagaaattgattcaaacagaagctgattctgcaaaagaaaaacaaaaaggaaagtaatgatgttttcaaagattagttggaaataattaaatcaagcaaatttgatccctcagtcaacagtgcataatggacacaaatttcaccttttttgatcttatatgcttcagagaatattccagttgatgttccaattgctggagttcttttattgttagtgtgtccaattgttcacctaagagttgccttgagcagtagatagaccaactcaagttagcataatcttgttaccaaagtgaaaatttcttaagaaagtttgcagtacctttggctcttctgaagtgcatccagtttggacttcaaaattccatattcatcaccccagttttcctaggagaaaatgaatatcaagatcagataactaaccagctagttaaataaacagccggagatagttctccaacagtcagggatgtttttttacctggtcctcagtatttggctccagtacggctctttcatcaaacgagtaacgctggtagcgttcaaggatcccttccatactacagaagaagtatcacatgattatgctttggtttgaccaatgcatcaaaagatgatgccaagcatagtcttagagcaatatcaaacaaatgcacagttataatttttgtaccctcaataattcttaaggcttgtcaggtgacaactacaaaagtaggatccattattcaaattatccatgtataaatttaaatcataactgctacaaaaattatgcatcagaaatagcactttgaaaaacatttgtatttgttggctgaaactttatccattcatgttcttcgtcgtaagtttatatctaattagaatgattaaaaaaaggattatctggccttaataacattagtacatatggtgaatccacattactcccttcgttaacaaataaaagtcgttttgaaatgtgtaatcaaatctcaacatcaactcactggagaatggattctaaactctcaagggaacatcccctcgttttttgcatgtcatctaaatggttatgatttttttaaaaaaaaatcgacaagatagattaatatgtgatagattacttcacaaacatgcaagttcaaattcaacttctacaagttacaacaaaaaaaaattaaactatggctagttaatgtatattcacggtcaaatttaattttttcattgcaacttgtagaatttgaatttgtccttgcatgtttgtggagtgatttatcacatattaatctatcttgtttattttttttcaatttttttcacaaccgtttggataacatgcagataatgaggggatgtcccctcgagagtttagaatagttcccaactcggtgtataaaaataacattcatagattcataattgaataatgtagttatattttaactattttatgagtagatgatcatacaaagaaagatgtgtgttagggataatgtcaatatcctagacaagaaataaaaaaaggaacagaaggagtatttggtagcatagaagtagcttgaccttaatactaacacaataatgagagagtattgttgcctatccaaaaattttgcaaatttgaaattatatttatcacaaaaggcatcatttaggtcccttttttcccttacgagctactgatattatgctccctccatttcataatacttggtgattttaagttcgcattgttttagtttggccattccaattttataaataaacttttagtattagattatgtaacatattattaaagtatgttacatggtaatggtaaatatagagatataaatcccatccatcataatcataaattttaaaagatattaatggttaaactgaagcaatcaccggtcaaaattgccaaatattatgaaataatagagtataggaataccaataatgaaatatttaaattcctcccattaaacaaaagatattagcataaacataagcagtttgcttaattgaaaaccataaacatggttatacttgaacagtatagctatgtcaatcagtttattgttgtcctaaaaaatccatttcaagaaataaacaccccaatttgtgagagcaagttaatagcaatgggcaatggcaacttgcaccatgtatagctaacttggtgacagtacacactaaagggacaaaagaaagttgtagtttcagttaaagcaaggccgggtattaatttacttcccattatcttaaaaaaaaaaagggaaatgaaaccgaatgcatcaaatgaacaagttaagtaagctggtcaccttatattccacctcgaaattaactaaacaaaagtatcaaaccatatgtcatgtaaagctggccgcgccatttataccagtccaggagttgtcagtaacttaagaccttactggcctggttagaggagccgcttaattagcaaggcgtccgtgcatatttcaactgaagtgctgctctaatgatttccagaaataacgagacaaataatacaagtttaccggcctagctaggctttggtaataagcatcacttgtatatgctacagtacacaagagtataagcatatgataaacctagataagcacactaattaaaatttaaacatatctttctttccgcccgtactgatgaagcacatgaattttttttcacctattattccattcctttttatacaaaaaaaaatggaagtgaacgtgttcaccaatgctacgatgattgatgagtccccaagaacaaaactgagcagcatataaagctaaatcagcaacagtgcatgtaccaccactgtatattactagcttctgatatgcatggcagcagcagcagcagcatgccagcatcacatagagagctgtaatccaggggacacaagcaacctacaactagctagacttcgcgagcaactccatcccgagctaagcagcaatcgcacgaacgaacacgtacaaagccatgaaccgtatgtgcaatcagagagcacatgagagaaatcaatcagcacgaaataatagcaatcgtacacgcaccaacaccaccagccccctcgcattccgcagcggaaacgatcgaacacaaggcaggaacccgtacgaaacgaaatcgaacgcatcaacaagccgcccaggaacggggagctccgcgagctcgcccatggcgcgcgcgcggcgaggaaaggcgacgggcatgggccgtactacgtaggtaggcgggaggtcgcgcagaggaggagaaggaggaggaggagctaagcgcgtgcgtacctggagtggctggagaactcgtagagcttgcccttggtggagaagacgatgagcgcgacgtcggcgtcacagagcacggagatctcgtgcgccttcttcagcagcccgttcctccgcttggagaaggtcacctgcctgtttatcttgttctcgatccgccgcagctgcaccggccctctccccatcgtcgtcggcggcggcggcggcggcgaagccggcggtggcggtggcgggtggagggtgaaaagctcggggaagatggaaatggggggaggaagagagaggaagggggagggaaggcggttttagatgggggtggaatgcggtgtggccataccagggcggtttcgagtgcctcgttgtcgatttccgattggccgaggcggtttcggggcggcgtggagggatcccggccgtcggatcaggagagaggtcgttaccgcggccctggcccggtggggcccacgggccacgcggcgcgcgcgaacccgtgcacccgcgggctcgcgctcgggattggtcggtgggtcggatggggcccgcttgtctgtgactgcgggtgcggtgggctcgcgtgagggatgggtttttctttttccacaacgtaggggggtgtcgggtacaaggaaacgagacgccggatgacacgtggcgagcccacgtgtggtcgtcgaagcgggcgggtggggcccacctgccagtacaggtttttcttttattttatttttttctttttagaaattccgatacgatacgagtatttctgtttgtactactcaactccgtatagccgccaaactgtttggcaccgagtactacctagtagtacaatacacgtactgggagtaccagcgtttgtttgttggtgttgaaagatttttttttcttttttttaagagagttcgtgttgcaacaatagaaggagcggacaacaagaccgtagaaaaaggctagactttttttttttaagatactccctccggtttcattttaattgacgctttggacaatgacacgctctacaagatataccttggatcttatttttctattataatatatacaataaataaatacatgtttacttttattacagtgttttgaaagacaaatctatatatgtttttctagtttctttaaactaaatatttttaaagttattgatggtcaaagttataaaagtttaaccttaaccttgtctaaaacattaattaatatagaaccaaagggagtaatagattaactggtctccacagcccaagaaaaatgaactaccttgtggctttgtattgctatgctaccgtggttgattgcaaaattgcagataggtaaatgacctttggctacacacaggggcggagctaccatgattcctgggtattcccgggaatacccaacttttttatcaaaaaacaagtatacttttagtatatacacatgtacacatattagtgcacctaaatcctcaattcttcgatccaaacacagtccaactggcctcttgcaacgcctcctaccaacccgacccactccgtcatgacccatcagacatcagctgacccacttagccaccactcttccatacggccccctctccctctccctccgtgacccatccctccctagctcggttccctcgcgccgctccccatttccaaaccccaggtggcggcgcggcgaggcggcaaccggcggcggaagctggaccgtgctaccgcggaggggtggcgcccgccactccgccaagctcaggcggtcaggccgattgggtggccggtggccgcgaggggcaggggcagctagcggctcagcgcttagacggaaatacccaactttaaaatcctggctccgccactggctacacaaacgaatgttagccatgtctaaaaggattaccatgttaaattcatgttgaaatatttttttaaagataatggaaaataatcatggcctttaacaaacaagcgatggagccatttcaacgaaaaatatgtataaattagagcaacctttgataaacaaactatgaaaatatacatattggtttgctctcaccttccttttgttttggattatactcctctatcccaaaaataaatcaaactccagagatcaatctggacacatgtgtatccagatttttatttttattttttttgtgaggggggagggggggctacggagtgagtacacgaaagacgcgtgggcatgcagaccacactcccacatccatgaatacctcccactcccaatgctcacacacccacaaatgtgcctctcactcgcaaaccagaagcacatccctggtcccactataatgttattgaaagtacatccgtgtgtgtggaatgtttattggaaccagaatttgaaccatattagctatttctgaagtcacgtacccacgacttcaccaccacacagacgatgttttcccactactgtttgtattttccttagatcttgtgcaaaggttgcatcttgcatgagatctaggcgatttatcatctctccccttgcatatatcctccaccttatcattcaatgttacaagcaacgtggaaagattcaaggtgttttatgacatggtaggctatctcatggataaaagttatcgggactatcacttaagatgatgtggtaggagtaaaaaacaatagcgatgtcttcacacatgcagctagcatgaaaaaaatagagtaaatataatggcaccaaacgcatatacttgattagcatacttaggggtgaaaacaagtcgggccgagctaggctctgctgaaattagcatcacaagctaaaagagtagctcggcttggctcaacttcttcttgacctctagttggctcgtgagcctatgaacaaaaaatactttcagagatgaagaggagtgagaggatattggaggagccgacgagaagagtggcaactaggagtcgagaccaacaaggcgcgcgacaggtcattgggcaccagccgcaccaactttgcgagaggtgagtggcaactcgcacattgtgcttgttagcacaagctagcgacaccaaggagcagcgactttctatagtttggtcaagcagagaggcaacacgacgagttggtggaggctagagatgccttcaattggtggagtcgacatgcctacgtgcagcctcaagtatgacatgtgttgaaccgaagaaagcagtgttgtgggtaggagcatggctgagatagggaataggagacagggtgcgaggaaaggttgggaacttcggctttctttaactagattgaccactagactaataatgtgctatgagttaaatgagtgggctcgccagctagcttgggctatactcattctcgaaacgtgttgtcttatgagtgaaaccaagccatgtgagactaaatggagctcacaagttcgagatctttgtccacctctcacacaaaaactgatgagtagttgtattagtatgtgctttctgttgaaatgaaaaatgtataaggtgaattagtttgagttcttttcagcaataatgacaattttcttattttccgttatcatactttccaaatagttaaacattgtgttttgtgaaaaaaaaatatttacatattttttaaaaaaaatcaaagaactctactttttaagtttataatggctaataatcatgctctaatggttgttctagttatacgagaacatgcaacctgccttctcaaacgaagccttactcactactaaaaaatggtttttctgtcggccaaaatcagtctttgatttttgccagccttactcactactaaaaaatggttttttctgtcggccaaaatcagtctttgctgatttttgctggcagttaggttaaccgcctgaaaccaaagggtagagaaaataaacgttttcacattcggaacttaaccgccagccaaaaaacatattttcgttggcggttctgttacatgggctgctggcaacagtccatttttgcttacgtagtgttaagacgaccgccagcgaagctcttttttggttaaaaaaattgaaaatatgttaatgcatctgttctctgaccaccagcaaagaaaattaaagaaaaattgaaaattgccagatacaacaaccctgcattcccattccacattgcaaatcaaatccaagaacatgccacaaatacaagcacaaattccacaaaatataagcaaatctcaactattgaacatgcacaatcgccgatgctagatctgccctcccgatgcacgctgcacatggtcttgggcctcgccaatgaccggcttgcggcggcctcctcctcctcgcggtcactgccaccatcgaggtcgtcgtctcctccttgcccttgtcatccccgcacagatctggcaagaacgaggccggatccgcgccgatagaggtggcggcggctcgatctcgccggtggagaggggagagagctcgacaccgccaatctcgtcaccctctgtgggaaggagctcgtcacggcggtggggagggagcccgtcacggcggccggatatgatgcccacggcgcctcccgctgtctgcgctgtcgaagaaaaggaaggcaagacggggacggagttggatccggcccccgccaccgccaaactggatccagccgttgccttcttcggcacctccatgcccacatgcttcacaggctccaggcccaccgccgttgtcccctcaagcgcgccgctggccccatgcaggatccccctcaccgtggacgaaccgcagccgccacccaccggtcgtctcccctccgcccagatctgggcctcctatcgcagcgcgcgggggagggggagggggaggggggaggcccggcttttgcgcgcgtcgatttcacagtcgccgcagtcgcggtccgctatcgccgtcatcttatccgccgtgtcagctgagagccgagaggtggggtgagatgaatctggagggaggtggtgaggagaagaggataagatggagtgactagtcagtggataaaatggagtccgcacttggtgttttaatatagcgaataacttcttgcggtcggcgctccttggcaaccaccagcgaaattttgattttatctagtggtcacttaagaggcccgctttaaaaagacctctatttttacaagcggttctcttatcccggccgctaacgaaaatgaattttttcgctggcagttcttagcacctcatccctcgttaaattttcgctggcggttttcgcttatagacgtcagagaaaaaaaatagataaacgccatgaaaaatcgattttctagcggtgactccctcccatcaaacaaaaagcaattctgacatagtcttaaaaatactgtttccgctaatacttcgtattgcattttttttagaaacctaataaaatcacaatttgtaaaagtactttctgagataaatctacacacgtgattttcatgtataccatctaaatatctttaagaagaaatttatgtgtaaggttgttttcgcgattgaagggtacggtgggtaattacagtcctccttccgatggaaatgccggggaacggcaacactctatattcttttatgtccttttgaatggatccatattcttggacaggtacattggatggcacatcaatattcacttggtcaaggataatacgaggtacacgatcaacatcatgatacgtactagtaccagctaaccactgcaccataattgaccgaggaaggcaccgatgagttgaagttttcaaattcctccatttcatattatatgatgatctggcttattttttcgaatcaaacatttctaatataaaacaaacatattataaatatacatttaatgctagatataataaagctattttcatgttgtttaattattctataaatttaattaaatttgaacatagttgacttataaatcaaagcgacttaatatgaaaacgaaggtagtcactccgtttcaggttacaagacgttttaactttagtcaaagtcaaactattttaagtttaactaagtttatagacaaatataataatatttataatactaaattagttccatcaaatcaataattgaatatatttccataataaatttgtcttgggttgaaaatgttactagctacttttttctacaaacctgatccaacttaaagtaaaaacgtcttttaactcgaaatgaagggagtagaacttaaaaacatgaaaaggtcggggggagaaacggccaccggcacgtgggaagaacggacgtcttccttcctcggccacacatatgcacgcacggacgccaccttgagatcacatttggagcaaagattctatacaaaagttgctacaaaagttttttacgaaaagtttctatacaaaagttgcttaaaaaatcatattaatctattatttttttaaaaaaatagctaatacttaattaatcacgcgttaatgcgaacattgtgttacgtgccgcctcctcctgaacagatcctaatccatcatcctcactccactctctctctctctttctcccgtcgacgcggaggcgccaacgccactgaccacccccatccatcaattcaatcaccaatcaatcgacggcgacgacgacaacgacgacgatggcgacgacggagacgaggacgacgacgacgtgctcgatcgcaagctagcggcggcgaatcatgagacgcccgcaatgaagtcgtcgtcgtcgtacgtcctcgtcggcgaatcatcggtcggcgaagcagctgcagctgcagcgatcgatcgatcgatcgatgtggccgtaacaacaagcggctgggagaaggacacatcgctagtccgaggctagtacttcctccgtattattttaatatatgacgccgttgacttttcgaccaacatttgaccattcgtttaattcaaattttttatgcaaatatgaaaatatttatatcatgcttaaagaacatttgatgatgaatcaaatcataataaaataaataataattacataatttttttattaagacgaatggtcaaacgttataaaaaagttaacgacgttgtacattaaaattaaaatatggaggtagtattaagctccgagctagctgctgaatgcagtgcgtgcagagagtctctgcactccgatccactgaactcatcacatgaaactgtttcacgtgtgtggctcggtttggaattattgaaccgattattaccgtatactatgcccctccatactataaaaaaaaccagcttagaattagatggggtttactccctctctattcatgctgagtaattttacagttgttgagaaggtaccatggggtactaaaaatttcgtgtaaaattcggtaccttatacgagataccaaattcataatagaaaaggtgatatctcatattagcttttaaaggacggtaaaattggtcattcatatgcatgccataaagcccggaaaaggaacggtgtcttttcttctcctctttggtcttgctgccatgcacaaatgcattgatcaaacgcatgaaaggagaaagtaacataggccttatttagttgggaaaaatttttaggtttggttatcacatcggatatacggacacacatttgaagaattaaacgtagtctaataacaaaacaaattgcaattctgccaagaaactgcgagacgaatttattaagtctaattttattaatccatcattagcaaatgtttactgtagcacaatattatcaaatcatggcgcaattaggcttaaaagattcgtctcacaatttacacgcaatctgtgtaattgttttttttccctacatttaatactccatacatgcgtccaaacattcgatgtgacagtgtgaaaatttttattttgagaactaaacagggccatagtataacaaatctgaataagaggttatctagatttattatactagctaggttatgtcttattcacatttagtttgattttctgtgaaacggactatgctttatcgtaatgataaattagatatttatagagagaaacttaatgaatgtcaacatttaatacatggtccaaaaaactgtctaaacattcatgtatttttaaagaggtgaagaaattacccaccgtataataccccgatgaagtaatggagcctggccacttgtgctgcagttgtacgaggttacattaactctatatgccaaacatgtgtttatggttccgtatttcgacgattcagaggtagatttgttgctttctccgtggcttttacgtcgttgcaggttgtgagttgtgaccactgaagctgagctcacgttcatgtctactatagtatctcagaaaaaaaaagattattttttttctcttcctatttattctaaaataaatttataaacacattggaaacagatagctagagtatagaataattctattacaatttgataaagtgagaatattatagttctttttttctattggtatgtatagaatagataaaaaatgaatttattttgtgatacagtgatgtgagagtattgctcaaacagaagacattaccaacttcgcctattttacttatgtctcactgtctcggcctcttttaagtttggacgtacctacgtctcgttttcatagacaacaactcgcaagctactgtataacagtggccgcctgattaaaatcctctgttttgtcatgttcttttgttaagataaaggattatattaacccggcctttacaccttgggggtgtacacagccaacaactgttttgtcatgttgatgtctggggataatctgctgagtttctgctgtcatagctgaaaaaagttcaggcataatgacaaatatgcacataatcgagtaaaatgagcacagtgccacagtgtaaaaactgcgtaaactcagactattcgcccaaactgtggcaaattgatagtattgtccgttcgttgctaatccgatgctaaaaaaatctcctaaatccgcggcattgtttagtggactttatgcctctacttcctctcaagtgttgaaatgatgcctctactacgtaaaatttgcgtatctttgtatcaggattcaggactggtgggtgtttggggttatatggccttgagcccttgacaagctcatggcatatgtgtgtgtgtgtgatcgagagatggagcaaatgtagcggtggaacttgtggtttgaaaattactatctccgtcctaaaatataaaaagttatcggtttggacatatgtattaaaaaaaatgtaggtgaaataaatggaaggagattatgattggttgagaaaaaaagtaagtggtgaatttgaatgatgtgtttggtttagaaagaaattattatatttttgaataagttctaaatgtaaaaaaatgttatattttgggacggaacgtgtactactcctaccacttattattattattattattattattattattattattattattattattattattattattattattattattattggcaaaaagatttacatttcttctttcttcttatggattgggatcaggtgcagtcacgactgcaactttggcagtagccactgatccaccatccaataggtaaggaacgtccaggattaattgtctctgctccctccttttagctatttgaacatgaaatgttttctcgttttctttatctcaactttctcaaatttaagagaaatcaaatgtagtttataaacaaaatgcacacatacttcactcaataatattttgcacaattgtacatagcactgacaaatgagctagtgagtttaacttttccctgtgtttgggaataatgcatccactgagtcaaaagaaaaaaactaaactactactccaaaatcttcccgtaaatcagtgtgaagcttctattgataacttttaaagaaaatgttccattcaggaaaaaaagaaactgtaaagaaaaaacaataggattaatgcttcttagttgaacagagcatgagtcacataaaaaaaaggttaaaggagttacatcaaaatatgagctctacttcaagcccttaaaataaatgccaagcttcttttaaacatctaaataagtagtactaaatttcttgtcaaatgaaaaataattgtgctagtatttcatgttcaaatgctaaatgaggaaggaggcaattaagtctgaacgttccttactagttggatggttggattagttgctactgccaaagttagtgactgcacctgatcccaatcctcttcttatgggttactcactgttcaccataggatgctggagtaccctgcctcatgattcggcgaaaacagccaaactgtccttgtaaacgttggattgacaggctttattggtgattctcccaggcccctacctcttgcatttctgtccattcaatcaatgtatggaaaacttttcagatggggtagtactgaagtggatacctcagccagtaaattccacagccgtgagccaattggctctgattggttgagataaaggtagaaaaatgaacaaaacaatcaaaataatttacggtttaaacctttatatctatatcatgtggtttaaaagtaaacggtagtagaaaatagactaggtaaaaaaaagctaaaactgactctaaaattaaaattaagttccactccctccgtttcacaatgtaagtcattctagcattttccacattcatattgatgttaataaatttagatagatatgcatgtctagattcattaacatcaatataaatgtaggaaatgttagaatgacttacattgtaaaacgaaggaagtaaaacttaaattttagccgtgaccaccaacaaggaattaataagagccttccaagtcaataattgagagacagagtgagtgagctattggtttcgaagagtagaagtaaaagtaagttggacattatatagggcgtaatctctcaatttcaatgtataagtatttagtaatggaggtcatatcataatacttggatgatttatatccagtactaggattttatatattggcatagagggaatagaaagagaaggtgccatccaatatatatatatatatatatatatatatatagtaaatttgtttggtgctccatggtgcccgggcaccattgttgaaattgagtatatacccaattcaaatgagaatgaaactttttcaattacttaggtattaacattaactactttactaactagtttaaagcaagtttgaactgaatttgaacttgtttttgttagattttgattctaggtatatagcatccatacatataatttgttaggtatgtaatcatggattgtgaaataaagttaaatttgagttgttttgttgataagtataggtataaatcaaattattataactaggtatatactcacaatttgaaaattttgaaaaatttgagtgattttgtgcattagataccatggtgcccgggcaccatggtgccccatatgagtgtcctatatatatatatatatatatatatatgtggaagagtccatcttctattatatatattcatatgtgtactgcacattcatgggaagttctctacttctcttccttttaaacactggaagtaaataaataaaaaataatttcctagaactgccaacaacaaagtcgttgtagtatagtggtgagtattcccgcctgtcacgcgggtgacccgggttcgatccccggcaacggcgaattagtttttaatttttttggcacttgaaatgcaagatgcatttgtgttttaaatgacgaaatagccgataatttccaaattggaaaaggtactcctccgcaactttacagtacaggaggtgattttgaacttcaagcttcaaaataatgtgttttctttgctgtttgttcagataagcaaaaacttcagaaatgcagtcgtaggtgaaggcagttctttcttctttttacaatggggccatgtatgtgtaagtgtaaatcctatgatttctttgataaaatgattactatcgtattattatcaattccaagcaggttgcttgtgcactggagagacaaaatttaggaacagataatttaaactgacataaaattggtgcatccagggatggtttaatttttttttaatgcaagtcttatcaaggcactacaaaaaggaagcataactgcacaacaccaacaaaacacatgatgcgatatgtaaacataaccaatatctttattctaatttgaaggtgattcgatcctgacattacaactgtttcatcacaccaaaaagaaaaaaaaaattgtaaataccatagaacagccaggacggttgtccagggaggtgacacatttgaagttacaacgctgaagcgatctcagttcaatcagcactaacaaaaccaaaagtatttcggtatttcagtataagcagttcacatgaacaaacgaagtttttatactaccgccctctcacttgctcttggcagtgccgtttgcggtggcaacagctccctttggtgggttcagctgatcccaggcctcaatccatgtgaccatggagtcggcgagcttgttgaagtagccatcgaccttcccgagcttcgccctcacttgcttggccagctcaaggtaacacttttggacagtgtcggcctccttcgggagggacgcagactggaagaaggggatcagctcctcctgccagaatatgccgttgtattccttcttgaggttcacaaaggggttgctcgctttgctgtgccagatgtagggaaggccagtcttaacacccaaacccaagtgatcggtaatcacctgtttttatgacagatattagcatggattgtgattggtgagtggtgaacaatagttagcttgcacaatgcacaaattatttctgaagggggagaaagaacaaaccttggtgcaccatcctgcccacatatcgtcgtaacgaccaataggctggccatcacccataagaccaaagtacatcgcaggaccgatgaggtcacggtcaaaagcaaggttcattccacacatcgggaataaagtgcccttcgggattgtcataacagcatccacatacctgatttcatcatcaataaacaaaaacatcagattggcaagaagagaacgataaaggatgagaaatgccaaaaatgtaacatcaatacctgctgttcctctcaagaggcttgacaagctgggtaggggcatcatagtctggaatgttgagccaaagcccatgagaaacggcagtcggggcaccctcacggaggctgaaggggtacccacggacaaaatcagcgccatcacggtacgggtcatacaaagtgttgaagaaaaatggagtggaagggttcagaaggttcttgatgtgctgctcaagtgcattgatatcctttcctgatgggtctttagcaacctgagattttgcaagaggaataggtcagcaatgaaccaaaaacaaatgatagggcggaatcagagaagtattagcattacccaaaagtaacaaaacagaggactaaaataatggcatcacactccaatgctcaacttttatagtgcaaggcatgtggaagtactcagtcaactgtaagctaatcaagaaaactattgtgaagatcatactagaatgcaactaaaggacatgaaagagaacatgactatattcttatgctgtaaacaactgaggaccattcatatagttaaggttgattctacagtacatccatgcatccataagccagcctaataaaacatataaatcaaataatttaacaagcaggtgggacccttgtggctcatgtgccccatgtgaatacacatggcatttgctttgggggaagaagctacaacacaaccgctgaatacatccaacagtattttttttccttgtagaagtaaaacaaaaataggaatacagtcgagataaccttcatgtacctttatgttaattcctacaaaatttgtgttccactggctcttaactgataactagtgaccgaggcttaatgatgtcatagtccatcacatgtgatttagatggattgtttggtcctgtctaacttcagattaacgtttttgtataaaggaatcaatcataattaaatacaaatctggaaaatgatgtgtagccaataacaaagccaagatgaccccaaaccaaagtggacataccattcagtccaaaagacaccattaacttgaccctttctctactgtttctacattgatatgttctgaagaaaagactactgataacggcctcgagcataaacaaagtaatataagcgtacatatgcattaacacaaccgacaaagcacagcggcaggacgatatatccgagccacattgtcgcgtactaacaatttctgaatactacaaacctgtggggcaccacagatatacatataacctattccagctcacatcccctccaaccgcaaccgcaacctatacatgaccaccaagcaagtgtagctagatccaatgcttgatgcttccaagcagtgggccaagtcaaacgttcaatccaagacaaagcaaacactgtcagatctgataatggcagactacatgcatgattccaaggattaaggagttactaccttttcaactaggcagatcaatcagtcatccgcaacatgtgaaattcacattcaacctacccacatcacagcactatgcagtagtaatagtagtagtatgatgtaatgcaaaaattaaagggtttttttatcactactaaactaaactgtcctaacaaaaagaactactaatctcgcaaaactgaagctaaactcaaaaatctaactacggggcaatgccgattgctgacgaagaaacagcccagagatctcgcctttcccccactaaaactacacatccagatccgatccccaccaaaccaagatctaaaatccccgcacacagatcacgccatggcagtggagaaagatcgcccaagatccagcggccatcaaccagcagatcaaaccttaacagagacagatctcactgaggcgaagttaatcgaggggtggaagggggaaagaagctcacgaagcagtcgtcgtcgatggtgtagatgtacttcttcttggagaccatgtagccgaagcagcggcaggcggagtccttgaaggagatgcaggaggccctggggccgaggatccgggtgatgtcgtcgcggttgtagagctcgtagtcgaagccctcgggcacccggatcgtcttcttggggtcgccgtcctggacgatgatgaggtggtacggctggaagaagggcctccacatctccaggaagtccaggttgcggatcgtcgggatcacgatgtccagctcgtccttcagcagcggcgtcgccgcctgcgcggccgcggcgtcggaggaaagccattgccggtggcggagtagaaggtaaaggtgaaggtgaaggtgcaggtcggggggagtgaggcgagacgaggcgggtataaaagggagggagacgagggggtgggccggatggcccgtggtgggcctcttttttgttgggctttgcgtgtacaggaaggaaaggaacctgtgtgagtgtgagtgtgagtgtgggtggtccgttgttggagttggtgctttgcttgacttattatcactactactggggcatggactgatttgcatggccatggacatggtgcctaccaacaacatctgggatggttggctcaagaggggaagatatggtaacggctacgggtaaaaagggtcgaaatcggtagaatctcttcggaaacgatgctcgatcagccggtaattgaccatatctatcatttaaactactcagtatcgacattaatacgatgtagaaagaaattagaaaaaacaaaatttaaaaatagccaaaaacggtacagtcggaaactgtaccccttaaacggaaacggcgcccggtcgatcgggaatttccgtccgttttcatccctagtaacggcgatgttcttttcaacttatttatttatcggattaatggaatagattatttgtttcatgttttcaaaaagagtaaattaatacgtagtgtaggaacttggcaggtggatgtgatttagtgtaacaaattgaaaaatatgcagaccggtacatgaacttggcaattaagtgcattttggtcaataacattgttgcgtacgtatgattcaacatttcaacttattttgtttgttctcattataagcataattgctaggttattggtcataagtacgttttgcgttgttcatcaccgcagacaatcaaatatgtttgattagtccgatcactcgggaaactatgttacaacagtttttatgcagttagtttttacaatcattatatttttcggtttcaaatcaagaggttattttattattataaacaaacaaatacaatacatctaggctattattttgagagtcattatacttgttagattgcaatgacaactgcttgcttttacgtggcttaaaaagttagccacgatatatggtcgcatgatcaaatgttagccaagaaaaaaatgctgcaaatttgtgatatactcttccttcaatttttatatcatttcgtttaccctcttggacggacagccagtcgttctaagttctaagttctaacggcccttttgccactctagaatgcgtgctagagacaccaaaaccagtcagaaaaacgtctttgagtacgagctgcgcgcgattacttgaagattacacacgcaaatacgcctttccacatcgtacgccatggaccttagctacagctacacgcacatcaccatactattatttacttaattgtaaagatgaattgaatattttgaaaataaaattaaaatcaatggtctaaataatatacagtagaataaagttttttttaaaaaaaaaagaacataaagtgtgaagcactgaagcaaacaatttgtttcaattaaagctagtgaattttgatgcctgcaatataggagtagatggtgtgatcatctgtcacgctcgtacgaaagaaaggacgtacgtttcagcttatatggatggtctcctctctccatgtgagctgcaaggaaaacaaaaccggtaacatatcaatgcctaacagaaaatgatggctgctagaacgtacgcattagtactagtacatcaactaatcgccttttttgaaaataaagaaagaaaaagatcaatgctgacagagtacttacctgatcaaatcggtaattttagttagtttatatccagggtgagcaatgagcgtctttcattttcagtactacttcttccgtccataaaaaaaaatcaagggcttcatcttttctcgcttatgcttatacttatcagctaaaatttgaattttcaattttaaatttagaggtgattttgaggtttttttatcgaagtttatttttcagactttgcttttatatcgctaagaacacgtatataaaattttattcacaaattacttttcgtttgtaaatatgccatttctcttattccgcgaataagccaaatgatggctccgcaaatcttgactataaatctagataaatgtttgtccagatgcatagtcaggatttaaccctttttgacgaaagtagtggaatattccctctgtctcaaaaaaaagcacaacctagataaggatgcgacatctcctaatacaatgaatctggatatgttatagctgccatttcttcatcccaaggaatgaaaatgaaactttttagagatccaaggtatacagaggagacttttgagtgtttatacagatacaataatgagttgacgagacacacgacattgtgattctctcgagatgctcgtctctttgcctgcctcgcacgtcggccggtgatcgatcgccggtgctctgcctcttgcagtccgcactgtacttacaccgacaaagtattttcttttcacgaacacacaaaagctttaccttttgatgtaagatgatgaataattcaagtagaagaaacgttgaaatggaaattagcattgtgatttggtgatctgtatatactgacctagtaacagcttacatcaaggacttgtcgggagtaatggcaatcatctactgatctagtacctacaatgctacataattgagaatcttcagtttacatagcaacagtgattgtactgactaagcttctgtttgtggttctgacgacgaatgcacgatgactgtcctctcctacttgaaatcatggagaaatggcagtgattgtacacaaatgctgcacagttttcacaagaatgaacagccagcttgatatagtgatctcacctcacgctgcaagcacgtagtgctatgtcgtcgcggcagcaaatcagcatttatctgaaactgaacaaccaaacagactgaacctcgtcgtcactcgtcagtactcaggtgatgagaatttttacatcacttctccgaaactgaactgcccctaaatcatccgacagtgctacgaccaacgccatctctaggtggattttcaggcccagatttgtaccagacaacgcctgatttaagcttgttcatgttttcagttgtaggtgagcatctgcatacatagtttttgtcccagttggaatgcaatcgagttgatttatttctttcgaatttacagcggaaatggctctccaattgtgatcctggaattttgcacagttcagaatgtagactggatgaagcaagttcagactccaattgtaatttagatacttcatagagtgttctaaaaaaaacttcatagagtcgttggacccaaaaataggccaaggcccagccccgctgaagttttggcccaacatatgttcacacggcgaaaattaaagtcattaatgggccttgcatcccagggctcgggccatggtccaggttgcctgggcctgggtccgagaaggtttcccagcttcttctttttttttttttgagaatttcccagctattgg

SEQ ID NO: 29350 - DNA, 559 bp, Oryza sativa
gctcggtacccgacttttgacattgtttcatgtgtggaatataggatggactttttgcattgtttgatgtgtgggacatgtgacggacttttggcattgtttaatgtgtggaatatgtgatggactatgtgatggacttttggcattgtgatttgtgcaattggaacttgttttagtctgtacgaatctgtgaattgtgatttgaattgcgaactgtgaattggtacatttgtgcaatatggatctacaatttgcagggaggcagagggcggcgccaaccaccctggcgccgaggttgagaagggcagcgccagccagtgccgcgtggcagaagggtttcgggctgggggagggcggcgccagctacccaggcgccgtggtccatgagggcggcgccagccgaggcccggaggcagaagggcttcgatgggtggaggaggggggcgccagccaccctggcgccgcggtcggggggggcgccagccgttgcctggaggcagaacagacttggcgaaaatttgggggggggagaaagttggtggggcccgtagaggagggg

SEQ ID NO: 29351 - DNA, 1417 bp, Oryza sativa
cccaggggtctatttataaaataagttttcaaaaaggaccaaattgtaaaaatttcaggtagaggcggcgacgtcggttttcaccacgctatggcccgcaagacatgtaaagttgtcaacacgcttgtgcggttttgggccgaattgaaggcgacctgctggttgggcgcccaagctacagaataaggaataagttcacttgatgaccctcaaaagtgatcggaatataatccatgagcctaaaccgcaaaatcggatatctcgaccctcaaactattaaaaccggtgcaatttgactcccttggcggttttagagggcggtttcgctgacgtgacggtattgacctagtctgtgtgctgacgtggcgcttagatagcatttcaattaaaaagatatacgtgggacccgtttgtcattcacacacacaattgtggattccactgacatgtgggccccacatgccatcttatccgtttcttcttcctcccctcctcccttctctatttctctccctctcccctacagccgtccgcggggagcgagcggcggcggccgggggctgaagcagcgggggacggcgggagctgaagtggcggcggcggaggtaggctggagtccatgtcgtgccgctgccaccaccaaccgcaccacccgacggcacacatcgagatgtcgtcggcggccgagctcccctcagaacccgagagattctgcgggtgtcgcggcggctggcggagactgcggcgagcggctgcggctgcacggagtcccaagcgcggaggcgcaggtgtggagccgtggcctacgagcagcgcaacggagacgcgggtgtggcggtggcgacctgcaggtcgagcagggcgcggccgagctcgccgtaccccgccgcgtgtgcctcccgccgccgccgctgtggtctcctccatcttcaccgtggtggagctcagcccgggcgccgccgccgcccgcaggcgatcagctacaccgtccgctccggccgcctcgacgcgctcgcgctgctcctccttctcgcagcggatataccccatggtgaacgaagacgcgcagtatggcgacgagctccgggccgtgtgcccgccggacgcggaggagacggcgtgggtgcacctagaccacggcacgccgggggagctcgacagccagtgctacgtacaggaacgtgctcgccgggaaggtggtggctattcaactcggatcactggacgctgatcagcgaagcggcgacgaggcagatggtcgaggacaacgcggtgaacctgtcagccctttgcttgttggcttgccgcttgatgttagtacacacatgcactgcctgttgctaccgcttgtgcttgctagccgcagtccagccagtcctcatctgtcgccccttgccgattgcctcagcaaccagca

SEQ ID NO: 29352 - DNA, 16514 bp, Oryza sativa
  unsure (1)..(16514): unsure at all n locations
agtcgcggtggcgagacgcaagcggcccttacgcgttcgtgggcgcggcgggagaacggcggaggcgggtgcgtcgtggccggcagagagggcgtggagcatagtggtggatagtacagtcacggggctgagggtggcgaggacgcggccattctcgtggcccgttttcttccttccgacggccaaccttccacggcagtctcgatctccgccgccgccgctccggccctcgcccgcacgccgctgtcgccgctccagtgccactcccaggtctccgccgccgctggccaccgtcccacactcgcggagagaaagagagaggggaggatatgatttatgtgggccccacatgtcagtgggtcccacctatacttttggtgaatgacaaatgggtcccacgtatattttttttatttctaatgccacctaagcgccacgtcaacaccatgtggacagaagaccgagtcaatactgacatgtaagcgccacgtcagcgaaactgtcctccaaaaccaccaagggagtcaaattgcaccggttttaagagttgggggtcgagatatccggttttgtggtttagggtcatggattagatttcgatcacttttgagggtcataaagtgaacttattccacagaataaacctagcccaaacatgcaaacaattgtacaggtggcctcaaatgaaaaaaagaagggagggggggaatttataccttaattagtccgttccatcgtgccaccttggtcaatataaatgcttgttcagtttattaccacttttaaccttatcattttttatgttatcaaatttggtactctctccatctacttttgatagtcatatttcatcttgacacacagaccaaggataaataattctacttatcatctatttaaatatgctactagtcattcctcgtaaacaagcgattcattaatatttacatttctcaatacccatgtagccaatcatgtgttgaagaatggagagtcacgcattaaatttaaaaaaatcattaagatgataggttgttggattgaaatatgcctatcaaaaataaaatttttagatttgaaaatatgactatcaaaagtagatggagggagtaataccataaactaaacactcttcttcattgtcaccttaccaaattttgatatttctaaaagtttcttccaataagagaactttcaaaatttggtaagttacaaactgaaaacattcaacaataccaactttgatgacaccaaagtgtgccaatatttggcaatgtcaaatcttagtgagattgattttgacaacgagctgaactaagctaagaacgcaagcaaattaggtattaactgacagctccataagtaactcgaaaagataatgaaataagtcagagctttaattttgtcttgtgtttcttcagaaaaataaactagcactcgactaagctaagaacgcaagcaaattactatgtaaaaaaaggacaagtccccctaagaaaacaggcacctacttatgtgctcgagttaaacgacatatttgaagactatttcctccgttctaaaatataagacacagccactcttaacccaaagaccaagaaacaattattatcatcttctagtttgaatcaccataataaatactcactccatctacttttgatagtcatatttcatcttggcacacagaccaaggataaataattctacttatcatccatttaaacatgctactagtcattcctcgtaaacaaatgattcattaatatttatatttctcgatgcctatgtagccaatcttgtgtagaagaatgaagagtcacacattaaatccgagaaagtaattaagatgataggttgttggattgaaatatgcctatcaaaaataaatttttcagatttagaaatatgactatcaaaaatagatggagggagtataatacatgcatccaatagaattagaggtcttgatggtagaggattaaaaaagtaataatttaacggggaagaggttctaattaattgtatgcatgcctgcatgccttatattatggaacatccaaaaaagtagttgtgccttatattatggaacgtagggagtactacatgatagatttttctggacaccacccattttgtttccatgcggtccgaaactgaaaccgcatggaaaaatggggggacgagcaccgggctattgcccgcacgtcttaacccgactgcacgggataatcctcgttatcccgtgctgtcgacttaagagaaccgtacggaaaaatcgattttcgcgtgcaggcttttaagtggactgtacggaaaagtagatggagagtatggacgaccaggatggatagaagtacgtatgtatatagtatacaactccctctatctactcgtgatagtcatatttctaaatttaaaaaaaatatttttgataggcatatttcaattcaacaacctatcatcttaatgattttctcgaatttaatgcatgactcttcattcttccatacaagattggctacatggacatcgagaaatgtaaatattgatgaatcgtttgtttgcgatgaatgactagtagcatatttaaatagatgataagtagaattacttagggcagtcctaacccataacactagacatggtttccataaactccacatcatcaagaaactagtactagacactactcttccaatgcaaacaccactattccatacttcaatttaatgctacttatctcacatgatgccttggatgttatgtagaaaccatgtctcatgctagatatagtttccttatctttcctcatttattcacttgccacgtcattttttttcctaggtggcaacttatttaattgctatggacaccatcctatttattggattgggaatgtacttatccttggtttgtgtgccaagataaaatataactatcaaaagtaacgaagagagtatatttatatgagtagtacacaagtctagtcttggtactagctggcgagccttgtgcatttgttgcttaattatctcgggaagggaaagagttggggaggtgagaactgagaattgaaggaaggcagagcaggggagtcggtagctagtttttacggtgaagaagatgaaacgatactccggtaattgatccttgattaatgttctagtggtactagttttattgtgaggtttaaacggatgagggttgtagctgagtcaatgacatgtcagccacggcaaattcaaatggacgtggctttgcatacaatattttttacgaacgcaaaaaatttgcacgttaatatattataagaagatggcataatttagttacacaacacaaacggtcagaaagccgttgtcaggggccaagaaaaaaaagaaacaaaaaacaaatacataaacggttagctacagaaaaagaaaactcctaccacgagggagggatgggtatggaaacccactacactccggcctgcatctaggcagggagctggagaagagcgaagatagggcgatgacgttgtaagccgcaaccgtctcgatttacacaggaccctccgcctcgatttacacaggaccctccttagacaccaacccaagcttgcatatcagattgtgctgcgcacacgagaccgtatgactcgggccgtcgagcgcgagtttggccgcaatcctctcgctgtggctcggcacttccccatggccgcgatggcaggcgacggaggcgggtccagtgggagcaacgcagggggcaggccggcagaggcctagagcagctggcaagaaaggcgcgtagagcaacgttcaagtccgccatcggccgaccctcaagatcgagaacgaccatctttgcatgccaatactcgtattagcggattgtcctgcctgaaatcgttggaattttcagtcacctttgaatttactggatgtgcaatatagaccaatattctataggaattgtatatatatggtttggaaaactcaaatccttttaatcaaaaggccaaataaaaaaaattctataaaatttcaattatatgaaattcctctgtaaatcatttacttcaaagaggctctaaatttcttttatgtttcaagccaattcaaatgattttttttggaataataattcaaaggaattttgtaggatttccaaaatttcttcaagtaccctgtgttccaagggatatttgtttggataatagggtttagacatgttaaattcctacataagtttaaacggcaacatacttaattaccacaaaaacttattacacggcaccttattacacatgaccatggatgtactagcatataaccacgtcgcctaaacaccgtgaattactagcccacacagattcacagccaaacaagagtaatctaagcatgaactccatcacaaatccctccttaattagcaaggcgattactcactcaaccaaacgccacacacgaaccagcaagccaacgccagcgagcggcggacgtcggcggcggcggataccatttcttccctacaggaaagcggcggcggccgccttggcgcccaccgtgcgcaggaggtggaagtagagcttggggttcgccaggaacgccgcgcgggagatgacgtagccggcggcgcccggcgcgttcatgatggcgccgccgactgccgccgtgggccagaggaagtaggcggccacggcggccccgccgacggccagcgccgacttccccacgccctgctccttcacgaagccgacccccgcggcgaggcccggcttggccgccgccgccacggtggaggccacggccgccaccgcgctcttggcggagttgagcaggccgccgacgaactcgctcacgccaaccatattctgctaagcaaaccaaaacgacagtaataaagtaaagtagtattagctaccgaggtgaggactgagtagtggagtcttccgttgcttatgtagaaggccatggctacagtaatatagtaaacttctataaagttgcaacttccaaaaagaatttaaaaaaataaaaacatattcttattagaaaaatctagtacataataccagttccaacccaaaacactagacatggttttcataaactccatattattaaaaactagtactccctagacactactttctcaatgcaaacaccactctttcatacttaaatttaatgctacttatctcacatgatgttttaaatgttgtatagaaactatgtctcacgcaagacctggtttccttctcttttgtcattgccacatcatgtttcattctaggtaacaacttatttaatgctatggacatcatcctaattattgggttaggaatggcctaatatgtcacatcccatactaaccttgtatttttatgaaacgaatggagcagtcccaatatatacgtatcatcattattgttctaattatatttttataaagttattaagaatataactatataaaagtaaataaatctaataattttatctatatattggatttttaataactttctgaatctattaatgatttaagagctcaaggtttgactctgtgtagtatacaccattagagcttacttggaaacgaaggaattcgacattggtaaatactacagcattgattgattgtttgcacggtcccaaggtgattcctttggctaaaaaggtcttaaagataggaggtgcaccatgtaccaccagcactaacgaaacaaaagtatgagctcttgtctacgcatcacaagcaaagcaacagtgaaaggtcaccttgactaacaacagtgaacgacgaaatcgaaaaaggtaagaaaccaaagctgtggaaagcatgaaggtgaaatggaagtgtgacgcaagatgggattccctgattgatgtcatgtatgcttatgtcacgttatgctgctaggaaagataaccggcaacgaatctgggagttttttttggaaataatattattttaatggnanancncnnnattatnngtnanttaaacnaaatcncaagtttaacaccctgtccaacggaggcagttcgaaagggtacctgtcgaactgncccaattcgatagggtaccgttcgacaggtaataaaataacataaaaaaagggaaaacactggagcgacactggagcgacccttgctatcgaactcccgctgttagaaacgtccatcccacgccccctatggaactccccctgttaatacgtccctatcgggtactgttcaagaacttttttattttttttcttggacaactagcctgtcgaactagggcctgtcgaactgccccagttcgacaggggtacctatcgaactgccccagttcgacagggcgctaaaattgcgatttcgtctagccgacctataattttgcgattttccattaaaataatattatttttaaaaaaaattcacgaatctggtgcactcatgcacacacacaatcaggcccctccaatctagatccaaaggctagtgttcaggtgaggtaattttgcaaaaaaagcgcccgcctcttgccctggcattttgcaaaaacccccctcacgattggttttcctatcccctcatctatcagatcgtgtgtcctccgagcgcactaatccatgactcttgcgattctctttgttgaacttgttcgttctcctgcatttcctcttgccataggtgaaaacggtgattgggaaggagcttcatgtccttcctatgaggtaatccttgaacaagaccttatgtcttctcctatatgatattttttcttacaagcatacacatgtactggatactggatattgttatattcttttttttcaagggaatggtataggagctatgcaatgttcttggcttccatggtctaacttgatttactatttctagagatactacttggtcaggtgctgaagaatagttgaatgaagatggtagcaagagaatatgggaggcatctgcagtagcaggaaaactattagttgatcaggacagcttgcttgattttaatgtatctccttatatatgtacaagtgcatttctcattattgatatgcttcagcaagcactgaaaattttcactatgcatgttcacataattaaacctggtattgataattttcacacagagacttcgatggaaaaaccagcaaatttttttacattcatatcagcaagccatcataaccttttgcattcagatttcaagaatttgagagatattacattcaattcaatctgggtgaacatttttaccatgtaagaagaaagaaaaatgtgcagtccgctcaaaattcagaatggcaaacattctgaatatttctgaaaatatgtgcaaatcaaatgtgcgtcagatttgttgttattgcttggtagttggtactgccaattgttgctttgtaacaccactaagcagtagcaatgattcttatcaaaattattcttcttgcttcctcacaccacctaacagtagcaatgcttcctcagagcgatagctttcagaatggtcaggaacaggggcatcgccacatactacatctacaatcactcaacgccggagagaaagctagtgcgcgtgtgtgcaccaggatgggtactgtaaccaagagcaagtacggagttgcctccatatccactgttgatgccacctgcagtaccggtgagagagagagaggggattaaatattagggtttgcagagaacttgaaaaagagaaaaatggaatttgggaatgtgagagagcaaacctgcagcttgggttcctcaataatgtatcccagatgatcgttttgaatcagtcttgaagctttgcttagccaccaccatcgccgaggagcttcgcgtcgtcgccgccgccatcatctccgttttaactttatttaaattagactacttcaagattaactatgtttagtaatatctacaaaatcaaattagttttattatatctataattaaatatatttatcttgggataaaaatgtaactaattttttcctaaaaatttggttaaaacttagagcatattcaatatatctgtaagtaaggtccatatctagaaagtcttctccaccagcccagtagtgtgcatagatcttaatgcagaatcaacgactaggggattaactgatgaattacaaatttgcaggcgactgcacagtagcaaaagcgcaaaaaattaaactaaaaaccagaatctagattccttttagctactccctccgtcaaaaaaaaaaacctagatggggatgcccggattcgtagttttaggtgaagtcacatcctcatctaggttgattttttttagggcgggagagtatttctcgtaatctctcagacagaacctacgtattgctcgaaaagctagctagccaggatagccaggataacatagcatgtcgaacagcaatcgatcgtcgatcgatcaatgtgagcagcaccaacgcaaacacttcaactaggtggcacgattaacgtaagttcctacgaccaagcaacaagttaacaacaaagcagcgcaagacgtacgtactccatccgttttatattgtaaaacattatagcattacccacatttatatgaatgttagtgaatctagacataatatattcatagcaattctaaaaattcttataatataaaacagtggaagtaataattaaggtcgtcgattcgtcacgtcacacggcgaaggcggcggcggcggcgacgcggccggcggtgtggaggaggtggtagtagagctgcgggttggcctcgaaggccatgcgggagatgaggaggccggcgccgcccggcgccttcatcatcaccacgggcgccaccgccggccaaagcaggctcaccgccgcgccgacggccacggaggcgatggctcccacgatgtatcccacggcaaccatggcgatccccgatccctctgcactggctcggcctcggcttctgttgcttaccacttggaagttggaagagatgaggcgcgcgcgatatcggcgaccaagatggatacgtatgtactccatatataatccctccgtcctttaaaataaaccaacatgtaacctctcatatagaataataaatttggaattctggacagttctttatccaaatttgttgtattaaaatagatacaataacaaactataagccaactctaaacacatatatagataaaaagaagaaagtgaagagcagtaggctataatttatagcccgctgcagcatagaatggacgcaatatatgtattacaggtgggatcatgtatcaatagtatagtatatgtttataggtaactattatatatattggctataaaattgattatagattatttggaactattagttggctatactattaaacttgctcttaggaggggatgtatctccttctagattgggtttttttttatagagggagtagcgcacaagctgctttaccttgggaagctaagtaaggccttgtttagttccccttttttttcaaaaaatatcacattgaatctttggacacatacatgtagcattaactatagataaaacgaaaactaattgcacagtttgcatggaaatcacgagacgaatcttttaaacctaattagtcatgattagccataagtgttacagtaactcacgtgtgctactggtggattaattaggcttaataaatttgtctcgcggtttctagacaagttatgaaattagttttttcattcgtgtctgaaaacattttccgacatccgatcaaacgtccaatgaggcatctaaaaattttcttttcaccaaccaaacgcaccctaaatgacatgtgggcccggatgaattcgaatggacgtggcttgcatgccaatactcgtcaaaagcttttgacacgcggattgttctgcctaattaagggatccgatcctcatcaattggaaaagaagaaaaattctatgcacacaaccacgacatccgattctcctacgaccacggtttatgtgatgcctgtgacatatactccctccatttgatattaattgtcatataattattgaatatataagcatatattaatttaatttattccataaataaatcataacattgcagatgtaaactagcataatcgcattatacgatctacacatataaattggacagtaaaccttgaacagatcgaatatgcgaaacataacgaatacgtattgagggttttcgaagctcagctgcacagcgggaaggactcgcggtaccgggcgttgacaacagcgtgcagcacccgagcgaagagaaagacgagctattgtggatgaacagcaagcagtcgcgcaaagcgcttcccaaaaaccttattgtcaccttctcccgatgcagtacgtcgaaggcgagggttccggagacctgctctcccaatcactggtgcacgctggcgagcaggatggaataaactatgtgcgacaacactgtatagaggaggaggcaaaccctaaattgatttcgcgtgtgtgttgactgaaaacacggcggcttaggagatttgcttcactccagtgcaggtccaaggcttgtctcaagtgtcaagagcatgtaggctgattttatcctgcaaccagcaagaaagacaaaaacgtaattagatgaacgatagccaatcggccgatagggccgatgacttattgtcaggacccaaccgatacgggtaaacctaattggctgtggctttatgatagtcaattagagccaaaaccctaaatatgccctattggttgtaggactgtttcttttagtttttatcaatcgttttaagacaatattatggaaatagccgatagatcaatacttagagcgaagaaagataatgtactggctaatactccaatacagacttatataaacagattaatctataaaaatataccaaataacaattgatcaccagatatgaagtttaagcggtcaatctaactcgatgtatttatataaagcaatctatctatataagaggcaattataaataaacagatcatgaaactcgcgctatcatatataccaggtaagatggactgaaaccccaatactatccttagttatgattagttccatgttagtttcaattatatgattctaagcacggctagggatgatgcatcacaaagtatgcaaagaacataaagtctagacaaaattgctacaggatatcgtgactaggcaaaatttgctataggacatcgtgacttcacggttttagctgtagtacaccgcacgaagtgacttttgggggaaaacactcccaaaagttggatatttgctagtgaacaccgcaagcattaaagtaataatttacggttagagaggagagagaaatcgtgtgaaatgtcaaaaatgcccttgggcccacatgtcaactctcctatctctcttctctctctatccctccttctcttctctctttatcccaaatgtcgtggcgacggcaggagggcgagggcggagcggccgcaacaacgggacggcaatggctccggccagcggcgcctgccgccgacggcgcccctccttcctcactccgacggcacctcctcactccagttgaagaggagagagaaatcatgtgaaatatcaaaaatgcccttgggccacacgtcagctctcctatccctctgctctctatcacctctttcacttctctcactaatctcttctctctctatcccacatgttactgacgatggtgggtaggcgaggtttggccggggcggcgggaggacaagggcgaaagcagaaccgacgcgaccaacggcacgcggaggagcggcagcgcggctggacgacgacggctgcagcacgcggagtgaggaggaaggggcgccgcttgccggagccgtcgcccgcgcgaagtgaggagagaggggcgccgtcgcccgcgcgaagtgagaagcaatttgattttgatcaaaatcaaaacgacttataatttcaaatggagtgagtacttatcggacttcgctaatatttttttttaaagtattttagttaatcagtaataaaacatactagcagtgaagcccacacaaccacccaaccagcctgagagcgtacccgtacataccaccgctcatgcatttggtacaatcttataagaatttgaagcttaatgttagtacggatggtgaaaattctataaaaatatacatgtttcaaataagaaacccttaggacttctttggatggtagaatttttcgttttttttgtatgaatcaatttaattcccatgaaattcattaaaaaaattctcaattccaacggaggctttaattcacatttcagtaatacatagagttcgactgttcgagtgatcagtagagcagcgaggtgtgtggtacaacgaggcaatggggggaaataaaattaagactccatacagcttgtaaaattaagaattattgaaaagtttggatggattttagatgagaattcgtaactattaatatcaaattttatcgctattaataaaaataaagtttgcatattgtttttatagaatttagtcacatatcggtatatgatataagtagtaccgtatatatggagggattatcaactaataccccattgttatccacaaattcaatgtgtaatcttaccgatgatctcggccttcacctaagaaaaacctcacatcaaccaatgataatcttattatttgcaattagctagaacagtaacactaacgatgaccttgacagttactatcatgaggaagtttctatcccatttctcatgcctcgtcttgttgtttcgatcgttatgtacagcaaaggaaaggaaaagggaagattaggaagattcgttttaacgagataagtcattaccgtatgattaattgggtattaactattttaaattttaaaaattaatcatttgattttttaaaacaacttttcatgaatttttttttaaaaaaatatattattaccagttcggaaatcatctgccgaacacagcctagacgacatcgataccttttcctggtggcaagcaaagtggctagcttaatttcaacatgcaagtagctgcagccaaacagcatataattttggaatattgtaatagaagaatatattgtaccccgtccgttcaaaatatatatatgacgtattttaattaaccgttaaataagcaagtttgactatagtcttgcactattttgcttacggttggaaaatcgtatagtcattagaaagcacttttgaacatgaatccaacaatatcattatttatggcaaaaagaaacctaaacattatttgagatagtcagttataaggttcaaaattagacagtcaaaattcacattacatttccgagcgtacggacggaagtaaatatgcgtacacgttcggcaaatatcatccatgggccatggcgtacgtatatgctagtaagtagtactaggaaaacatttgtatatactcccttatttatatactcgtaaagaaacgtaaagaaagttgtttagtataatgtttaaatcaaacattgggaatataaatcatgaataactctaaagttgttgagtttgaaaatgtaaaaattatatgaatagatttgtcttaaaaaataattttataaaagtatacatatatcacttttaaataaatatttttatagaaacaagaagttaaagttatattttggagaccgtgtcactgtcaaaaacttcctttacgactacggagggagtatatactaccgttaccgtatggcgtacaggagtatccgagtacgtatatacggggtgtacacgtacaccgtacacgtacgtaggtccattttacacttctcgccggcggcggcgccgccgcagcagcagcagcaggcgaggcggaggcagtggagcgcgagggcgccgagcacggcggggggcacacgaccactgcggcgacgcggagccaccgccggtgtgtccgtacgtcgtctccggcggcgggtgtaagagcgtacgtctcggcttcctcggcggccgcggagaggagcaggccggccaggaagacgacgagctccgtggtcctcgccatgacgagctcccacaggcggccgaagctgtggtcggcgccggcgccggcggccacggctgcagcgccgcctggtaggagcctctcctcgccgcggtctccgggaacgccattgctgatctctcgatctcagtagtgtgaggagtgagtgtgtgagtgagtgagactgatgagacaggaaaaatatgttgggctgtaaatatagaagtatgtttatctaggcccaagaggcccatatttccatatgtacatgtatatgttcagttgatagagtaatgaaaaagaagtgaagcttccagagaaaacaaacacaaaaaacttcatggtatcagagcaggtcgccggtgacctcgccgacgctgaacccaagctggcggcggcgcggaccagcgtggcacggcgaggcggcacggatcggctgccgccgaggagccaggtggtgcaagggagctgagctgggcgtggatcgtcggcgtaggatccggctgcggcgctgtgaccggaggagcggcggcggcggcgtctacgacaggggtcgccagagctcgaagggaggaaggagacggctgctgcagctcagcagaggcagcgacggcagaggaagcccacgtggtggaagtgctgagggcaccgggcgtgcacttgctggctgagttgagacaggaggcccgtgcggtaggaaggagagagaaaaggagaagtaggagaagcagaggaaatctgcagctgagatttggtgctgttgctgcgctgagaagaaaaggagaagcttgtgctgtagcggttgcaaggaaaaagagaggaaagctgaggatttggtgctagtggtgctgcagttctggtttgctgctgctgttgttctgctgaagtagtgttgctgctactctgacctgagagaaactgggaagtggtgctattgctgtgttttcttcttcaaattgaggtaatcagtgttgttcttgttgctgctacttgattaaaatggggaaaaatcagggacttgaacaagtgatgggtaaattggtggacatgcttgcaaagaaacttagtgaggccccaactacaagtaatgcagtggttcctcatactgaaacaatgcaaaaaattgagttgatgcaaaatgacattaagttggagggtgttaaaaattatttgagttggtcaaaaagagctttattgatcttgaaaacaaagggattagaagaatatgttacaagggagataaaggagcctgagagcacttcaaatgttgagtggaagacttggagtactaccaactcttcagtagtagcgtggttgttgacttcacttattcctgctattgctacaactgttgagaccatatctagtgcaagtgagatgtggaaaactctcaccaatctctactcaggagaaggaaatgtaatgctaatggtggaggcacaagagaagataagtgctatgagacagggggagcgttctgttgcagaatatgttgcagaactgaagcatctatggtctgatttggatcattatgatcctcttgggttagagcaccccgattgtatagcaaaaaatgaggaaatggattgagcgcagaagggtcattgagttcttgaagggcctaaattcagagtttgaagggagaagggatgcaatgtttccaaattttcccaaaaaaaccacttctttcctaccttggatgaggctattgcagctatggcacaggaggagcttaagaagaaagtattgcctagtgtcacaccatcttcaccaagtgccacatatgtagttgcacaaagtaaagagactagggagtgcttcaattgtggtgaaatggggcaccttatgcgtgattgccgtgctcctcgcaagcctagttatgggagaggaagatttggtgacaggggtggagcaagaggtggaagaggttatgcaggtagaggtaacagaggtaggggttatgagtatagaggtgatcacagagctaatgtggtcactcttgaagagggttcttctggacctacaaatgttgatgttgccaaccttgttcattctacctcaggtaattcaaaccaagcatttatgtctatcaatagctctcattcaaattggatacttgactcgggtgcatctagacatgtcacgggtatgtgtggagaatttgcatcatataaaccatacccatttacacgaaaagaaacaattcaaactgctgatggaacatcatgctcagttaagggagagggtacagtacagtgtactcctttaatcactttatcatcagtgttatatgtcccttcttttccagtgaatttggtttcaataagttctcttgttgatcatatggattgtcagatcttcccttgatcgtgagaattgtttaattcaggagaggcaaatagggaagaaacttgggattggcgtcaggcgtgatggactttggtatttggatcaaaaggagacaagtgaagat

SEQ ID NO: 29353 - DNA, 585 bp, Oryza sativa
tttgcattgtcgactagggcatatatcttttgaaactatgagtaagatgttcccaccagaactaagtagagtggataaacataagttagtatgtgatgcatgcgagtatggaaaacatccaagaacatcatatgtgagtagaggactccgaagtatgttaccatttatgctaattcacttagatgtttggacttcacctgtggtctctatgagtggaatgaagtattttgttacctttattgattgctactctcgcatgacatggttatatcttatgaggcataaggatgaggtgcttaaatgcttccaggatttctatgcatacattaaaaatcattttaatgctcgggttcagtttattagaactgataatggaggggagtatatgaacaatgaatttagtagctttctttcatcagaaggaatattgcatcaaacttcttgtcctgatactcctccacaaaatggagtagctgagaggaaaaaccgtcatcttttggagacagctcgatcattgatgtatactatgaatgtacctaaattcttgtggagtgaggcagtaatgacagcaacttatcttatcaa

SEQ ID NO: 29354 - DNA, 682 bp, Oryza sativa
ccatcaatgtatatattgtaggggagagagaacagattaagtcagactaggttgtaaaattgaacattctaggggaaaataaatcttcgatgcatatgcaaagaacttgaccgttagccttttacgcaataatgtatgcataaacataggaaaaaaaaaggacctgcactactgattgttactgtatctgatctgcaaagtggcaacagagccatgttaatattgtgctgagaaatggacgaagttgatataggttcgtgctaataaatattcttacaatctgctatcttcctgtctgcaggaaaagtcacttaaaaaccagaataatgttctgcaaaaggtaaatttcattcttgtttacaacaatgttttatatcagatcactacaaaagctgtattggaggtcaaacccttttgtctacattcttcggagcagctcatggagacagaaaaggagaaaaacaatgtataataaacactacccgggaggagcaaaatggagcaacaccaagcacatcatcaccaacaccagtgacggctccagatcccatcccgacaacaaataacaggtaccgcttttacttccatatattttgcccccgcactccccataaataaaacaaaaaaatttttgttcttcagcaaatttttattatatatttttggggatcctctagagtcg

SEQ ID NO: 29355 - DNA, 661 bp, Oryza sativa
ggcgaattcgagctcggtacccgatccttcaataaagttctacaattaagtgagaagcagcactgagaggatgcccgtttcgtttacccgagtaattaagggggtgtttgggagacttcagcccctctctcaaaaacataagtttctaggatatggacttatggttttgagtttagccccatgtgaggctgctagggaaagtagcacacgaattgtggtcaatctagcaacaggtgagtaagtatcaaagaaatcttcgccttctttctgagtatagcccttagcaacaagtcgagccttgtacttttcaatagtaccgtcaggcctaagcttcttcttgaacacccacttgcaccccacaggtttacacccatagggtcgctctgttacctcccaagtcccgttagcgataatggaatccatttcactacggacagcctccttccagtagtctgcatcaggagatgcatatgcttctgaaattgacttaggagtgtcatccacgaggtacacagtgaaatcatcaccaaaagacttagccgtcctttgtctcttactccttcgaggagcttcactgacatcctcctcagagacaagttcatgtgtatgttcagtttgttctggtggtgtgattgaactgggaattatttcagagggttgg

SEQ ID NO: 29356 - DNA, 645 bp, Oryza sativa
ttttgagagaactaggaaatatgacttgaagatgaacccgacaaagtgtgctttcggtgtatcggctggccagtttttgggatttcttgttcatgagagggggattgaggtaactcaaaggagtgttaatgcaatcaagaaaattcagcctccagagaataagacagaattgtaggagatgatcggcaagataaattttgttagaaggtttatttctaatttatctggaaggttagaaccttttacaccattgttaagattgaaagctgatcaaaagtttacttggggagcagagcaacagaaggctttggatagtattaaggaatatcttagatctcctccagttttgatccctccccaaaaggggataccttttaggttatatttatcagccggtgagaagttaatcggctcagttttaattcacgagcttgaaggaaaagagagggttgtgttttatttaagtcgtcggctcttggatgcagaaacaagatattcccctgtggagaagttgtgcttgtgcttatatttttcttgtacaaggttaaggcattatctattgtccaacgaatgcactgtcatatgcaaagccgatgtcggtaagtacatgttatcggctccatttttgaaaggaaggtttgaaaa

SEQ ID NO: 29357 - DNA, 661 bp, Oryza sativa
catactcaacaagccacacagcaaatatgcaagtgcacaaggataccaaaggatggcataatataggctcatttgcgaaagcagcatttagcaaagagttaagagtagtaaaacagtagagtaattaattaaaaattttaatcaacactgaacagcacacccatgctgtacaggcccaaccatcctgaacaaccatactcggctgtacagatctaactccaaaccaggagctaagcaaattattatcaggtattaacatccataattattgtgagaggtgtgagactaatcacgaaaaacattgctcaacccgcccataaccgcgggcacggctattcgaatagttttactctggccagaggtgtaccactgtacccacaagacacaaccccacatcatgtcaccatgtgcctcaataccaccacggtacctcggaaaggagttgtgacaataccccttgcacaacataatccattacagcgcacctttcctggatcataatcaccccctcaaaaaccagaggcatggactccccagcgacccccgtggacttctcgccacttctcagtctggcgcactataatgaatcacgctatacaaaagataaagccgttgcccacgcttggcttgtggttggcacgataaatgtctcccaacagta

SEQ ID NO: 29358 - DNA, 1170 bp, Oryza sativa
ccacatgacattgtgaaagaatgcaacatttaatagaaatgcagggtgtttgttaattgggtacaatatgatcaaatgtaaagcatgacttgccttgctctcgaactgatgagacctcagcaacgtcttcgagaaaccgcggatcgacgaaacggccgaaacccacgcgacaaacaaagcacacaagcaaaacatgctataagactactgaaacaggaaacaaaaccatttttaatggattctttgcatttttcttgatttactgagacttgaatggacttaaacggagctcggatgaattacttatgaattttagaagataaactgtgtttttactaataaagaaaaagtccttaattaattattgcgcaataatacccagggctgacgtcatccaaggggggcgccgacaggtggggcccatgggtcagcggctcaaaggggagaggaagggggcgccggcatgtgggccccacgggcagtggctcaaggtggccggtctaccgtagaccgggaccacgcgggtggtccaccgccggtccacgggaccgacggtccggatcggccgggaggccgatcggacggcacggcagcggctaggcacggcttcaaaaccgaccggccggccatggcaaccggctgtgacgcgcacggtcgccggcgacggcaatcggcggcgcgggaagcaacggcggacggggtacaggacggcggcgtcgaccgaaggtgacggcgagcgcgtggagagaggcggcgcaaacgagagagaggggaagagggaggaggggaggatcctcaccggcgagtatggcggccggggcggaggatgaaggtggcggcgacgacctggcgatgaggaggggcggacgggtggcggcggcacctacggagggtgttgagaaggattaggagtagagagagtgaccacggcggccaccattgttggccggagacgaaggagaatggatagctcaccggcgtgcgaggagaaccgggctccggtggggtttagcggaaatcgagcggcggccgaggtggctcacgcggcggcaatgctaatggcggcggcggcttggcgcggcggcggctctagcggctgcggcgcgcgaccggaggtggcggcaagcggcggcgctagtggcgaacggcgcgcgaccggtaggaggcacg

SEQ ID NO: 29359 - DNA, 7938 bp, Oryza sativa
cgggaaaccctggaagaattcctcgtacttatcacaagccagcgtgggcaacggctgggcttgtagtgtagctttcctctaactgatgcatccaggcaagggtgggcgtgatggagattggatgggccctgcgacggcctatgcggcttccggattcatctaggcatgagaggggactgcccgctgccttgcgaggagtgggggtgaaacctgaggtgtggtgtgcttggttagagggggttatgcgaagggtcctgtcacggcctctttccggtatgtcgtggtggcatgtcggcgcacggaaacgtgtcgtggggctgtgtcttgtgggtccagttgtacacctctgatcagagtaaaactattcgaatagccatgcccgcggttatgggcggtcaaccagattcgctgtgattagtttcaccctagtctagtctaatggaattgaatagtataggtggatggttgggcctgttgcaatgtggtgtagcgttggacagtggatgtttaatattgattaattattacaaatgttttactgtttccaactactgtttataaatgctcgctttatgcaaatgaaccactatagctatccctcgatacttccctgcatcatacccctattccggtatgacgtgctgagtacagtgggtagtactcagtcttgctctatttttcccaaaccccagagtttgagtatgcgtcagatggtggcttctccgaggagtaggcttcgtccgtgccgtcgagaatgcctgtggagtggggatcccgctgcggtgcaagtcaaggcttagccccatttatcttttaattttccactgcatttatgtaagacttttataatgtttgtaagacgtggatctgtatgtcaactttgttgtttctgttccccggccggtcctggacgagaattttaatgcacattctgcttggaattctattcgagaatttctgggcgtgacaacaatgctggaggattgtttcaaatattacaagggatgtcaagattgtcaaaaatttggagcgattcaaagggcacaggcatcggctatgaatcctattattaaaccatggccatttagaggttggggaattgatatgatcggtatgattaatccgccatcaagcaaagggcataagtttatattggtggcaaccgattattttaccaagtgggtagaagcgattcctttgaagaaggttgattctggggatgctatacaatttgttcaagagcatataatttatcgatttggtattccccaagccattacaaccgatcaaggttcaatcttcgtgtccgatgagtttgttcagtttgccgaaagcatgagtatcaaattgttgaattcttcaccatattatgcacaagctaatgggcaagccgaggcatctaacaagagtttgatcaaattgattaagagaaagatttttgattatcctcggcagtggcatactcgattggccgaagcgttgtggtcttatcggatggcttgtcgtggattgatccaagtccctccttataagcttgtttatggacatgaggctgttttaccatgggaagttagaatcggctcaagaagaacggagttgcaaaatgatttgacagccgatgaatattataatctcatagccgatgaaagggaagacttggttcaatctagattgcgagcccttgcaaaggttaccaaggataaggaacgagttgctcaacattacaacaagaagggggtgcccaagactttttcggatggtgaacttgtatagaagttgattttgccgattgggactcaggatagtaaatttggcaagtggtcaccgaattgggaaggaccgttccaaatctataaggttgtatctaggggatcttacatgttgcaaggactcgatggagaagtttatggacgagcgctaaatgtaaaatatttgaagaaatattactcaagtgtttgggttaatgcatgatcggctggtgttgccgatacattatagccgatgtattcacatcgccttgagatggccgatgttatatcgcccttagttggtttcatattgtaatcggatatggtttgccgatgtacaatggctgatattgctatatcgcccttagtacaaattataattttatcaatgcttttgacattgtaaaattaggggggcacatatatgaaaaattgcaaatttttgagcaaaaaatatggagttatattgaatcggcataaaggttatcaagatgagttagataaagagctagagtttcttagccgattacaaaatttcctaagatctattacacaagatatcactgagacaagtagcgctggatagccgatatagctctttgcctaatttgttctacttcttcaatggcttgggcatcttgagcatcggtttcagagatgaatcttagggacttggtcatatcagcgacattcttgatagccgatttcagccttgccttttgttcttcgacagattgtgggagatcgactagcttcttgtgttccagatccagatcggcattgcattcttggagttgtgccaagagctcaatcttccgagcttcaagccgatcaatattagacctgatcgggccttcagatagttgatcaagtttggacttttcttcatgcacgagttgccgattggcttggatggtagcttcaatctctttgcgttctcggcgttcggctagtttctgcttggctttctccagcttgaattgatgctgttcaagataagtagctggagtaaggacattggctagttcttcaggaattagagcttgaacttcgtgtagccgggtcctaattgatccacagtcgaccaccaagctgcctagagaagatgcctctagccgatgagagatatcttcaagagttttcttcacatcatcggataagggggctaaggctttgcttgtggtatcctcttctgtctcatcaaagtagtccttgatgtcaatagagaatagatcggctaagacccgtaagaacaatttcaagagagttaggagctaaatagacatagccgatctaagttcttgtatcaaagggaaacttactgggatagcaggagcggctggttgttcttcttcctcaacgcggtgactccctatagccgatggagtttggtcactggatgattgctgtacagggggagaaggaggaggaggctaaaaagagacaagtattagataagatcggatgagatcaactgctgaaagaattaagaacatcttattggtggagccggtttgagagttggtgctgccgatttcttcttaacagcaattctctttttctgcaaagacaagattaataagtaatcggctgaagataaaatggttataaaagggaatcagggaatggtacttaccctcgagaaatgagctggggcagaaggagttgaaggggtttgattgggtgaagccgatggtgttttatctgtatcacttacttcggctgcggcttgatcaacatcttctccgatttcctcttcatccaaagcttgttcaatggatggatcaagggcaggcagatcatcggttggcttgggtttctgttttttggccttcttcttgagagccagaaccgatggatcaattgctggcactttggttttccttttcctgcctgcatcggctggttctctcatctgcccttggagcagacttacggtcttaggggcatgatagccgataactggaggggttagtccaccaccattgggcaataagcctggggtatactatatatctctgccactgttgctttggtgtggatgggaagattctgttgtctgtaggataaagggaaaagttggtttaagattcaagttggttaacaagttatgcaaatgaaataagcaaagtaaggatgtacctgagggacaacatcagggaatagatctgtcatatacatagaggccgactgatggaatagatgctgcttccattctccccaccatctatcaaaatttctgctcctgaatcttgctagttctatattctcaatgctgcccaagggaggaccttggatgttgagtagccgatccatcatcagggttgatgaaatttctccgcggcattgaattttgtcagcaaagaacaagccgatggggagttggcaaattccaaattgcctggccgaattctttgggtgatagaattcataggagacttgaatgtttctcccttgatgaataccgacaggaagaatgcatgggctgattgcagctgagaagacttctctagacttttggaatctctcatgattgatgtctttgaatctaaagtccaatgggagatccaaatgcactgagtcttcataaggaaaccaaactcgagcatctttctgaaaaccttcatagaagctgcagaaccaatccttgagcaattcggctcttaattttgctcctgcatcggctggtgtggatgcatattctccatatgacatgcatctgcgatgggtgcggtcttctttatcatcttctacaatcggctccagtcttgggaattcggcttctgtcacaaatggccgattgacgactgtcatgaccatcaggttgagccaagactgtagcagccaccatggtccacctgctccaaccactgagccgacgactatcttggccgatgcattgttcagcatttggtataagtagccgaggaggatcttgcctagaggaaattctctttttgattccagagcctcggctgcaaactggcagttggttgtacgaccacaactagatccacagaaaaggaacttttctagccacatgagcaaaaaggccacatgttctcgaggagtaacagatccttggcccatatatgccgccacataaccagaccaaccacctatgctcttggtcctaaagtcgtattgattattggtgttcagactcatagggttagccgatgaggtcacatctagaccaatgatcatggtgatatcaatcagagttggggtcatcggaccttggttgaacagaaaagcgttgatggtattggaccagaagtacgtggcggcagccattaagggttcatccttagccgaatttgctatggtgagggcgagtgcttggccgattccaatctcgtcctagtgagtttgcttgttagccgatacacgcttgtaccatgtggtccagcttttctcaggggaagttttttctagagatggccaagacttgaaggtgttcttccaatgacctagattagggttggccaatctgaaagggattctattggtttcgccaatgatgaaattagtgggtcgacatcgccgatcggaccaaggaaataatgtctctcgtgcgatagacttgggattgtgaccagattggaaagatgctaataatccaaaagggacagaggagaagaaaacaagatgagatgggcacatacatcagcatattcgactgatggcgcggcagacaggctggcggaggtcgacatcgctgcaggcggaaatttggacggagaagagatcgcctggaaatcgctttgtgcatcgagggggtcgccggagagagagaggacggagtttgcttcggcagtgaaaatggaggaaacggtgtgagatttctcggggacaacggttagtatttaaagcgctgaataacagtcggaaaatggcaagcacgatattctctcggagtcgacgtatgacaaatccgaaacattatccaatattccggacttggggggcatgtgttaacgaccaaatttggtaatccaaggatcggatgtgaaggaggaatcgagacggagttcaagatagagattgtcccagaaacagagtaaggatcggctaaggtccgaatcggctacgaccaagatcggcagagttcgagtcggacgggattagccgattgagccaagtccgacaatatgacacaacacacgttcaatacaatctcggcgcatcaccaccctttttattttcgttttgtttcgacgagttcttgctttcgggttgagctgcaacggttacgatcttcaagaagaggtaaaacttgttatggcggcttgcgttctcgagattagtgcttccatcttcatgacactctaatcttgtttatgtaattcgtcgagttatcatatatcttacataatctctggcaatatcgctatctaacctacaatcggctaacatctgtcagtagaaggcagccgattaggttaaatatcgatattgacttagattatataagatatccatcactctatgacacatccaacggcttgattgtctagatgttgtccttcttttcatacttatagctgcatcagttgagtttgatcttatgagtcgtgattagaatctcaaatctctagcctgtctttggttgccgattagggtagtatcggagtttcagctgatcttacctaacttaactatattcatcttatatgctttactgatatgttaaatctgccctttatgttaagatcttgttgcgttaaaagtatattaggctttctgtttgatatattctacttgcattaatatcttaatatagagtggtatcggagtattagccgatacatgctagatctatctgatcggctatgctatgtacatatatagtctcattattaatatatatttcgatttaagtgatttatactatctcggcatagcgaccgatctatcccaatcacaaggattgcgtattgttaatatctacagccgatcgagtagatttagtatatccgacataaggattgtgtattgttaatatctacagccgatcgagtagatttaattctgtcttacttattaatgactgccgatcgatgcatatatgacatcggctcaaagataaatgatatgtcatcggcatttagccgatcggcgtttatggatttaatcgcggtttctttgtctttgtttcttattgattgcaggatcaaattaattggcacgctcacacacccaaaggcaagttttggacctgcactagagttaagcagatctcccaggcctcgtgtttttacatcaacaaaacccaaattcatccctacagccccacatccatacagcacattcgcattcatatttcacattcacatccacattctacattccacattccacatccacatcacatttcacattcacatttcacaattcacattcacattcacattcacattcatcacaacaaataaaaacctacaagccattcatcacaacatataaaaacctacaagcctaagtcaaaattcgtaaatccaaactcaaaatatatatcctaaacatttgcatataaatcctaaacatttgcatatatatcctaactcaaaatatgcgtagtttaaaattcctaagtcaaaagattgtaagtctaaatttttaggtcgaaaaattcctatgtctagattatgaacattaatatgaaaaattcctaagtctgcaatatttaagaattcataagtgcaaaaatataaatgcgattgtattttacctccaacatggggtgagcctatgattttaagagtttctcatcctcaagtcatcgagcatgtaatagaaaacatagaatagaatccataataatagcaaatattcaaatgcattacacataaagtacacttccatagttcatgcataaacactaattaaatacatttttttcacataaatctagctagtaggtttttttttcctaggagctaatttcttcgcggcttggtgccgagggggaggggcagaagattgcactcgttgtggggccttgttgatgttgtattcgccacgacatgatgacggatgaacccgcaaaactcgtcagtgagagctttgaagacgtgtggtagaatttcacttgtatcgagacccaatttctgcaacgcaaggatggaagcacgtagaaatttacttagtacttaaatagaattgctcaatgttatgacttaggtct

SEQ ID NO: 29360 - DNA, 1599 bp, Oryza sativa
tcaaaagattgtaagtctaaatttttaggtcgaaaaattcctatgtctagattatgaacattaatatgaaaaattcctaagtctgcaatatttaaaaattcataagtgcaaaaatataaatgcgattgtattttacctccaacatggggtgagcctatgattttaagagtttctcatcctcaagtcatcgagcatgtaatagaaaacatagaatagaatccataataatagcaaatattcaaatgcattacacataaagtacacttccatagttcatgcataaacactaattaaatacatttttttcacataaatctagctagtaggtttttttttcctaggagctaatttcttcgcggcttggtgccgagggggaggggcagaagattgcactcgttgtggggccttgttgatgttgtattcgccacgacatgatgacggatgaacccgcaaaactcgtcagtgagagctttgaagacgtgtggtagaatttcacttgtatcgagacccaatttctgcaacgcaaggatggaagcacgtagaaatttacttagtacttaaatagaattgctcaatgttatgacttaggtacctgaagcatgtcatacctcagcattgcggtgattgtatccatcctctacaaaatatagcatgtaccgcatgacgtagaatccacagaggtcgatggcctctggttgacgaaggatatatttatgttcgaagatccgaaattcagttgcatcaatcttgcatctcccatacgatcttccggacctacagtacttcttatatgccctatttagtgcactgaaaatagtttggtacttgtctatccctctcctcaggctatcatatatgcaaattgaactatcgtcgatgttgattacgaggaggatccaatgatggctacacatagtgacaatttatcaataacttgatatgggtcgaggggcaaacataactggaaatcgatgatagtgacttactgagaaaggtaaggaaataaaatgtggtcacatccattaagtttggcgagggcatcaaagagatagcggtcaatttcagcttcggatgtgcattgcttgtcaaagtttacaacggctgggtctagaaaagctatcttatggttcatggatctaacctgataagagcaatgcccgcaaaaggagaacacagttgagaattactgagtacgtagaatgctatggattaagaacgacaagatatcaaaggactcaaaatgaccacaattgcaggaggcagatatcgaattcccttctttggtacaactggaagagttccttaaattctacaaagcatgtattactggggtggtgaaaatccacatcagtgtagtaggcaccgaacatcccgacccccttttttggcctcctccaaataccattcatgcagccaatgcgcttgagttcctaaggattcaatttccgtgtcaagcaccatcggttgaccaagttggaatcgcagtacaatcggggcctcttcaagttcatctagattgtctaggcttttcaaaccagctgacttgcagaaatcaacttccttggacgctttctcttcaaggtacaactccctactgag

SEQ ID NO: 29361 - DNA, 3090 bp, Oryza sativa
accaaaaagtgaagtgatgctggcattgattgtcttcttaggcagcgatgttgttggctttgacactaagtatgaattggaatgtgtgagtcactatttgcttgatggaacagacatctgtgatgcacttggtgttcgggtcttttttctgagtgggggtggacttgtggacttctccggacgatgtggttcattaggtgtgttttcacgaggtggactgaaggtcctctgtcgaggcggagaaggagctagatttgcacctcgtccgtttgaagggctggaagcaccgtcgcctggatcccctgccccatcgttcaacgtgataacgatgtagcgtttgggccatatgatcaggttgtgaagagcagcgcccagagtgtcaaccccttcctccggaggaaactgtagcacataacctctgtattggcttggcacgtcttccacttcaacccttgagtggcctacaggcaatggaacaccatgtattgtttgccctgcacatattggatgtgccacaccgcgtgcaatctcctgagtaatgttgctttgaagagggacatggagcacgcacggcatatgtgttgttatgtcgtccacaacataacgtgatgtgtcctgttctggaggggggttatccgcggacgcgcaagtgctccgtttggcacctgggttaaccacttggtcaccagcttgcccctgttgtcttggtaacccattgggaaacagcactgcaagttgttcctttacctgacgggccacctctaatctcatacgtttggcctcctcttctctcatgggtcttcttggatgggcccgatacatgtgtgcatcatctgggaacccttcctttcatggaacggaaccaacgcctctcgtgcgtccagggtgctctttcatccccagtgccaatgtgaactcatctttttctcttactggcacatatttaccctgtctcgccaaggaaacagcctcggtgatcttttctttcagctcttgctatcgaggtcccagtgcaaccaactcccctgaatccgatagttgagccttcctggcgtacgcgtagtgctttgtccgggtcccccatccatctatctcaacaactatacctgcttggcacagttgttcctccttctcttcccatttggggatattcttagcatatctgctcggcccaagtcggtgaggaagcttgttcaacgcggagttggccttgtttagggtgctcacttctcttgcctcttgagatgttttccagttcacaaactcatcccattaatctgtcaacttctgatacctgggtttctcaaaatccagggtccggttgcgttggaccaacttcgcgttcaagtcagtcctccactttctgaataatgtgctcatcttcgataaggctcccttctttgctagctcttcttggccttttggaaaggtgaatgtcagcttcaactttcgccaacattcttccttcaggttatgtggcaccgtccagtcgagttgtgttacatcatttgttttccaatgtctatacttgatgggaatgaaatccttgacgatacatccacacgccctaccatagggagttactgccgtcgatggttcgtgtggccacccagtttcagtgagcactgtcacaacgtagtgaccatccggcatcgagctaggacccctaggctacctcccatatgagacggttgaatcctggcccgaaccaccagtggaagtgccaacctccttggaaattgcaaattcgattagttcgaatggtccattagagttggaatttgctaatgcactattgcgtgaaatatacgtcgaaattacctcgctgccttcggaatgctcttgatttaagtttaagaatgcgctagggctggcattatgttcaccctcagatccggagctagcgaattcttcgtgttccatctagtcatcatcgagcataataacattactaatgttgaaaaataacatggtctaaaggtgtaagatattttgtgctctcggaactgctacaagcacaaaacaggaatatatttgctctcagatggcgggttgccaacttaatggcctcctcgccaaaatatggcaggctgccaattgcacggcctccatgccatggtgtactaggtcgtcatcgattatgtgtggcagtataaacagagacgagaataaagggcaattcaaaaatagtgaacaaaagagaataagggagagagcgtgtggataagagagatagagggtgaagtgggtaagtggttggccgggtaattaaatagtaggagataggtgccggttttataccctaatccggcacaattcacaaatcacacaaataaatgaaatactgccacacataatctcccatcatatgaatttcatcatcgagcagcaagttatattcacatggggagtttggaaagattgggtaaatgttcagatgtgcattccaagatatacttttcctttaccaaacaagaaatgaggatgatggatcatggaaacagaacctaagggcatgaacatattaatactagtaatataacctaagtaagcaagtaagcaacctaagtaagcaacattttaaatcagcagcagcataaaaaaaagctattagcaatccagggagcatgctcatataagtattggctcacacgaaaaactgtactcttatcataataccatagatctgatcaactgtatgagatcatacaaaatactggtaatatgtaagacggatgctctcctagtgtcctgacaaaaaattgcaggccagcattgttacagaacaaagtggccttaactttagtgagtttatgattaaaatttagacaattctgatcaactaggcaaaattttaaatttgaaacaataggaaaataagtgtactctccatctccatcccaaaatatagtaacagattagacactgcctattactacattacaatagcgtgtcgattcagtaaataggcaactgcatcaaaaatcaccctgggaaaccatgctaggccatgcacagtgagaaacgactgtcctaaaatattaatatttagcataatcgacagatgtagtattgtatccaggtattagt

SEQ ID NO: 29362 - DNA, 1735 bp, Oryza sativa
ttcggcacatttgactattggaacaattttttttcttaaaaaaattacgggcaaaaacatcattcaattttttttataataagtagagataagcgtgttatataaatgtaactttatacagtattaattataaattacaatttctttcttaaatttaagtttcactataaaataggcctattacttaatatgttcaaaaaagagtataaagggcaaaaaaaaagaaattaaatattagaccgcacaaaatatgttccaagtttttgctgatttaaatcaaatggttgccatacaaatccgtagaatgaagttagaaattaattcaaaccctaactactatcccttccgcatgatcggaccgtacatacaacgcttggtcattctcttcagcagttgcctcgttttccgtctcgatatcaattgtgggtagcggtggctcatcgggctgatcgtagtcatcttcgtcaatgatattctccattccgacaatacttcgcttgccttctaatacaacatgacatggcctcatgagtgatgggtccttaatatagaatatttacttaacggactttgcaagcacgaatggttcatcttcgtagccaacatcattgaggtcaacgatgatcgttccatgcttgtcaatcttcaaaccccttggaattttgacccatttgcattggaatagagggactttgagggctccgtaatctaactcctagattgactctatgaaaccgtaataagtctgcttattgccgcctcatcgtaggcatcgatgcgcacagcactgttttgatttgtactcttgttgtcctgagtcttggtgtaaaaggtatacccgttcatatcatagccctggtacatgtggattgtgttggatggcccccgagataatgaaaaaagggcaccatcgatgtctgcagttgtcaggtactccatcaaccatttcccgaattgaagtttatgcatcttcgcaagccatgctgctcctttcctgggattgtctctgcggagtacatccaagtgcatgtgcacgtacggagacaccaaagctgactgtcgtaacactgcaaaatgggcgtgtcttatggtttgtcgatcaggggtgaaaattctcctgtgacctaatgttccctttccaagcatcctaccctcatgacgaggcacaggaacaccgataggttgtagatccatgtaatctatacagaattcgaccacctcctctattgcataactgtcacacccagaaattctcgaaccagaatttctaagctgaatgtgcattaaatccctgtccaggaccagccagggtacacaaatgacaattgttgacatacagacccacgtcttacaaaaatataaaagattacaaatgcagcgggaaagattaaagcgagctaaaccgggaagcttgacttcagcagcgggcgacgccactccacaggcaaaccttgacggcagcgacgaaaccaacctctctgagacggctctaactaagaagaacttcaactctggtgtgggggaaaagagagcaagactgagtactacccactgtactcagcaagtcataccggaagaggaggtatgatgcaggatataaccaaaggaagctaggggttcttttgcataaagcaggcatttcaaagcagtagttgaaagcagtaaaacagctgtagtaattaatcaatattaaccaatcactgtccaacgctacaccacgttgcaacaggcccaa

SEQ ID NO: 29363 - DNA, 1406 bp, Oryza sativa
acgagggtgagtatcgttgggtttgtctcgtcgtcctctacgtgttcatgtcctccaaatccgcagccggtcgctctatctccggcgaggtcgccatcttggtccggccattgatgatgtcatcatgacgtcatcatcttctccttttccagttttttctaatagattaaatcttcggaaattcataactaaatcatcgtaactcggttttgagtggttcaagttgctaaattcatctaaaatcatgatctacatgtttgtttactttatatgtactgtttatttggtttttattagtctttttcttcgttttgcgtgttagcttgtcgtttccgtcgttgcgaaggttcgtgagtgcgtcggaagtgatcaagaagattacttgaagaccgattattgcaaggcaagtcacacagatcctaaacacaatcctttgagcatgttgatcctatatttaaattctctatttatttcaactgtgcatttattttcgaatgtcaccgggtggtgtgaacttattcctttgttatggccaatttgcattgattactttattccttgataccttgggttattataacttgactagttgggctttatatattggttcagctagatattagttatgattgcttagccatgcttagaaacattagcacactattgggataacttatgactcactattatttaaggatggcttaatgatagttcacgatggttaatcgtgattggttaattaattacttgccaactaaaacttgataatggtgggttgtgagcacatggttttgagagtcgtgctcatgacaattaaggaccggttcgcgagctactgttgtgagacatttatcgtgccaaccacaagccagcgtgggcaacggctttatcttttgtatagcgtgattcattatagtgcgccagactgagaagtggcgagaagtccacgggggtcgctggggagtccatgcctctggtttttgagggggtgattatgatccaggaaaggtgcgctgtaatggattatgttgtgcaaggggtattgtcacaactcctttccgaggtaccgtggtggtattgaggcacatggtgacatgatgtggggttgtgtcttgtgggtacagtggtacacctctggccagagtaaaactattcgaatagccgtgcccgcggttatgggcgggttgagcaatgtttttcgtgattagtctcacacctctcacaataattatggatgttaatacctgataataatttgcttagctcctggtttggagttagatctgtacagccgagtatggttgttcaggatggttgggcctgtacagcatgggtgtgctgttcagtgttgattaaaatttttaattaattactctactgttttactactcttaactctttgctaa

SEQ ID NO: 29364 - DNA, 747 bp, Oryza sativa
aaataagggtaacgccttctctcccagcctcgatatgaaccgacttagggcggccatgcaatcggtgacgcattgcacatccctaagtttgctggggggggcgcatccgctctatagcccgtatcttctcggggttggcctcaatgcctcgggcagagaccaagaacccgagaagcttgcccgcatgtacaccgaacacacacttatcggggtttagttttatgcgggcggagcggagactctcaaaagtttccgctagatctgagagtaacatttcctggttgcgcgtctttacaaccaagtcatcgacataagcctcaacattacgtcctaattggctacccaaagaaattcgagtagtacgttgaaaagtaggacctgcattctttaacccgaagggcattgtcgtataacaataggttcctatgggggtaatgaacgcagttttttcctcatcctccctagccatgcgaatctgatggtaaccagagtatgcatctagaaaacacaaaaggtcgcaccccgcagtggagtcgacaatctgatctatgcgaggcagggggtaaggatccttaggacatgccttgttaaggtcggtgtagtcgatgcacatccgaagcttgccgttcgccttgggaacgaccaccgggttcgccagccactctggatggatgacctcacggatgaatccggcctccagaagtcgtgccacctcctcgcggatgaaggcttgacgttccggggcct

SEQ ID NO: 29365 - DNA, 6321 bp, Oryza sativa
tgggagaaaccaccatcgcaatctgccctccccgggcaacgcacggtgggtggtcggtctggtcgaaggtgagggcaacctccgaccaccgcgcccgacacgtcgcctcatgagtaggggccgcggccagaagctctcgcttcatggccttgaagctccggcgagaaacgtgagcacacgctcccccatcgacggttgcaatggtggccccaggctcttggaaacctaggtcatcatcgccgtcatcgatgtcctcggcgggggccttctgcttggcctcacttcgccgattaccggaaggaaccgccggggatttgccctctcggcgctcctgcctcctcttctcctcccacttcctcgtccgctcagccaaacttttgactgcacggcagtccgcgaggtcgtgaagggaagtgttgtggacggtgcaccacttgccggttgggcgctccctgttgggagcgccggcctcgttctttttgcctcccgcaggcctcccctttcgggtggcccgcgaagcgccctcgacggcgaggacatgaccgtcgtcgtcggtatgggctgacctcttcttcctcctcctgtcacgccgccctatctgagcggcggatccgggggcggccgaagctgccacaccggaaccggaggggttccaggtccatgcctcctccttacgagccactcggtccgcgagctgaaaaagctccgcggtagtctggggctctttggaggcgatcttttcgagcatgcggttgtgccgcacaccccccctgaacgcgtaaatcaccgcgtgtgcagggatgcatggtatggtgttgcggacttgacagaaccgctgaatgtacgagcgaagtgactcatcatcccttcgctgtactgcgtgcaagtccgcttcctcacctgggcgcggatatgtgccttggaagttcatggtgaactgttggcacaaatcctcccaagagtggacagacgcgggtggcaagttcattagccaaccccgcgcctgtcctttcagggccatgggaaagaaattcgccatgaccgtgtcgtcacccccggcggcctcgatcccggtcgtgtagacctggagaaactcggcggggttgacgctcccgtcatatttttcggcgatggtgggccggaaccttgggggccaacggacattccgaaggctcgccacaaaggctctacagccgacaccaacaaccgggggcacggagggctgatccccgcgtccgtggtgaggtgacactccggacgaggaggcgccctccgttgcgtggggagcacgtcggccattacgccggcgctcgatactgatgcgggcatccggttccccacgcagatctttccgggtcggaggcgttgacgaaggagtggcggccgaatggcgaacagcggctgccgctcgccgcgccctccgtcttgacgacgcggagccggtggtagcagcaccagaggccttggtggcggaggaccgcccaccagcatctaggcgctgccgtgcagtcatgatcaatttggccacatcgtccagccaacgttgggctggagactccgggtcatgggcgacgggcgggtgacgtaggagcgcgcccgcagcttggagcgcgccctggggcgtgctgccatcgccgtagacgaggaggcgacgctccccatctcgccgcccttctccacctcctgtgggtgtcgaagtcgcggatccttcggccctctcgagcgccttctcccgcataggactttggcgtggagggggcggtggagtacgagctcgacggcgtgggtttggctccccgtcgtcaccgctcatactcggggagaggtcgtgcgcctttgctggctcggccattgggctgaacaggaaaagcttggcgcacacgaaagagtgcgagagctcagaaaatccctcgcagagtcccctacctggcgcgccagatgacggagcgtggggctcctcactgggagaccgcacaggcccccctttgccagttcggccggggactcagggtgagattctaagctctctgtatgtggaaggctcgcgagacaggaaacacacaagacacgggcgatgtatacaggttcgggccgctgagaagcgtaataccctactcctgtgttttgggagatctgtgtatgaaggagctacaaagtatgagccagcctctcccttgttctgggttccccatctggaaaagtccagtcccccctcccagtgggcaaggtcctccttttatatcttaaggggataccacatgcaccatttctctcttttttgtggggacttaccccaccttttcataaatggacggagatttgtatagttgccgtccgagtcaccatctgatgagacggcccacaactacctccactttcgccgggagcagatgcgacgtggaatcgtggctgtctgctgacgacatgaccggtgtcagaccagtcacgtcggtcattcttgtccaccacgtgtcagcttagcaatctacatgttcgcccttcttcacacaacatcttgcctgtaatggttaggatgaagcctggcatatatctgactaggactaacgtgccatctctgggaggtaacacgctagctccagctggggacgagcgcctagaagccctcgtcctgacgggatggggcgaggcgtgcgtcagatcgcctgtcgccaccaaacccgcgatctgaccagtctgtgactggtcacagaccggataaacgagtgcactgcactgcgttacatgcggcatgacgcgctcagccaaaccgcaataaatgtggttaggtgagccccattgtgctcacctaacccatacacgcggagcaaaaacccacgaggggtcggggcgcctcggccctcggggccgaggcgggtgcggcccgaccccctcggggggactaagaggagggcgaacacatcaccctcgggcccgacgtcctcgggggtgccaggccacgtgtgcgattgtgtctgcctcaaacctctagtcatgatactcctgatcccatgtcaccgacagacggcgtgaagatcagcgaaattgagccacaagaaaccttcctcggccatgaaagcatcaagtgatgttcaaacagctaatgacattaggcctttcttgttggcgtccgtgtaccatttatgtaatcttctcatctcccacggaccttcttcaagtgcataatccagccaaaaggctttgccattttcaaacactgccagacaatcatctgttccaaagtattttgggccggcaagttcaccggtcttcttctcatcaacatctctttccttggcacgttttttaccacctcagaaggcggttaccatccacttcaccttctgattatccttggacttggagttgtggcttttgaccagtttaggcacttcggacttgtcgatgacatagtcatcgaccgagggtgcgtccacgttgtcttttgcaggagatggatcctcatacacatctggttctatttcgacccattccaaacctgttgcgacttcgatttcggttctattgctggcataattgacaatattgctgatgtagatgccacttcagtgctcttaggttgctcatgttcttccaccttatcattcgatagttgtttttgaggaggtctcagtggtttcgacagagcattgttgccagtcccaaagagtatatctttatgtgctacaatactataatgtcaaccgcatccccaagtacggatatgccatcaggagtttggatgtccagatcgtatgactctaaccctttgttcaccacttgcaactgcactttcgcataatcatatggaatagtgttatcgtgataaattcttcaagggatatccattccaatcgcagccacaagggttcttccagctctaccatgtgggacgtattctctttcaagcctgttgacggtcgttatcgataagtttcgaccatcaatatagccaaaatagaggagaactagtgatgcttgcaatgcatatacatgttagaataataatattccactagtattaggttcactaaccttttgcagagaataaaaataaagtggaggagaatcgacatcaacatagatgataaatcaatcgggcgatgttgagaatcagacttatgtatgaatgggccaagaacttagaattgacacgacaaactgggccaaaattcacaagtttgcatagaagaacaacggaggaggccgctagccgaaattgggctggattgggccggccctagatttggccgaaccagggggttaggccgaaccctcatcagcgccatctgatccagggcttcgcctggacggtgtggattatcccccaatgacggttggagggtatttctgaccattccaaccatcacaatcgtcattgggaggctataaaaggagttgctcttctcacttcactcacacacctcaagcaatagctctctcatattctctcaagtttagtttagtagtatctagctagtggaataagaatagagtagaaatcaggagtccggaagccttcggaagagttcgggtatgactctagtagctttcctttcctcttttgtaagctttgtacttttattagaatactcttctttatacatttatggtattgaaatactttccgagtatatgaatgcctactttatattatgttcatgttatactgaatatactgctagcttatctgggagatgctttggtgcaggtataatgtttgtgtatgcaattactctatgtcatgacgatgatattagagtagtatctggtagtttagacgtggtgtctagattacaggatatcattatttggggttatatgctgcggatgagaggtgggccgctgatggcaatagctcagtacgggtattcctccgcgtgtgtatataatcctatgttaattcactggggagggtattcctccttatttagccccggttgtatggtcataatgggctgtcgtaaggaactcgacagtcaggggtggcttctcagagtaccaggagagcatcggatagagggtactagctagtatatcagataacaagaatgtatgtatactatatatattagaagtataggaatagattatctttctcttttctttccacttagcttagataatatattatgagaataagtagctaatgcttgtgtgtcactctacccttggattattctaacccctgcttagaatatgattatcacaagtaatatataaattattagtcaagttctctctacatgatcttcccacgggataaaataaatatgatacccttggaatactctcgggtgaattgctacaatggtatatccgtgcgcttgcggataaactctataaccataatataccataagtatttttgcgccattgctgggaattatatttctaataatgttgttaagaaataccaacaagcatttctagcgccgttgaaggggaagattcataacagagattaactgaactaatactttatatttacctctgtataaccttggttgttttcacttttgttgtgaaaacagggtcgtgcatgactggtttcaacttgccgggaaacttcaaggaaaatctagaagctttcatccggagcatcaggtcgcgagtcattgctccgcagaaaactctaccgacagagaaaccagttgtaccaacgccatcatccttcaagactatggctgacaagacccttcgcgagttcgctgctccctctgctgagaatgtggccatttggccacagatcaacatgggagacgtggatttcgacttgaagtccagcctcgttacgttggcacaggctagcccgttctgtggcaagcctaacgaggatgccaacgctcatctacagcagttcctggagatctgtagcacgtgcaccatgaagggcgtcggtcccgacgccgtcaggctaaggctgtttccgttctccctcctcgggagagtgaagcagtggttctacgccaatcatgctgctgtcaacacctaggacaaatgttctacggcattcctctcgaaattcttcccaacgggcaaaaccaatgcccttcatggacggattccagtttccagcagacaagggacgagtccattcgggaagcatgggaacgtctgcaggagtatgtggccgcatgtcctcatcatgggatggaagactgattaatcctgcagaacttttataatagactcaccccaatgtcccgccatcacatggtcgaggcagctggaggagcattcttctctaaaacggttcgaggaaccgttgatttaatagagaagatggtctccaatatgggttggagcgaggaacgactccag

SEQ ID NO: 29366 - DNA, 2611 bp, Oryza sativa
agatctatgtaccccgtgacatggtaggatagattccctcatatctatgtaccgccgtgtgcgttgccccttagatttcgcttggggtttttatatctatcttactttactgctgttgtatattggatatgacatggtaggatagattccctcagaaaaattaagtgtgatttatgctcttccagtaattgcacctaatacggttgtgatcataagtgatgggtttgtcatagcaaagtgtcactttttatcatgataaaataggatagatgtcggacatctatgtgcggagattattggtttacttgacaaggttattaaaacagttttggaccttggggcataggttgggttggacatggagatgtcaccccaacagcacaagagtcacatatgatgtgattagcaaggtgttgcttacctattttgatagttgtctagctatgatgccaaagctcactagacactaataaaatgaggatcttgactcactatgttactagagggaattttgtttcacaatacatagtggaagtatcttttgttaaattgtttaatgaaaggttaaatgtaaacatgatgctgattttgcatacatatatttctattgtagatcatggcagctcctgcatcatccaattttaacttgcggtctattcttgagaaagagaagttgactggaataaacttcatggattggtatcgcaacctgagaactgttctcaggcaagagcacaaagagtttgtgcttacagagccttttccagctaacttgcccaacaatgctcctgctgctcaacgtagggagcatgaaaagcgatgcaatgattatcttgatacaagctatctcatgcttgctactatgtcccctgagcttcaaaggaaatatgatgcattggatgctcatacgataatcacgagactacgtaacatgtttgaggaccaagcaagagctgagaggtttaatacctcaaagtccttggttgcgtgcaggctagcagaaggtaatccaatgagcccacatgtgatcaaaatgattggttacgccgagagtctggataagcttggttttccccttagccgagagttggttactgatttgattctccagtcgctacctcccagctttgagccgttcataatgaatttcaatatgaacaacctgaacaggaccttggcagaattgcatgggatgctaaagactgctgaggaaagcattaagaaaaactccaaccatgtgatagttgtgcataagcgcaagcccaacaacaagaaaagttgtcaaaagagaaagctaaactctgatgagatcacgagtactagcaactctaagaccaaggttcaaaagacagggcccgctaaggatgcagagtgcttcttttgcaaggagacaggtcattggaagagaaactgtaagaaatacctagagcagttcaagcagaagcagcaggatggaaagagttccacctcaggtattaatgttatagaaattaatcttgctacttcctctactgattcttaggtatttgataccgggtcagttgctcacatatgcaaatcgttgcaggggctgaaaagaagtaggagcttagcaagaggcgaagtggacaatgattgttcagtctattataatgacattttctatttccatgcacccatgatgaatggcttatacattgtgaatcttgatggatgttcagtctataacattaatgcaaaaaggcaacgtcctaatgatttgaatcccacttttatttggcattgtcgcttgggtcatataaatgagaaacgcatggagaagcttcatagagatggacttctacactcttttgattttaaatcatttgagacatgcgaatcttgtttacttggcaaaatgacaaaggcacctttcacgggtcaaagtgaaagggcaagtgaactattgggactagtacatactgatgtatgtggaccaatgagctcaactgccaaaggtggttttgggtactttattacctttaccgctgactttagtagatatggttatgtctacttaatgaggcataagtctgagtactttgaaaagttcaaggaatttcagaatgaggtacaaaatcatttgggcaagacaatcaagtatctacgatttgatcgtggtggaaagtacttgagcctagaatttggcaatcatctaaaggaatgtgcaattgttccacaactcactccgccaggaacgcctcagtggaatggggtgtctgaacggaggaatcgtacattgttggacatggtacgatcaatgatgagccaaactgatctgccgctaagcttttggggttacgctctagagacagttgcgttcacactaaacagggttccatcaaaatcagtggataagacaccatatgagatatggactgggaagcgtcccagtttgtctttcctaaagatttggggctgtgtggtctatgtaaaacgtttgcaatcagacaaactcacacctaaatcagataaatgcttctttgtgggatatcctaaggaaacgaaaggatattatttttataatcgggaagagggcaaagtgtttgtcgcccgacacggtgttttcttggaaaaagagtttatttcaaga

SEQ ID NO: 29367 - DNA, 6706 bp, Oryza sativa
cttgaatccgttaagacatcgttgaaaaatagtttttcaatgaaggacttaggggaagcaacatatattctgggcataaggatctatagagatagatcaaagaggctaattggattaagccagagtacatacattgaaaggtgttgaagatgttcaacatgcaagattctaagaaaggtttcttaccgatgtcacatggcattaatcttggcaagaatcagtgtgctcaaacgactgatgagcgaaacaagatgagtgtgattccatatgccttggcaatcagattcatcatgtatgctatgctatgtacacgtccagatgtttcatattcacttagtgcaacaagccgataccaatcagatccatgtgagagtcactggatagctgtaaagaatatcctgaagtacttgagaagaactaaggatatgttcctagtcaatggaggacaggaagagctcgttgtaaatggttacaccgacgcaagcttccaaactgacaaagatgattttagatcacagtctggatttgtgttctgcctgaatggaggcgctgtgagttggaagagttccaagcaagatacagtgtctaattatacaacagaagccgaatacattgcctcttctgaagcagcaaaggaggctgtttggataaagaaattcatttctcgactaggtgtggtgactagtgcttctagcccaatggacctctattgcgataatagtggtgccattgcgcaagccaaggagcctagatcgcatcaaaagtccaaacacattttacggcggtatcacctcattcgcgagatagtgggtagaggagatgtgaagatatgcaaaatacatacggatttgaatgttgcagatccgttgacaaagccactccctcagcctaagcatgaggcacacactagggcaatgggtatatgatacgttcatgattgactctagtgcaagtgagagactgttagtgatatgccctagaggcaattatagagatgattgtatcacatactttgtttacatatttatccaacattgttccttgaaatagataactccttattggttaatgaatatgtgattctttcatgagaatcattatgttgtttgttactatttctaaaggatccctgatcaaatatcatatgtggaacaaatatgtttatatgatcagcacatatattaattgatgatcatgtctcatggatcatggtatagagataccaaattaataatatggacacatgttggtgaacatgttgttggatagacccaacatgagacactgcaagagccatatgtgttgtgtcatcagtgatctcatttagtgttggtgttgaatccttagacctgagattatcatgcttctcaacatgtgtagtagcttacttagggactgctaaacgctactccgtaaatgggtagctataaaagtagttttcgggtatgctatgaaacatgttgtgggatatgaataatcaagatgggatttgcccctcctatggagagatatctctgggtccctcaatgttatagattatggaagtgcatggccatggcaaaggtgattgaggagtcaatcacaagttatataatctatcaagtggtaacgatctatgatctaatacttgcatggttcctggtttacgcgatagaaatttttgatttatgctatcttagcctacgcgtatcccaacatgcacatagtcaaggagacggaattacttgctgccaagcttgacctcctcatgaagcgcttagacgaccacgacaaacggcctcaagacactgtcaaggctctggactcacacgttacatgtgaggtctgcggcaacacgggtcactctaggaacgactgccgggaaacccgtgaggaggcgatgtatatgggcaacaacaacaacaacgggtatcgtccacaaggaggccaggggtggaaccaaccacgcctatattatcaagggggtaacaacaatggtaacttttctaaccaaccctccttgaaggatctcgtcattgcacaagctaaaaccactgatgcgctaaacaaaaagctcgctgccaatgacaagatccttgaaaatataaatgttaagctagatggtttgcttccgcttttcaaaaccaactgagctttaataaaatgatagaaacccacctagctcagttggcatctttagtccctgcaaaagaaactgggaggattccggggcaacccgactcctcccttgaaaatgttaaggcgatcacgacgatgggaggtaagtccactcgtgatccaccatatcctaaccctgcacgaactaacgggattacaaaagaagcgctatctagtgactcagctgacaaagaggtttagcaagaaaagaccatgccgcaggagtactacgacgcacggttgctgtcgtttcttcaacggagtaggaaaccgttagtagacgagcaattcgctcgttttgttgaagtaatccagaaaatccacataaacgtgctgttgttggatgctatgcaagtactaacatatgcccgttatctcaaggacatactcaacaacaagagaccactcccaacaacggaggtggttaagctgacggagcaatgcagcaacgtgatactccacaagctcccaaagaagaagaaagatccggggtgtcctgctcgatcggggtacagcagttcgaccaggccttatgcgatcttggagccagtgtcagcgtcatgccaaaagacgtctttgacaagctcaacttcacggtgttggcaccaacactgatgcgcctacaactagctgactcgttagtccgttacccagcagggatggcggtggatgtgccagtcaagatacgggatttcttcatcccggttgactttgtggtgctagacatggacacgggaaaagagatgtcgctcatcctggggcgcccattccttagcactacggaagccaacattgacgtgggagcgggaagtatccgttttcatattaacgggaaggaggaaaagtttgagtttcaaccaagggtcgaacaatgctccatggtcaggataaagtacgggccgaacccgcagaatattcaagtggtcgaagtggagccacccaagacggatagcctggtgaagttcatgcagaatttcctagagaaggaaacaacgatgcctaggaaccgttattggaggacgttgataaaaccaactataccggccaagaagtcagagcagtcggctgagaagaagccgccttctgcaccaaagccatggaaggtgtggagggaaaagccaaacacgcccgctccatcacctccagagacgggtggaaaatccacgaactgaatcagaaggaggtacagtcttgcacgtcggattttaaatgacgcgaccttcgccataggaaattggtatgtatctgcatttttgctttcaacaatttgaatttatgcatcaacacatgtttgaatttcaaaatttccatttaggattctttgagttttgaggaaaatcttcaaatgaatttttcagagcaaaccaaaataaaattttcaacgaaaattcactgtgccacgactgcactaaccgttggaatccaacggccgaaagtggtgccggttgggcccacgaggggttcgaccgaaccggccaggcaacagttacctaccatttttggctgggcaacggctattgggtcccacatgtcttttctgacagttgtgggtaccctataaaaaccagccggccgagagggaattccaccccatttcaatacattttcattccctctccaaagtttgttctcaagttcattcaagcttttatagttttcctcaaattcaaacactagttgcatatatacaagttgctttggtggaactaaccggtgggtgaaactcttgctattctaacccccgtcgggttagtctgttcttgctccattgtgcagaatgaggagccgattgtctcatctgtccaaggggtccggctcttcatcaagtcatcatgatgagtctagtactcattcatcagctgatgtctcgttggaagacgccgaagctccgcgacgactcctgaacgacaccgacctcgaccttgtctgtgatcgggagagaaaagcctactacatgctgagcaaccgggagtatgctcatacacgagaatactctccggagctgctgaaaaagatagatatggatgttgaatttcgtgctatttggaaagctgttggttggcagagatttgctgtggtagatgagcctggttctcgtttgcttactttgcaatttctatgcactttgaaagaaatagaagatggattttcctttcgctttttccgtaaggagtttacccttacatggaaaagcttaagcacacttcttggttttcacgattgctgtaaaatcgatctctagaaaggaatttctgggttcgagaaaaataggttttgggaagatatttctggtgctccaatttgcaagaaacctatgatgaatgatatccataatcctacacttaggctcatgcacaaatggattgctatgactttgtttcctagaggtgatcttagaccattaggggggatgaattgattatcatgtttgccatggttagaaagatcaaaattgctcctgtgaaatgtatgataagacaatggttagaaagtataaagttctctgctcctgttgagtgcacttctctgattactcagatagcaaaaggggtaggtgtcgttagcaacaaaattgcttttatctcagccgctcgtccgtgtatggatgagacctatctagtgcaagggcatattctgaagtatggagtggatggatctttgatttactttttccccggttgtacaaataaaatcccgttgccaaatgcagggtatcatttgtataactgacatgaactaaccattcccctgtagagcatagaagaatctcgtgcaagtggagcatacagggagacacgcaacatgacaaggaatgaacgggaaagttcatcatcctcaacactcgtgcagatgtatgaggcaggttgggaaccaactggggatgcacccggatggacccaagttccacgccacagcattagagtctcaagctgggcaagtgccagtgaggaccggtggcgtgtgcctcatgatatccaatggggggacaaccaacgtcttagatcaagtggtatgcctccatctccaagtgaatggcgctcgagttcttctcgatgggacttgggtgaaatcactaggagaatggatacccttgatgtgcagacgggggagatccagtacaacctcacggaacacatagctcaaacgtaagaatggcaacaatctgctgatgctcagtttgccaacatcaacaacatgatgcagcaacagcacgatgatgttcaagcgtacttccgctttcaggggttcaatccttatcaaggaccctgagggaaagccaagcttggggggagatatctctccccccactgaggtaacttgtatcacattgcatatttccctttccaattgcatatttccctttccaattacatatttgctttccaattgcatcttataaacttgaagacaacataaaaatttgcaaaatagaaaataccaaaaaaaaagataggataggtttgagttatgctaggtaagacaagctagttctctttgttgaaatgatgaagagttgctctgttttatatctcttatatataggttcataggtaagtgctctctcaaaggttaaatataaatagcaaacaattatctgggaacctgaggtaaatgagctgcaaaggttcaagcttggggggttttgttgacagtcgttatcgatcagtttcgaccatcaatattgccaaaatagaggagaactaataatgcttgcaatgcatatacatgttagaataataatattccactagtattaggttcactaaccttttgcagagaataacaataaagtggaggagaatcgacatcaacacagacaataaatcaattaggcgatgtcgagaattagacttatgtatgagtgggccaagaactcagaattgacacgacaaaccgggccaaaattcacaagtctgcagagaagaacaacggaggaggccgccagccaaaaatgggctggattgggccggccccaggttcggccgaatcctcctcagcgccatccgatccagggctttgcctggacggtgtggattagcccccaatgacggttggagggtatttccgaccattccaaccgtcacaaccgtcattgggaggctataaaaggagttgctcttctcacttcagtcacacatgtcaagcaagagctctcatattctctcaagttagtttagtagtctcaagctagtggaataggaatagagtagaaatcaggagtccggaagtcttcggaagagtttgggtatggctctagtaattttcctttcctcttttgtaagctttgtacttttattagagtattcttctttatatatttatggtatcgaaatactttccgagtatatgaatgccaacttttcattatgttcatgttatactgaatatgttgctaggttatctgggagatgctttggtgcgggtataatgtttgcgtatgcaattatactctatgtcatgacgatgatattagagtagtatctggtagtttagacgtggtgtctagattatgggatatcattatttggggttatatgctgcggatgag

SEQ ID NO: 29368 - DNA, 4486 bp, Oryza sativa
tcggatggtaccgactcaatcaggtgataaaggtgcagcagatggttctcaaggggttcaaggtgatggttctcaaggaacttaaggtgatggttctcagggatttcaatgtgagaatcttaaccatgatggcaacacggcacagctacagtttaacaacattcaagaatggattgactatgtcgcgcaacatgctttgatttatcaatctggagtgttagtcaacactttgtcaaacatggttgatggctcaatagcttaataccaggctacaggaccggtctatttgccaggaggtgttttcacgaactatcagcccttgatcactaataatcagccagctgtttagccaattcctcccaatgcaccatcggctcaaccgacagcacctgtatcagctcttgcacctgttgcaccatcatcggcaccaggtcaactaattaatcctcggttgttggtgggagagcagccacaacatagtggacaaaaatgtgaatcggctaatccaagaccaagttgcagctatgttcttgccagctcagcctactgttgacccaatccagcaacagccgattcaacagacgccaccgaggtagcaggttgtgcagccgattcaacaaacaccaccaagacagcaggttgtgtagccaattcaacaaacgccatcgaggcaacaggttgttcagccgattcagcagcaaggtttgatgaatgcatcggctaggtttagaacacctgacaatcagctaaggcagcacgctgcgaatcaagttgtccaagagcatttggttcataatgtgcaaccagatcaaacggtgaaacctcaagttattcccgaacatttggtgcgcaatgtacaaccaaacattcagaattatcaagggggcaatttaaattatcagtatcagcctccatcgccgcaagttcaatatcagcaaggaggatcggcttagcctcagttcgctcctcaatacaatcaattcgagcccgtgccacaacaatcacagggggtgcctcagcaacgaccatgggccgatatgattgcagatgtgatgagagagcagtttgggcttaagccgaaggatgctggaaacttgtatcggcatccataccctgagtggttttagagagttccattgcctaaccgattcaaggttccatatttttcaaaattctcaggcaggacagtgtttcaacctatgaacacgttagccgattcttagctcagagtggtgaagcatcggctgtggatgccttggttttcttccttgccatgtggatcaatcaacagttgggccgatttggagaagcattttcatagctatttctatagtggggttcatgagatgaaactgtcggatttaacggcgagtaagcaaagacatgatgagcctgtgtaggactacattcaaagatttagagagatgaggaataaatgctacagcttgagtttaattgatgcctagttagccgatttggcttttcatggtatggtagctccgatcacggagaagttctcgtctcaagactttgatagtttgtcacatcttgcacagaaggtaaccctgcatgagcagaggtttgcagaagccaggaaaagcttttaaaaggtcaatcatgtctgtccctacatgtatgggtctgatgacgatgatgatgatgattttgaaatagcagcagccgaatgggttagaagtaagaaggttataccatgccaatgggtgaagaattctggaaaagaagagaggtatgactttgatgttaccaaggctgataagatctttgatttgctacttcgggagaaatagattgaacttcctgccggtcatacaatcccatcggctgaggaattaggcaagaggaggtattgtaagtggcataattttgggtctcattctaccaatgattgtaaagtcttcagacagcagatccaagaggctattgaagggggcaaaatcaagtttgatgactccaagaggccgatgaaggttgatggcaatccttttcctgtcaatatggtgcacacagctggccgaacagccgacgaaggaagggctagaggttttcaggtgaattcggctaggattatcaataagtatcagaagaaatatgacaagcagcgggagaggcattatgaagaagacgatggtagctttaatcctcattggggttgtgagttctttagattttgctggaatgaaggtatgaggttgccgtctattgaagactgccctgggtgcagctatgttacagaaagttcaagccgatcgtataatagaggcaatcggctaaggcaaataagagttcctgttgatcaaagattgggtccagtgaaccaagatcgtggccaagaggacaatgaagacaggaagactcaatggtgtccttctggtatttttacaaagaatcagaagagaagggttcaaatgttgaggaacagggaacgctttcaggaggttgagcaagaaatcaaccattggctgaaggagacgaagccgaagcaggagtggcgcgttaagaatcaagttcctacagcagacgaagccacaaccgatgaagcaaaaagattggctaaagggaaaagtgtcgtgactgcatcggttaacatggtattcacgttaccttctgaatttggggtcaaacaagccaatgttgatgaagttgaggaagaatcagctaaattgattttatcatgagaacaagaagtctttaagaaaccagaagggacggagaatcggcatcttaagccattgtatgtaaatggctatatcaatgggaagccgatgtctaaaatgatggtcgatggtggggttgtggtgaatttgatgccttatgctacatttaggaagctgggcagaaatgctgaggatctcatcaagacaaacatggtgctcaaagattttggtggcaatccattagaaaccaaaggagttttgaatgtggagctgacagtcggcagcaagactaaccctacaacattttttgtcttcgatgggaagggttcctacagcttattgcttggaagggattggatccatgccaattgttgtattccttcaaccatgcatcaatgcttgattcagtggcaagacgacaagattgaaatcgtgttagccgacaagtcagtcaacgttgctagtgccgatttagctctttgggagatgcctggtctcgattgcttatctggaaaagtttgggatggagattttctaaaagtgtccaattgtgatatacaaccaattgaagatggagagcccaagcttttattttgagggtgtcgtggagggttcaaatgtctacaccaaggacacagtagatgatctcaatgacaagcaaggacagggtttcatgtcggctgatgatttggaagatattgatataggtccaggtgatcgaccaaggccgacatttatcagtaagaacttatctccagagtttagaaccaagttgatagagctcttaaaggaattcagagattgctttgcttgggagtattatgagatgccaggactcagccgatcgattgttgaacatcggctacctatcaaactaggggttagaccacatcaacagcctccgagaagatgcaaagccgatatgctcgaacctgtcaaggctgagattaaacgtttatatgatgctggttttattcgtccttgccaatgtgggtttctagtatagttcctgttatcaagaaaaacggcaaggttagggtgtgcattgatttcagggatttaaacaaagctacccccaaggatgagtatccaatgccagtggccgatcagttggttgatgctgcttcagggcacaagatattgagttttatggatggaaatgcaggatataatcagattttcatggccgaagaagatatccataagacagattttcatggtgcaatcggcttatttgagtgggttgtaatgacttttggcttgaaaagtgctggagctacatatcaaagagccatgaattatatatatcatgatctgatcggctggttggttgaggtttacattgatgatgtggttgttaagtctaaagagatagaggaccacatagccgatttgaggaaggtttttgagagaactaggaaatatgacttgaagatgaacccgacaaagtgtgctttcggtgtatcggctggccagtttttgggatttcttgttcatgagagggggattgaggtaactcaaaggagtgttaatgcaatcaagaaaattcagcctccagagaataagacagaattgtaggagatgatcggcaagataaattttgttagaaggtttatttctaatttatctggaaggttagaaccttttacaccattgttaagattgaaagctgatcaaaagtttacttggggagcagagcaacagaaggctttggatagtattaaggaatatcttagatctcctccagttttgatccctccccaaaaggggataccttttaggttatatttatcagccggtgagaagttaat

SEQ ID NO: 29369 - DNA, 2105 bp, Oryza sativa
ttgcttatactattaaaccttatgcaactaacaatcaggctgagtatgaggcagttctcaaagggttgcagttactcaaggaagttgaagccaatgctattgaaattatgggagattctttgctagtgatcagtcaattggtaggggagtatgagtgcaaaaatgatatattaatgatttataatgagaagtgccgagaactgatgaaagagtttcggttggtgactttgagacatgtatctcgagaacataatattgaagctaatgatttggcccaaggggcgtcgggatataagccgatgatcaaagatgtcaaaatagaggttgccgcattaacattcgatgattggagatatgatgtgcatcattatttgcagaatccatctcaatcggcttctcagaaattgcgatataaagcgttgaagtatactttattggacgacgagctctattatcgtacgattgatggggtgttgcttaaatgtttgagtgccgatcaggctaaggttgcaatcagtgaggttcatgaagaaatttgtggcactcatcaatcagctcataagatgaagtggttacttcgacgtgcaggatatttttggccgacaattgtcacaccctgaagttctttcccaagcctaaattgaagttactagccgtcaacccgtgccttacacaggttattggtagtggtagtataaagatcaaaattttaaccatacgttcactacgttggccatattcgaattgtagcatgttagattgaaataatagttaactactcccttcgtcccagaatataagcatttttagagttagacaacggttattaagaaagttggtacaattaaataggggagtgttgtggctgaaggagaagtggagatagctggaaaaattgaatggtggaggattgtgattcgttaagaagagaatgttggtggtaaattgttatattttgggacaaattctaaaggctagaagttgttatattttggtacagaatgaatactacttgttaattattaatttcgaatcaaacaaatgctaaatttgtgatacatccaacttttttatttgatattgtggaattctggaattaattaagtatttagttgtgtctgtggtcgagtttaaatttaagtacaccctgtaatttaataattttgaaattaaaaaaaaatagttatactcagtatggaccctagaagatataagatatatgtaattagcttttttgttttatcattcccaaaactcataataataattagtgatctatggtctcttgtctatttgtaccggttaagtacaaattaaagagtctacgatattgccaattgcatgttttattttttcacaaaccccaaataaaacctaatgttgtgattttgcgattttgccaccatacatgctatttaaggtgaatttggtcacgtctatcagatcaagcctagattgtttactcttgctgcaagtaattctcatatgaacctacgtagtacatgataaatatttgtttacgtgcatgattatttgcttagtaggtttctagctagttcaaatggataaaccgtgtgtatgattaattctgaatttcgttctctttacgtcgcatgatttattatcgagaagaatatttatcccaaagagtcaggattgctaaaattatgggggtcttagtttcagtcacgtcatgtatcctatatgatactctagtaagtatgcttctctctctctctctcatttcctcttccaagtagataataattaaattaattttactcctaattcttataaactgtgtactaaaaaacaaaaggtaaatattgaaacttataatgtaattatagtttatgttttgaaatttagcgtgtaattaactacaatgcaagtgtatgcaatatattgtagttacccttcggttttcataaaagaaaatgtatctccaaattaggctgctaaattatacttgtaaatgaagctctatatattaactgaaatacttgttaggaaaaattgatataaggactaacccaaacgaatgaacatgaacactgaacagtaagctgcaaactacatgtacatatgcattgcatacgggatat

SEQ ID NO: 29370 - DNA, 1878 bp, Oryza sativa
cccaaacgaatgaacatgaacactgaacagtaagctgcaaactacatgtacatatgcattgcatacgggatataccgcgcatatggaaaattaaatatagttgattgcattcagagaattatagatcaatatatttttatctgcttctactgtcattaaacaacttgtcaaaatcagacaacttagaacatgcaagtttaatggaataaaaaaacacattcaatatgtaaaagatgatcagcaaatagttgatcattccaatcaaaaccataaattgagtgcgtcctaattaaatagactgctaaatatgtattgcaaattgaacacgcaaaccatgcaaattcaaaggaatacgtatatatgtatattgtagatgcagcaatagatctgtagcagatgcagtgacggatgtgcaagtaattttttattttgtagcaaacttttttcccccaaaattcatttggttaaatttcgtttcaggttaaaatttattcaatctttatggagtaaaaacagtacgtcaaaccagagacttaacagggatgaacgatacctctggagcgatcactgattcactggaaacttttaacttctcctcatgattgaggcaaattgtcgctgatcgggaccacagtctgggatcaaggtcgactgcagcctatgcatatctcatcgccctcgctcacgttcttctcgatcgcgttcgccgtttctttatcgcttcttaatttccaatctgatttctcacgatggaacttggagataaattagatggattctgtccttccatcgataactggatagataggatttgcaaggagcccactgagtttaagattgattggcccacgatgttaaagtattgcaggatctacggtgtagattaaacgacttatctaattgatgctcagatctttctggttaacgtgagagctccaaaaaagtgtccgattagtataggtatagatagatagataaatggtctcaaggaaataccggtgtaaagcaagagtaaaccctaataaattaatgcaaataataaccggatttggcatgtggaatttttcttgagttctacatgtcgaaatacgctaacaagatttttagtggaattttgagagctctggaaataattttaaccaattaaaattgatcacaagcaatatttaatcccaggaaaactcatttccttttttcctttttttctttcttttctttttcccttttctctttcgaatgggccgccggcccattctctcctccctccccttcccgctgggccggccgaaggccgaggcccagctgagccggccgcctctcctctctctcggggtcgccgacaggtggggcccacctatcgggcccgtctcccttctccagccggcgccgacgcgccccgcaaccaccgccacgcctcgctcccgcgtcttccggggcacgtcggccacgcccgcgcgtgcgcccgtgtctcccgcacccactccctctctctcccgcccgcgcccacgctcgtgacggcccggattcgattttcgaatcccgcctctctctcctcccccactcccccacgtcggccggcgattcccgcctctcccggccacgtccggacccctctctctatttaagcaccaccgccacccctatcttttttttcccagctcgccgagtcctcccgtcttttctaacgccctagcgccatcaccctcctctccgtcgctgtcgccgccgctccggtcgccgctagccaccgctagatgccgtgccgagccgcgccgtcgacgccatcgcgttcgccgtcgtgcgggccattccgtccaccccttcttcgtcggaatccaccgccggaattcactccttgccgtgcgccggtgagcaccg

SEQ ID NO: 29371 - DNA, 5091 bp, Oryza sativa
tcgtcggtgaggcccctcctcccctttctccctctctcccgcgccgcttagccgctgcgctgacgcccaaccgcttagccgctgctgtcgccatccgcgtcgccgcgacgccgccgctctctgccgctggccggtcgccgccggtcgcccccttgcgccgccgctgcgtcaagccacgccgccgtgcgccatggccgccgggccggcttgagccgcacgtgcgcgccggccgcgtaccgccccctccgccgtccgatccaccccgagtggatcggggccgtcggttcggctgcccgcgtggctgccgcgtgtgcgccgcgtcggcgccacgagtgcaccacgtggcgcaccgctccttcccggtccgtggacccagtccaccatggaccgccctccccgagtcactgccatgtgggacccgcatgtcggcgccgcccctctctctctcgggatttatgtattgcgcaataaatcaattaaggatttttctgttatagtaaaaacacagtgaatcttctaaaattcatatctaattcatctgagctccgtttatgcccattcaagtctcagtaaatcaagaaaaatgcatagaatccattaaaaatggttttgttctctgtttcagtagtcttacagcctgtttctattgtttgctttgtatgtcgcttagattccggctctcccgacgctccggtgtactttgaaatagtcgccgaggttcctccagcagcagagcaaggcaagtcatgcttgtcacttaatcatgttgatcctatattgcaaatgctccattgttttccttcaaatactgcattgttttataatattaccatgggatgtatacctactgttatagccatgttatttttgtaccatgttcctttgttagcctgggatataacatgactacatattgaactaggggttgcttagccatgcttagttcaactagcacagaatggggaaaattatatttaatgtatagacttcaggttctagtgttgatgttggattagagccaccgtcctggtgtcgcttcattaaaatttgttaaatggtgggctatgggtgcatggttttgctagtcgcacccatggcaattaaggaccggttcgcgggaaaccctggaagaattcctcgtacttaccacaagccagcgtgggcaacggctgggcttgtagtatagctttcctctagttgacgcatccaggcaagggtgggcgtgatggagtttggatgggccctgcgatggcctatacggcttccggattcatctaggcatgagaggggactgcccgctgccttgcgaggagtgggggtgaaacctgaggtgtggtgtgcttggttagagggggttatgcgaagggtcctgtcacggcctctttccggtatgtcgtggtggcatgtcggcgcacggaaacgtgtcgtggggctgtgtcttgtgggtacagttgtacacctctgatcagagtaaaactattcgaatagccatgcccgcggttatgggcggtcaaccagattcgctgtgattagtttcaccctagtctagtctaatggaattgaatagtataggtggatggttgggcctgttgcaatgtggtgtagcgttggacagtggatgtttaatattgattaattattacaaatgttttactgtttccaactattgtttataaatgctcgctttatgcaaatgaaccactatagctatgcctcgatacttccctgcatcatacccctattccggtataacgtgctgagtacagtgggtagtactcagtcttgctctatttttcccaaaccctagagtttgagtatgcgtcagatggtggcttctccgaggagtaggcttcgtccgtgccgtcgaggatgcctgtggagtggggatcccgctgcggtgcaagtcaaggcatagccccatttatcttttaattctccactgcatttatgtaagacttttataatgtttgtaagacgtggatctgtatgtcaactttatcgtttgtgtaccccggccggtcctggacggggaatttaatgcacattctgcttggaatttgtcaaatcaagtcagtctagggttttagtaaaattatttgagatttatttgacagtcagtcgggatttgatgggaggaatgcattaggtcctaactcaggaatatgggttgcaaggtctttatgctcttattgttattattagtaagtatctaatttctcattattttatcgctatgtaagtctatcttatttattcgctctcatgcaaaaaaatgatctatgcataaaattccgctcttattcgcttatttaatttgagtcctttactgcttcatttaaattggatttgagcatgcattgatcctacccctttgtcttctctagatggccgaccacccaaccaactaccgcggagaaggcattgacgattttgtggcagagttggctcgcatgaccctggtggtgggctaccccaatgcgtcggagtactcgactgttccgccgctcagtggcaagcttcctcaccgtgttcgtctggaggttcatggctaagtgggcacctgcctcgctaacatggtggttgtggcatctggaggcacagcagatcacgcctgtcaggaggcagcatatctgatgatggccagacttcgtgagcgcgacaactacatcttctgcaacacggcgtaccgtttccaccctcgccgagcaagtggtgacggtgtcagcaccttccgtccgacagccggtgagaacgacaccaccttcggtcacatgtgcgcaatgatgaggggaatggacaggatgcactcggatctgcacaaggcgtccaaggccttgaatgatgggaagctcgtgaggatcatagctctgaaggatgagatagcacgcctgaagaaggagaatgctcacttgaagggtctccccattcccggaggagtccggatccgcaccatgccccgcaagtcgacgactgcacccgtgcgcatttagcttgcgcccaggaacccacctccgcccgcagctctcgcagctcctccagttccgcccgcagttcccgcagctcctgcagctccacctccagtcccggctccagtcccagtgtcagctcccgcgtctgctctctccttcgctccagcatcagccgccaggggtccagccagtggcaacggaggttggttgcctgctactcccagtggcagccgcgaccacagtagcagcagttccagtggctcagagctgggcagcggcgagacgtatctgctagactccaggagccgctcagagggacctggcgacgagcaggaggacgccttcgactccaccgaccgcaggagccgttccgagcattaggctcgctttcccttagtttaccgactgcttagtatttgtctgttagtttgtgtgtttaggtttgttcgcttgtgggtcagtcgacatttgatatcatgtgcctatgatatggctgtcttaataaggatttgcttgctgtttaaagtgtttcaattcagatcagaacaattgcagtttaaattcctataaaataaagcttagttcctgagcatctgtttttcttcttttccaccccctccgtctgctcttccttcagatggccaacaccaggaatggcagccgtgcagcaggtgagggcagcaacggcgaagaacgcaccgacggtgggtatcccaacagcgcctccggcaatggtccgcccccgctccccgagaatccgactcttgccccagtaatggctcatcaaactcagatgatggcagccatgatgcagcagatgcagcagcggcaccagcagatgcaccagaggatgcagcagcaagccgagcagcagtagcaacagtttggtccccctccccctcagtccaagctactagagtttttacgcgtcaggccacccaccttctccagcaccaccaaccctatggaggcaaatgactggctccacaccatagagaagaagctcaatctcctacagtgcaatgatcaggagaaggttgccttcgccacacaccagctccaaggtcccgtgtcagcttggtgggacaatcacatggccacccgtccggcaggtacggaggtcacttgggtggagttctgtcgcagctttaggaaggcgtaggtgcccgacggggtcgtggcacagaagaagagagaattccgggcactccaccagggcaaccggacggtaactgagtacctccatgagttcaatcgcctagcgtgatatgcaccggaggatgtccgcactgacgcagagaagcaggagaagttcctagcaggcctagatgacgagctgaccaaccagttgatctctggagactacgccgactttgagggggatcctctggttgacaaggcaattcgtcaggaggatcagcgcaacaaagtggacaggaagagaaaggcagcgcagttccggtcaaaccaaggaagtcaccagcgaccgcgcttcactcccggacagcagggtggacctaccaccatgatcgtccgccagcatcgccctttcaactcgagcagcttccacccgggcgctagtggcagctagaaccaccagggaggtcagctcaactgcagtgcagctctgcgcccaccaatggcaccggcacaatcagttccatcagcccaagccaagaaggagactagagcaaagccaaggtcctgtttcaactgtggcgagcatggccactttgccaacaagtgcccgaagccaaggcgtgccgggccaaggtttgcccaagctcgtgtcaaccacgcgtccgcagaggaggcgcaagcagcaccagaggtcgtactgggtacgtttcttgtcaactcagtccctgctacagtactttttgattctggtgcaacgcattctttcatttcaaagaaatttgtggggatgcatgggttaagaaaagaagagcttagtacaccaatgagggttcataccccgggaaatagttcaacctcggtcagttatagccctttagtgctaatagaaatacacctatcacaatttctagccaacctcatccttctcgggatccaaagacctagatgtcattcttgggctggattggctgaccaagttcaa

SEQ ID NO: 29372 - DNA, 3014 bp, Oryza sativa
cgcattctttcatttcaaagaaatttgtggggatgcatgggttaagaaaagaagagcttagtacaccaatgagggttcataccccgggaaatagttcaacctcggtcagttatagccctttagtgctaatagaaatacacctatcacaatttctagccaacctcatccttctcgaatccaaagacctagatgtcattcttgggctggattggctgaccaagttcaagggagtcattgattgtgcgaatcgcacagtcaccttgaccaatgagaagggagaaaccatggtgtacaagtcaccagtctcaccgaagcagagaatctccttaaatcaaattgaggtggaaaaccctgtgaccaccgaggagaagagttcgcggaaattggaggatatccccatagtctgcgagtacccagaagtgttccccgaagacctcactaccatgccacctaagagagagattgaattccggattgatttggcaccgggaaatgccccaatttacaagagaccgtacagaatggtagccaatgagctagcagaggtcaagaagcaggttgatgagcagttgcagaaagggtacattcgactaagtacttcaccttggggtgctccggtcatttttgtggataagaaggacaagacgaagagaatgtgcgtcgattatcgcgcactcaatgaggtcacaatcaagaacaaatatcctttgccgcgaattgatgatttgtttgatcaactgaatggagctaaagtgttttctaaaatagacctgcgatcaggctatcaccagttgagaattcgggaagaggatattcccaagacagccttcaccactcggtatgggttgtatgagtgcacggttatgtcttttggacttaccaatgcacccgcattcttcatgaacttgatgaacaaaatgttcatggaatttctggataagtttgtggtggtattcatcgatgacattcttatctattccaaattggaagaagaacatgagcgacatctccgtctggtactcgagaagttggaggagcaccagttatatgccaagttcagtaaatgcgacttttggctatcggaggtcaaattcttgggtcacgtcattacagctcagggcgtggcagttgatccgtcgaatgtggagtcagttaccaagtggaccccacctaagaccgtgtcacaaattcggagttttcttggacttgcgggttattaccgtcggttcattgaaaatttctccaggatcgccagacctatgactcagttgcttaagaaagatgagaaatttaaatggacagctgagtgtgacaagagttttgaggagttcaataagaaattagtatccactccagttctgattttgcccgaccagacgaaagacttccaagtctattgcaacgcgtcccgtcatgggcttggatgtgttctaatgcaagagggcagagtggtcgcttatgcctcgcggcagttgcgtccgcatgaagggaactatccgacacatgacttggagttggcagcggtggtttatgctttaaaaatctggacgcgttatctgattggcaaccgctgcgaagtatatacggaccataagagtctaaaatatatcttcacccaacctgatgtaaatctccgacagcgaagatggttggagttaatcaaggattacgacatgagcattcactatcatccgggcaaagccaatgtggtggcagatgcattaagcaggaagagctattgcaataccttatgcactgaaggcatgtgtaaggaattgcagcaggagcttgaacacctcaacttggggcttgtagaatacgggtacgtggctgccctagaggcacgacctacgctcgtggatcaagtcagagcagctcaagtaaatgatcctgaaatagcggatatgaaaaagaatatgagggtcggaaaagcccgggatttccacgaagatgaacatggcacaatctggttgggagaaagattgtgcgtacctgacgacaaggaactaaaggatctgatactcaccgaggctcatcagactcagtactccattcatccaggcaacaccaaaatgtaacaagacctcaaagaaaagttttggtgagtcagcatgagaagagaaatagctgaatttgtcgcactctgcgacgtttgccaacgagtgaaggcagagcaccaaaggccagcaggttttctacaacctcttcagatcccgaaatggaaatgggaggagattggaatggacttcataacaggactgccccggacatcatctggccacgattcaatctgggtagtcgtgaatcgactcactaaagttgcccatttcattccagtgcataccacgtatacggggaagaaattggcagagctgtacttggcaaggatcatgtgtctgcatggagtacccaagaagattgtatctgatcgagggagtcagttcacctcaaaattttggcagaagctgcaggaagaattggggacccgtttgaatttcagcacaacctaccatccgcagacagatggccaaaccgaaagggtcaatcagatcttggaagatatgctacgtgcatgtgtgctcgattttggtggagcatgggataaaagtctgccttatgcggaattctcgtacaacaacagctatcaggccagtctacagatggcaccgttcgaagcgttgtatggccggaagtgccgcacacctctctactgggatcaaacaggtgaacgtcaactgttcgcaacagaagtgttaacgaaagcagaagagaaagtcagaaccgtcagagagaggctgagaattgcccagtctcgacagaagagctacgcggacaaccgccgaagggagctcacttttgaagcaggggattatatgtatctccgtgttactccgctccggggagtgcatcgtttccagacgaagggcaagttggcaccacgcttcgtgggaccatacaaaatcttggaacaaagaggagaagtcgcctatcagctagaacttccatccaacatg

SEQ ID NO: 29373 - DNA, 938 bp, Oryza sativa
aattggggacccgtttgaatttcagcacaacctaccatccgcagacagatggccaaaccgaaagggtcaatcagatcttggaagatatgctacgtgcatgtgtgctcgattttggtggagcatgggataaaagtttgccttatgcggaattctcgtacaacaccagctatcaggccagtctacagatggcaccgttcgaagcgttgtatggccggaagtgccgcacacctctctactgggatcaaacaggtgaacgtcaactgttcgcaacagaagtgttaacgaaagcagaagagaaagtcagaaccgtcagagagaggctgagaattgcccagtctcggcagaagagctacgcggacaaccgccgaagggagctcacttttgaagcaggggattatatgtatctccgtgttactccgctccggggagtgcatcgtttccagacgaagggcaagttggcaccacgcttcgtgggaccatacaaaatcttggaacaaagaggagaagtcgcctatcagctagaacttccatccaacatgatcggcatccatgtcatgttccatgtatcccagttaaagaagtgcttgagggtacccgaagaacaagccgattcggagcacattgacatccaagaagatctgacctatgtggagaagccagttcgtatccttgagaccagtgaaaggaggacaagaaacaaggtcaccaggttctgcagggttcagtggagccaccacttagaagaataagcaacctgggaaagggaaaatgggttaaaggccgcccatccgcacctcttcaccagctcttccgaatctcggggtcgagattccgtttaaggggggtaggtttgtcacaccctgaagttctttcccaagcctaaattgaagttataaatggtctcaagaaaatacaggtgtaaagcaagagtaaaccct

SEQ ID NO: 29374 - DNA, 1173 bp, Oryza sativa
ctagaaagaaaaaggcataggtaaactacagtctatcttttattccacaactccaataattattctaaggttttaaagaaagctactgctgctttggaactgatggctgagctgtatcccttgagacgcaaccggcactgcatttgctcctgtgaggacaatgttgttgacttggccttgtggctgttgacgcttcggcttcggacactcttttacgaagtgacctggctcataacaattgaaacacacccgatgctcccttccattactgttatcttcttgagactgatcctgctgaaatgacactgattgagtagcttgctcatcattgtcttcattgcttgcattagtctctgagttgatctcaccactgatgcccaactgttgtgactgttcttgacctgcagaaaaagattcaccaatttggagtggcttgatacgctgcctctggctactaccttgtgcctcctgggatacagtcattttccttttacggttatccatcttgttcttcttgtcttccagtcgaattgctttatcaaccaactcctgaaaatcctcatagtcatgagagatcaacataactgacagttcatccttcggaccttccaagaatttctcttgcctttcctcgtcagtacgcacatcttctggagcatagcgagccagacgattgaactcatgaagatactctgccacggtacgatccttttgcttcaaagccctaaactcacgcttcttcaaagcaacaactcctacaggtacgtgtgtcttcttgaatccttcggtaaactcttcccaagtgattggttgtcgttctgctctgttcatccggaaatgatcccaccattctgatgcagattagaaaaggtagaaggagaggggttacactaaagacaagaccttaaccaggttaacactgatctgatgtgtgtagaccattatattgttcaagttgattaagcaagcaacctagtatagttacacactcatcaatgaactactccaatgatgggaatgcaaccatacctacacacaaagcaaacaacaagcgttctaccctactaactattcttcaaagacactttggcggcataggttctaagataggttccaaacttcactctatctgaacacttaagattcgactatcatcttcttattcctcgatcc

SEQ ID NO: 29375 - DNA, 5713 bp, Oryza sativa
tttttttgtggcgtttgtgtcacgcccggtaattcactagtaatttccgaacttatttgtgcataaaatcctcgtccaggaatcagccgaggtacacaaactgacaatttaatatacaaatccatcataataataacgttacacacttacaaaagaaaagaaaacagcagcggaattaacggtctagcgatggcttcagctccactcccacaggcagctcaactggggtataagccaaacgtcttctccttctggatcctttttcttcaactgaggttgattgattattgcaagaatgagcatatgacatactcaacaagccacacagcaaatatgcaagtgcacaaggataccaaaggatggcataatataggctcatttgcgaaagcagcatttagcaaagagttaagagtagtaaaacagtagagtaattaattaaaaattttaatcaacactgaacagcacacccatgctgtacaggcccaaccatcctgaacaaccatacccggctgtacagatctaactccaaaccaggagctaagcaaattattatcaggtattaacatccataattattgtgagaggtgtgagactaatcacgaaaaacattgctcaacccgcccataaccacgggcacggctattcgaatagttttactctgaccagaggtgtaccactgtacccacaagacacaaccccacatcatgtcaccatgtgcctcaataccaccacggtacctcggaaaggagttgtgacaataccccttgcacaacataatccattacagcgcacctttcctggatcataatcaccccctcaaaaaccagaggcatggactccccagcgacccccgtggacttctcgccacttctcagtctggcgcactataatgaatcacgctatacaaaagataaagccgttgcccacgctggcttgtggttggcacgataaatgtctcacaacagtagctcgcgaaccggtccttaattgtcatgagcacgactctcaaaaccatgtgctcacaacccaccattatcaagttttagttggcaagtaattaattaaccaatcacgattaaccatcgtgaactatcattaagccatccttaaataatagtgagtcataagttatcccaatagtgtgctaatgtttctaagcatggctaagcaatcataactaatatctagctgaaccaatatataaagcccaactagtcaagttataataacccaaggtatcaaggaataaagtaatcaatgcaaattggccataacaaaggaataagttcacaccacccggtgacattcgaaaataaatgcacagttgaaataaatagagaatttaaatataggatcaacatgctcaaaggattgtgtttaggatctgtgtgacttgccttgcaataatcggtcttcaagtaatcttcttgatcacttccgacgcactcacgaaccttcgcaacgacggaaacgacaagctaacacgcaaaacgaagaaaaagactaataaaaaccaaataaacagtacatataaagtaaacaaacatgtagatcatgattttagatgaatttagcaacttgaaccactcaaaaccgagttacgatgatttagttatgaatttccgaagatttaatctattagaaaaaactggaaaaggagaagatgatgacgtcatgatgacatcatcaatggccggaccaagatggcgacctcgccggagatagagcgaccggctgcggatttggaggacatgaacacgtagaggacgacgagacgaacccaacgatactcaccctcgtgccaaacgacgaccgacgacggccggcgacgaggaggcgacggcggcggctcgggttgcacggggcggcggagctccgatgaccggcgacggaaaaggaagggtggccgagcttcccctcaccacggcgcacccaacggtggtgacggcgaccggcgacgacgatggagacggcggcgcggcggcaccggagatggccggcggcggcggtttgcttggcggcggtggcgacggagctacggagcacggaagaggacgggagagggggcaaacgaaagaggaggactagggggtcctatttatagccttggattgaagagatcggactcctcccgcaagaaatcgatccgggaaatcaaaaactcggttttggagataaactcgaaaacgagtttgattcggataagatactcaacgatttgctccgatttttgggggtaaagatagaggaggataagaggaatatttcccctcagcaaaattggagaaaaagagcaacggggaggcgagatttggaaggaagaggcggcggcactgtgcacggcacggctggctcgggctctgcctgagttggaagatgaacagtagcgcagggagggaaagtagacttttccggctgagctgagaggagaggaggcggctcaggttgggccggcggaagagagaggaaggaaaggaaggaatgggccgaaaatggcccaagctgaggaggaggattttattactttcccaattaaaataatcacttaaatgatctttgaattattaaaaatacttccaatgctcaaataatttgaagaaaaatcctgaaaatacttggacactcaaagtacttaaaaaaattacaattagaccatttaatgattaatttaatatgtggttaattactgaaatgctctttgtatgattaaaaattatgaattgagctccgaaaaatccgagaaaactccagagagtataattaaccatggagaatttaataaaaattaaatccatccatgctttatatttaggaaattttatttcccacatttaacttcactagtaaattaatgaacgtttaatataaattctattaataatttattaaataatttataaatcctgaaacgaaaatcaggatgtgacagtttggttaaatattgaagcctaaaggtaaatattcattatttctcgcttcgtttaactcttggttgttgatttgaattgtcgtgtgctgcacgtatgcatgtaaaatacgctatgggtgttgtttttagggataattctttttatctcttttgtgtctattgttggatgaaatgctaaatttgcgttaatgttttcttcgatctacgtcatggccattagtcaaattaatgcttgtcaaactatgttaaggccacgaaaatatccattgatagtttgatttatctcaaatttatgttaagggtgcccatcgatccgctagaggaggtggaagcggttttgcttgatttttcttgggttttggttgaagattaaagcctacaaggtaaatattcagaatttctcaccccgattcacacccgctcgttgaattgaactgccatgcagtaatacatgtaaaatgcactagtcattaatttgtatggatccataagtcattcgtagatctgttctcgggtgttatgctaaatttgaattaatggtttattccatctatgccatcgtcattaatgtttcacattagccaaatattatttcggattgacaaaaaatagaatttttttaatatttttgttagccatgactatctaattaaggtgacgtgggtgtgtgcaaaaacctctattttgtcgtagggtaaaatggtcattcctagttgtttttattctaatgtgcttgtaaatgatgaaatcttcattgtttttttccttcatggtttgtaataaatgataataaccgcaggtacccactggatataatggatctagaatggataactatagcggatcgtgactctgtggagtatttcaggggagtaacggctctcgttgccacgtccaccagcacaaacttagtcgatgcaccagaatatatttggtgtccatgccatgattgtaagaaagacagacaacttccagctcagcgggtccattcacatatccttacaaggggttttatggacaatttccttagcgaggagaatcaaggtgagggaagtgctggcaactgtcatgggcatgatgcggatgtaggctacgaggaggaggaggaccaaacatgtgtcgatcacggtgaacctaatctagatcagatgttgcgcgacggggagagatttgacactgatgatagggaatatcacaagttcacaaccatggtgaaggactccaaaactccaatttacaatggatgtaaggcagagcacagcaagctccaagtggtcctatcgctgcttcacttgaaggcgagcaacggatggtctgataagagcttcatgagttgctagagctcttgaaagaaattcttcctacagacaatgtcttgccagaatcgacgtaccaacccaaaaaagttacatgtccccttagtcttgacatacagaaaattcacgcttgtctaaatgattgcattctgtatcgtggtgaatttgcagatttggagtaatgcccggtatgcaagggagcggaagcacatgtgcatccacatcgagcggtgagacccctctattcaaaaagaagtctgtcttttgggacttgccatattgggaagacctggatattcgtcatgcgatcgatgtgatgcacgtgatgcacgtggagaagaacgtgtgccaaggcgtgctcggggtattgttgaacacacctggcaagatgaaagacacttcgcaagcacggaaagatctcaaagacatgggcatcaggaaagagctgcatcctcaggacagaggaaatgaccgctattacctatctccggcatgctacactcttagtgctgcagaaaaaacgagtatgttggaatgcatgtggggtgtcaaagtcccatccggttactgtgcgaacattaagagactggttagcatgaaagataagaggttggttggaatgaagtcacatgactgccatgttcttatgacgcaactgctaccggtcgcaattagggtatccttctagaaaaggtccaagacccaatcatcaagttgtgccagttcttcaatgcgataaaccaaaaggttatcgatccggcttcattgggcaagcttcaggaggacgcgattctcaacttttgccagctggagatgttgttccctctttctttcttcgatatcatggtgcatctgattgttcatcttgtggaacaagtaaagatcttaggtccagcatatctgcatagcatgtgggctttcgagaggtttatgggcatcataaagaaatatgtcaggaatagatcaagacccgaaggcagcatcgtcgagggttattgtcacaccctgaagtttcccctttttcttgctttaaaaattggttaaataaattgcccgaagaaattatcttaattaacctagagctaaatccctagttaataaatgcaattaataatcggaaatagcgtgtggaatttttcttgagtaccccatgctccaatgcattaacaagatttttagtggaattttcagagccttggaaataattttaaccaattaaaaatcaccaaaatgcaattttaaatcccaggaaaaatcctttcttctttttctttttcttttccttcttttttctctattgggccgtcggctcactctctccacgcgctcggcctccttactttgggccggcccgttcccctttcccctctctccgggacgctgacaggtggggcccacctgtcaggtcgtccccttcctccagccgcccgccccacgacggcaaccgccgcagaaaccgtccgcgccg

SEQ ID NO: 29376 - DNA, 1079 bp, Oryza sativa
tcagtacgcacatcttctgaagaatagcgagccagacgattgaactcatgaagatactctgccacggtacgatccttttgctccaaagccctaaactcacgcttcttcaaagcaacaactcctacaggtacgtgtgtcttcttgaatccttcggtaaactcttcccaagtgattggttgtcgttctgctctgttcatccggaaatgatcccaccattctgatgcagattagaaaaggtagaaggagaggggttacactaaagacaagaccttaaccaggttaacactgatctgatgtgtgtagaccattatattgttcaagttgattaagcaagcaacctagtatagttacacactcatcaatgaactactccaatgatgggaatgcaaccatacctacacacaaagcaaacaacaagcgttctaccctactaactattcttcaaagacactttggcggcataggttctaagataggttccaaacttcactctatctgaacacttaagattcgactatcatcttcttattcctcgatccacttgacttgcagaagttgacaacatcgacgtcttcgagtttctccatcaagattaacgactactcaagttgaaagaggaagggggaagaacgacaaaacgatttgcaaagaattctagataaggaagaaaggaaaattttcacaaattatgttttcggaagatttgtccttaaggtttgaccatttggcttatcctacagtcaagatggctctgataccaacttgtcacgcccggaaattcactagtaatttccgaacttatttgtgcataaaatcctcgtccaggaatcagccgaggtacacaaactgacaatttaatatacaaatccatcataataataacgttacacacttacaaaagaaaagaaaacagcagcggaattaacggtctagcgatggcttcagctccactcccacaggcagctcaactggggtataagccaaacgtcttctccttctggatcctttttcttcaactgaggttgattgattattgcaagaatgagcatatgacatactcaacaagccacacagcaaat

SEQ ID NO: 29377 - DNA, 620 bp, Oryza sativa
tgggtgccccgtggtaaggggaagctcggccacccttccttttcggtcgccggtcatcggaagctccgccgccccgtgcaacccaagccgccgccgtcgcctcctggtcgccggccgtcgtcggtcgtcgtttggcacgagggtgagtatcgttgggttcgtctcgtcgtcctctacgtgttcatgtcctccaaatccgcagccggtcgctctatctccggcgaggtcgccatcttggtccggccattgatgatgtcatcatgacgtcatcatcttctccttttccagttttttctaatagattaaatcttcggaaattcataactaaatcatcgtaactcggttttgagtggttcaagttgctaaattcatctaaaatcatgatctacatgtttgtttactttatatgtactgtttatttggttttattagtctttttcttcgttttgcgtgttagcttgtcgtttccgtcgttgcgaaggttcgtgagtgcgtccgaagtgatcaagaagattacttgaagaccgattattgcaaggcaagtcacacagatcctaaacacaatcctttgagcatgttgatcctatatttaaattctctttcaactgtgcatttatttt

SEQ ID NO: 29378 - DNA, 1258 bp, Oryza sativa
cttagcctgatcggcactcaaacatttaagcaaccccccatcaatcgtacgataatagagctcgtcgtccaataaagtatacttcaacgctttatatcgcaatttctgagaagccgattaagatggattctgcaaataatgatgcacatcatatctccaatcatcgaatgttaatgcggcaacctctattttgacatctttgatcatcggcttatatcccgacgccccttgggccaaatcattagcttcaatattatgttctcgagatacatgtctcaaagtcaccaaccgaaactctttcatcagttctcggcacttctcattataaatcattaatatatcatttttgcactcatactcccctaccaattgactgatcactagcaaagaatctcccataatttcaatagcattggcttcaacttccttgagtaactgcaaccctttgagaactgcctcatactcagcctgattgttagttgcataaggtttaatagtataagcaaactcaaaacttgccccccgaggagaaattataaccaagccgataccacaaccatgagtgcatactgatccatcaaaaaacaatgtccacagcacaacctcaaccgagccgattgaatcatcacgatgatcaacgataaaatcggctatagcttgccccctgactgccttcggtgactcataccgaagatcaaattccgttaaggaaaatatccacttttcaacccttcctttcaaaaatggagccgataacatgtacttaacgacatcggctttgcatatgacagtgcattcgttggacaatagataatgccttaaccttgtacaagaaaaatataagcacaagcacaacttctccacaggggaatatcttgtttctgcatccaagagccgacgacttaaataaaacacaaccctctcttttccttcaagctcctgaattaaaactgagccgattaacttctcaccggctgataaatataacctaaaaggtatccccttttggggagggatcaaaactggaggagatctaagatattccttaatactatccaaagccttctgttgctctgctccccaagtaaacttttgatcagctttcaatcttaacaatggtgtaaaaggttctaaccttccagataaattagaaataaaccttctaacaaaatttatcttgccgatcatctcctacaattctgtcttattctctggaggctgaattttcttgattgcattaacactcctttgagttacc

SEQ ID NO: 29379 - DNA, 581 bp, Oryza sativa
tcttgctaagctcctacttcttttcagcccctgcaacgatttgcatatgtgagcaactgacccggtatcaaatacctaagaatcagtagaggaagtagcaagattaatttctataacattaatacctgaggtggaactctttccatcctgctgcttctgcttgaactgctctaggtatttcttacagtttctcttccaatgacctgtctccttgcaaaagaagcactctgcatccttagcgggccctgtcttttgaaccttggtcttagagttgctagtactcgtgatctcatcagagtttagctttctcttttgacaacttttcttgttgttgggcttgcgcttatgcacaactatcacatggttggagtttttcttaatgctttcctcagcagtctttagcatcccatgcaattctgccaaggtcctgttcaggttgttcatattgaaattcattatgaacggctcaaagctgggaggtagcgactggagaatcaaatcagtaaccaactctcggctaaggggaaaaccaagcttattcagactctcggcgaacccatcattttgatcacatgtgggct

SEQ ID NO: 29380 - DNA, 17686 bp, Oryza sativa
  unsure (1)..(17686): unsure at all n locations
gtgggtctgacgttaatgagagcaacatcgtgcccatcactttggacaagttgacgcctgaacaaaagaaggatcttgaggcaatgatgcagcagacacaaagctaattcttgaactcattcatggagactcgccaaggaacaattgttcagaggtacaagatgaaactagttgttgatgttcctgggacaagttcttccaaggatggagaagtacaacaagtctcggatggtacgactcaatcaggtgataaaggtgcagcagatggttctcaaggggttcaaggtgatggttctcaaggaacttaaggtgatggttctcagggatttcaatgtgagaatcttaaccatgatggcaacacggcacagctacagtttaacaacattcaagaatggattgactatgtcgcgcaacatgctttgatttatcaatctggagtgttagtcaacactttgtcaaacatggttgatggctcaatagcttaataccaggctacaggaccggtctatttgccaggaggtgttttcacgaactatcagcccttgatcactaataatcagccagctgtttagccaattcctcccaatgcaccatcggctcaaccgacagcacctgtatcagctcttgcacctgttgcaccatcatcggcaccaggtcaactaattaatcctcggttgttggtgggagagcagccacaacatagtggacaaaaatgtgaatcggctaatccaagaccaagttgcagctatgttcttgccagctcagcctactgttgacccaatccagcaacagccgattcaacagacgccaccgaggtagcaggttgtgcagccgattcaacaaacaccaccaagacagcaggttgtgtagccaattcaacaaacgccatcgaggcaacaggttgttcagccgattcagcagcaaggtttgatgaatgcatcggctaggtttagaacacctgacaatcagctaaggcagcacgctgcgaatcaagttgtccaagagcatttggttcataatgtgcaaccagatcaaacggtgaaacctcaagttattcccgaacatttggtgcgcaatgtacaaccaaacattcagaattatcaagggggcaatttaaattatcagtatcagcctccatcgccgcaagttcaatatcagcaaggaggatcggcttagcctcagttcgctcctcaatacaatcaattcgagcccgtgccacaacaatcacagggggtgcctcagcaacgaccatgggccgatatgattgcagatgtgatgagagagcagtttgggcttaagccgaaggatgctggaaacttgtatcggcatccataccctgagtggttttagagagttccattgcctaaccgattcaaggttccatatttttcaaaattctcaggcaggacagtgtttcaacctatgaacacgttagccgattcttagctcagagtggtgaagcatcggctgtggatgccttggttttcttccttgccatgtggatcaatcaacagttgggccgatttggagaagcattttcatagctatttctatagtggggttcatgagatgaaactgtcggatttaacggcgagtaagcaaagacatgatgagcctgtgtaggactacattcaaagatttagagagatgaggaataaatgctacagcttgagtttaattgatgcctagttagccgatttggcttttcatggtatggtagctccgatcacggagaagttctcgtctcaagactttgatagtttgtcacatcttgcacagaaggtaaccctgcatgagcagaggtttgcagaagccaggaaaagcttttaaaaggtcaatcatgtctgtccctacatgtatgggtctgatgacgatgatgatgatgattttgaaatagcagcagccgaatgggttagaagtaagaaggttataccatgccaatgggtgaagaattctggaaaagaagagaggtatgactttgatgttaccaaggctgataagatctttgatttgctacttcgggagaaatagattgaacttcctgccggtcatacaatcccatcggctgaggaattaggcaagaggaggtattgtaagtggcataattttgggtctcattctaccaatgattgtaaagtcttcagacagcagatccaagaggctattgaagggggcaaaatcaagtttgatgactccaagaggccgatgaaggttgatggcaatccttttcctgtcaatatggtgcacacagctggccgaacagccgacgaaggaagggctagaggttttcaggtgaattcggctaggattatcaataagtatcagaagaaatatgacaagcagcgggagaggcattatgaagaagacgatggtagctttaatcctcattggggttgtgagttctttagattttgctggaatgaaggtatgaggttgccgtctattgaagactgccctgggtgcagctatgttacagaaagttcaagccgatcgtataatagaggcaatcggctaaggcaaataagagttcctgttgatcaaagattgggtccagtgaaccaagatcgtggccaagaggacaatgaagacaggaagactcaatggtgtccttctggtatttttacaaagaatcagaagagaagggttcaaatgttgaggaacagggaacgctttcaggaggttgagcaagaaatcaaccattggctgaaggagacgaagccgaagcaggagtggcgcgttaagaatcaagttcctacagcagacgaagccacaaccgatgaagcaaaaagattggctaaagggaaaagtgtcgtgactgcatcggttaacatggtattcacgttaccttctgaatttggggtcaaacaagccaatgttgatgaagttgaggaagaatcagctaaattgattttatcatgagaacaagaagtctttaagaaaccagaagggacggagaatcggcatcttaagccattgtatgtaaatggctatatcaatgggaagccgatgtctaaaatgatggtcgatggtggggttgtggtgaatttgatgccttatgctacatttaggaagctgggcagaaatgctgaggatctcatcaagacaaacatggtgctcaaagattttggtggcaatccattagaaaccaaaagagttttgaatgtggagctgacagtcggcagcaagactaaccctacaacattttttgtcttcgatgggaagggttcctacagcttattgcttggaagggattggatccatgccaattgttgtattccttcaaccatgcatcaatgcttgattcagtggcaagacgacaagattgaaatcgtgttagccgacaagtcagtcaacgttgctagtgccgatttagctctttgggagatgcctggtctcgattgcttatctggaaaagtttgggatggagattttctaaaagtgtccaattgtgatatacaaccaattgaagatggagagcccaagcttttattttgagggtgtcgtggagggttcaaatgtctacaccaaggacacagtagatgatctcaatgacaagcaaggacagggtttcatgtcggctgatgatttggaagatattgatataggtccaggtgatcgaccaaggccgacatttatcagtaagaacttatctccagagtttagaaccaagttgatagagctcttaaaggaattcagagattgctttgcttgggagtattatgagatgccaggactcagccgatcgattgttgaacatcggctacctatcaaactaggggttagaccacatcaacagcctccgagaagatgcaaagccgatatgctcgaacctgtcaaggctgagattaaacgtttatatgatgctggttttattcgtccttgccaatgtgggtttctagtatagttcctgttatcaagaaaaacggcaaggttagggtgtgcattgatttcagggatttaaacaaagctacccccaaggatgagtatccaatgccagtggccgatcagttggttgatgctgcttcagggcacaagatattgagttttatggatggaaatgcaggatataatcagattttcatggccgaagaagatatccataagacagattttcatggtgcaatcggcttatttgagtgggttgtaatgacttttggcttgaaaagtgctggagctacatatcaaagagccatgaattatatatatcatgatctgatcggctggttggttgaggtttacattgatgatgtggttgttaagtctaaagagatagaggaccacatagccgatttgaggaaggtttttgagagaactaggaaatatgacttgaagatgaacccgacaaagtgtgctttcggtgtatcggctggccagtttttgggatttcttgttcatgagagggggattgaggtaactcaaaggagtgttaatgcaatcaagaaaattcagcctccagagaataagacagaattgtaggagatgatcggcaagataaattttgttagaaggtttatttctaatttatctggaaggttagaaccttttacaccattgttaagattgaaagctgatcaaaagtttacttggggagcagagcaacagaaggctttggatagtattaaggaatatcttagatctcctccagttttgatccctccccaaaaggggataccttttaggttatatttatcagccggtgagaagttaatcggctcagttttaattcaggagcttgaaggaaaagagagggttgtgttttatttaagtcgtcggctcttggatgcagaaacaagatattcccctgtggagaagttgtgcttgtgcttatatttttcttgtacaaggttaaggcattatctattgtccaacgaatgcactgtcatatgcaaagccgatgtcgttaagtacatgttatcggctccatttttgaaaggaagggttgaaaagtggatattttccttaacggaatttgatcttcggtatgagtcaccgaaggcagtcagggggcaagctatagccgattttatcgttgatcatcgtgatgattcaatcggctcggttgaggttgtgctgtggacattgttttttgatggatcagtatgcactcatggttgtggtatcggcttggttataatttctcctcggggggcaagttttgagtttgcttatactattaaaccttatgcaactaacaatcaggctgagtatgaggcagttctcaaagggttgcagttactcaaggaagttgaagccaatgctattgaaattatgggagattctttgctagtgatcagtcaattggtaggggagtatgagtgcaaaaatgatatattaatgatttataatgagaagtgccgagaactgatgaaagagtttcggttggtgactttgagacatgtatctcgagaacataatattgaagctaatgatttggcccaaggggcgtcgggatataagccgatgatcaaagatgtcaaaatagaggttgccgcattaacattcgatgattggagatatgatgtgcatcattatttgcagaatccatctcaatcggcttctcagaaattgcgatataaagcgttgaagtatactttattggacgacgagctctattatcgtacgattgatggggtgttgcttaaatgtttgagtgccgatcaggctaaggttgcaatcagtgaggttcatgaagaaatttgtggcactcatcaatcagctcataagatgaagtggttacttcgacgtgcaggatatttttggccgacaattgtcacaccctgaagttctttcccaagcctaaattgaagttactagccgtcaacccgtgccttacacaggttattggtagtggtagtataaagatcaaaattttaaccatacgttcactacgttggccatattcgaattgtagcatgttagattgaaataatagttaactactcccttcgtcccagaatataagcatttttagagttagacaacggttattaagaaagttggtacaattaaataggggagtgttgtggctgaaggagaagtggagatagctggaaaaattgaatggtggaggattgtgattcgttaagaagagaatgttggtggtaaattgttatattttgggacaaattctaaaggctagaagttgttatattttggtacagaatgaatactacttgttaattattaatttcgaatcaaacaaatgctaaatttgtgatacatccaacttttttatttgatattgtggaattctggaattaattaagtatttagttgtgtctgtggtcgagtttaaatttaagtacaccctgtaatttaataattttgaaattaaaaaaaaatagttatactcagtatggaccctagaagatataagatatatgtaattagcttttttgttttatcattcccaaaactcataataataattagtgatctatggtctcttgcctatttgtaccggttaagtacaaattaaagagtctacgatattgccaattgcatgttttattttttcacaaaccccaaataaaacctaatgttgtgattttgcgattttgccaccatacatgctatttaaggtgaatttggtcacgtctatcagatcaagcatagattgtttactcttgctgcaagtaattctcatatgaacctacgtagtacatgataaatatttgtttacgtgcatgattatttgcttagtaggtttctagctagttcaaatggataaaccgtgtgtatgattaattctgaatttcgttctctttacgtcgcatgatttattatcgagaagaatatttatcccaaagagtcaggattgctaaaattatgggggtcttagtttcagtcacgtcatgtatcctatatgatactctagtaagtatgcttctctctctctctctcatttcctcttccaagtagataataattaaattaattttactcctaattcttataaactgtgtactaaaaaacaaaaggtaaatattgaaacttataatgtaattatagtttatgttttgaaatttagcgtgtaattaactacaatgcaagtgtatgcaatatattgtagttacccttcggttttcataaaagaaaatgtatctccaaattaggctgctaaattatacttgtaaatgaagctctatatattaactgaaatacttgttaggaaaaattgatataaggactaacccaaacgaatgaacatgaacactgaacagtaagctgcaaactacatgtacatatgcattgcatacgggatataccgcgcatatggaaaattaaatatagttgattgcattcagagaattatagatcaatatatttttatctgcttctactgtcattaaacaacttgtcaaaatcagacaacttagaacatgcaagtttaatggaataaaaaaacacattcaatatgtaaaagatgatcagcaaatagttgatcattccaatcaaaaccataaattgagtgcgtcctaattaaatagactgctaaatatgtattgcaaattgaacacgcaaaccatgcaaattcaaaggaatacgtatatatgtatattgtagatgcagcaatagatctgtagcagatgcagtgacggatgtgcaagtaattttttattttgtagcaaacttttttcccccaaaattcatttggttaaatttcgtttcaggttaaaatttattcaatctttatggagtaaaaacagtacgtcaaaccagagacttaacagggatgaacgatacctctggagcgatcactgattcactggaaacttttaacttctcctcatgattgaggcaaattgtcgctgatcgggaccacagtctgggatcaaggtcgactgcagcctatgcatatctcatcgccctcgctcacgttcttctcgatcgcgttcgccgtttctttatcgcttcttaatttccaatctgatttctcacgatggaacttggagataaattagatggattctgtccttccatcgataactggatagataggatttgcaaggagcccactgagtttaagattgattggcccacgatgttaaagtattgcaggatctacggtgtagattaaacgacttatctaattgatgctcagatctttctggttaacgtgagagctccaaaaaagtgtccgattagtataggtatagatagatagataaatggtctcaaggaaataccggtgtaaagcaagagtaaaccctaataaattaatgcaaataataaccggatttggcatgtggaatttttcttgagttctacatgtcgaaatacgctaacaagatttttagtggaattttgagagctctggaaataattttaaccaattaaaattgatcacaagcaatatttaatcccaggaaaactcatttccttttttcctttttttctttcttttctttttcccttttctctttcgaatgggccgcccgcccattctctcctcccttccctttccgctgggccggccgaaggccgaggcccatctgagccggccgccttttctgtctctccgggtcgccgacaggtggggcccacctgtcgggcccgtctgccttctccagacggagccgacgcgccctggaaccaccgacacgcctagctgtcttgtcttncgggtcacgtcggccacgcccgtgcgtgcgcccgtgtattccgcacccactgcctatctcttccgcccgcgtccgctctcgtgaccgccgggattcgattatcgaattccacctgtttctcctngcccactaccccacgtnggacggcgatatccgctctctccgtcacgtctggacccctcctctatttaagcaccatcgccacccctatctctttttccccatctcgccgagtcctcccgtgctttctaacgccctagcgccgtcgccctcctctccaccgccgctccggtcgccgctagccgccgctagatgccgtgccgagccgcgccgtcgacgccgtcgcgttcgccgtcgtgcgggccatcccgtccacccctcctccgtcggaatccaccgccggaattcactccttgccgtgcgccggtgagcaccgccatggccgccgtcctcggccggcgctctcgccctcttggattttcctctctccctctaacccctctcctcttcttcgttagatggttccggagctcgtctcgccgtcaccatcgccctccgtcgctcgccgtcgtcgatcgtcgtcggtgaggaccctcctcccctttctccctctctcccgcgccgactagccaccacgccaccggccaaccgcttagccgccgctgtcgccatccacgtcgctgcgacgccattgctctccgccgccggccggtcgccgccggtcactgccttgcgccgcgctgcgccggccgcgtaccgccccctccgccgtccgatccaccccgagtggatcggggctgtcggttcggctgcccgcgtggctgccgcgtgtgcaccgcgtcggcgccacgagtgcaccacgtggcgcaccgctccttcccggtccgtggacccagtccaccatggaccgccctccccgagtcactgccatgtgggacccgcatgtcggcgccgcccctctctctctcgggatttatgtattgcgcaataaatcaattaaggatttttctgttatagtaaaaacacagtgaatcttctaaaattcatatctaattcatctgagctccgtttaagcccattcaagtctcagtaaatcaagaaaaatgcatagaatccattaaaaatggttttgttctctgtttcagtagtcttatagcctgtttgtattgtttgctttgtatgtcgcttagattccggctctcccgatgctccggtgtagtttgaaatagtctccgagattcctccagcggcagagcaaggcaaaacatgcttgtcacttgatcatgttgatcctatattgcaaatgctctattgttttccttcaaatgctgcattgttttatattattaccatgggatgtttacctactgttatagccatgttatttttgtaccatgttcctttgttagcctgggatataacatgactacatattgaactaggggttgcttagccatgcttagttcaactagcacagaatggggaaaattatatttaatgtatagacttcaggttctagtgttgatgttggattagagccaccgtcctggtgtcgcttcattaaaatatgttaaatggtgggctatgggtgcatggttttgctagtcgcacccatggcaattaaggaccggttcgcgggaaaccctggaagaattcctcgtacttaccacaagccagcgtgggcaacggctgggcttgtagtatagctttcctctagttgatgcatccaggcaagggtgggcgtgatggagtttggatgggccctgcgatggcctatgcggcttccggattcaccaaggcacgagaggggactgcccgctgccttgcaaggagtgggggtgaaacctgaggtgtggtgtgcttggttagagggggttatgcgaagggtcctgtcacggcctctttccggtatgtctggtggcatgtcggcgcacggaaacgtgtcgtggggctgtgtcttgtgggtacagttgtatacctctgatcagagtaaaactattcgaatagccgtgcccgcggttgtgggcggtcaaccagattcaccgtgattagtttcaccctagtctagtctaatggaattgaatagtataggtggatggttgggcctgttgcaacatggtgtagcgttggacagtggatgtttaatattgattaattattacaaatgttttactgcttccaactattgtttataaatgctcgctttatgcaaatgaaccactatagctatgcctcgatacttccctgcatcatacccctattccggtataacgtgctgagtacagtgggtagtactcagtcttgctctatttttcccaaaccctagagtttgagtatgcgtcagatggtggcttctccgaggagtaggcttcgtccgtgccgtcgaggatgcctgtggagtggggatcccgctgcggtgcaagtcaaggcatagccccatttatcttttaattctccactgcatttatgtaagacttttataatgtttgtaagacgtggatctgtatgtcaactttatcgtttgtgtaccccggccggtcctggacggggaatttaatgcacattctgcttggaatttgtcaaatcaagtcagtctagggttttagtaaaattatttgagatttatttgacagtcagtcgggatttgatgggaggaatgcattaggtcctaactcaggaatatgggttgcaaggtctttatgctcttattgttattattagtaagtatctaatttctcattattttatcgctatgtaagtctatcttatttattcgctctcatgcaaaaaaatgatctatgcataaaattccgctcttattcgcttatttaatttgagtcctttactgcttcatttaaattggatttgagcatgcattgatcctacccctttgtcttctctagaggggcgaccacccaaccaactaccgcggagaaggcattgacgattttgtggcagagttggctcgcatgaccctggtggtgggctaccccaatgcgtcggagtactcgactgttccgccgctcagtggcaagcttcctcaccgtgttcgtctggaggttcatggctaagtgggcacctgcctcgctaacatggtggttgtggcatctggaggcacagcagatcacgcctgtcaggaggcagcatatctgatgatggccagacttcgtgagcgcgacaactacatcttctgcaacacggcgtaccgtttccaccctcgccgagcaagtggtgacggtgtcagcaccttccgtccgacagccggtgagaacgacaccaccttcggtcacatgtgcgcaatgatgaggggaatggacaggatgcactcggatctgcacaaggcgtccaaggccttgaatgatgggaagctcgtgaggatcatagctctgaaggatgagatagcacgcctgaagaaggagaatgctcacttgaagggtctccccattcccggaggagtccggatccgcaccatgccccgcaagtcgacgactgcacccgtgcgcatttagcttgcgcccaggaacccacctccgcccgcagctctcgcagctcctccagttccgcccgcagttcccgcagctcctgcagctccacctccagtcccggctccagtcccagtgtcagctcccgcgtctgctctctccttcgctccagcatcagccgccaggggtccagccagtggcaacggaggttggttgcctgctactcccagtggcagccgcgaccacagtagcagcagttccagtggctcagagctgggcagcggcgagacgtatctgctagactccaggagccgctcagagggacctggcgacgagcaggaggacgccttcgactccaccgaccgcaggagccgttccgagcattaggctcgctttcccttagtttaccgactgcttagtatttgtctgttagtttgtgtgtttaggtttgttcgcttgtgggtcagtcgacatttgatatcatgtgcctatgatatggctgtcttaataaggatttgcttgctgtttaaagtgtttcaattcagatcagaacaattgcagtttaaattcctataaaataaagcttagttcctgagcatctgtttttcttcttttccaccccctccgtctgctcttccttcagatggccaacaccaggaatggcagccgtgcagcaggtgagggcagcaacggcgaagaacgcaccgacggtgggtatcccaacagcgcctccggcaatggtccgcccccgctccccgagaatccgactcttgccccagtaatggctcatcaaactcagatgatggcagccatgatgcagcagatgcagcagcggcaccagcagatgcaccagaggatgcagcagcaagccgagcagcagtagcaacagtttggtccccctccccctcagtccaagctactagagtttttacgcgtcaggccacccaccttttccagcaccaccaaccctatggaggcaaatgactggctccacaccatagagaagaagctcaatctcctacagtgcaatgatcaggagaaggttgccttcgccacacaccagctccaaggtcccgtgtcagcttggtgggacaatcacatggccacccgtccggcaggtacggaggtcacttgggtggagttctgtcgcagctttaggaaggcgtaggtgcccgacggggtcgtggcacagaagaagagagaattccgggcactccaccagggcaaccggacggtaactgagtacctccatgagttcaatcgcctagcgtgatatgcaccggaggatgtccgcactgacgcagagaagcaagagaagttcctagcaggcctagatgacgagctgaccaaccagttgatctctggagactacgccgactttgagaagctggttgacaaggcaattcgtcaggaggatcagcgcaacaaagtggacaggaagagaaagccagcgcagttccggtcaaaccaaggaagtcaccagcgaccgcgcttcactcccggacagcagggtggacctaccaccatgatcgtccgccagcatcgccctttcaactcgagcagcttccacccgggcgctagtggcagctagaaccaccagggaggtcagctcaactgcagtgcagctctgcgcccaccaatggcaccggcacaatcagttccatcagcccaagccaagaaggagactagagcaaagccaaggtcctgtttcaactgtggcgagcatggccactttgccaacaagtgcccgaagccaaggcgtgccgggccaaggtttgcccaagctcgtgtcaaccacgcgtccgcagaggaggcgcaagcagcaccagaggtcgtactgggtacgtttcttgtcaactcagtccctgctacagtactttttgattctggtgcaacgcattctttcatttcaaagaaatttgtggggatgcatgggttaagaaaagaagagcttagtacaccaatgagggttcataccccgggaaatagttcaacctcggtcagttatagccctttagtgctaatagaaatacacctatcacaatttctagccaacctcatccttctcgaatccaaagacctagatgtcattcttgggctggatgggctgaccaagttcaagggagtcattgattgtgcgaatcgcacagtcaccttgaccaatgagaagggagaaaccatggtgtacaagtcaccagtctcaccgaagcagagaatctccttaaatcaaattgaggtggaaaaccctgtgaccaccgaggagaagagttcgcggaaattggaggatatccccatagtctgcgagtacccagaagtgttccccgaagacctcactaccatgccacctaagagagagattgaattccggattgatttggcaccgggaaatgccccaatttacaagagaccgtacagaatggtagccaatgagctagcagaggtcaagaagcaggttgatgagcagttgcagaaagggtacattcgactaagtacttcaccttggggtgctccggtcatttttgtggataagaaggacaagacgaagagaatgtgcgtcgattatcgcgcactcaatgaggtcacaatcaagaacaaatatcctttgccgcgaattgatgatttgtttgatcaactgaatggagctaaagtgttttctaaaatagacctgcgatcaggctatcaccagttgagaattcgggaggggatattcccaagacagccttcaccactcggtatgggttgtatgagtgcacggttatgtcttttggacttaccaatgcacccgcattcttcatgaacttgatgaacaaaatgttcatggaatttctggataagtttgtggtggtattcatcgatgacattcttatctattccaaattggaagaagaacatgagcgacatctccgtctggtactcgagaagttggaggagcaccagttatatgccaagttcagtaaatgcgacttttggctatcggaggtcaaattcttgggtcacgtcattacagctcagggcgtggcagttgatccgtcgaatgtggagtcagttaccaagtggaccccacctaagaccgtgtcacaaattcggagttttcttggacttgcgggttattaccgtcggttcattgaaaatttctccaggatcgccagacctatgactcagttgcttaagaaagatgagaaatttaaatggacagctgagtgtgacaagagttttgaggagttcaataagaaattagtatccactccagttctgattttgcccgaccagacgaaagacttccaagtctattgcaacgcgtcccgtcatgggcttggatgtgttctaatgcaagagggcagagtggtcgcttatgcctcgcggcagttgcgtccgcatgaagggaactatccgacacatgacttggagttggcagcggtggtttatgctttaaaaatctggacgcgttatctgattggcaaccgctgcgaagtatatacggaccataagagtctaaaatatatcttcacccaacctgatgtaaatctccgacagcgaagatggttggagttaatcaaggattacgacatgagcattcactatcatccgggcaaagccaatgtggtggcagatgcattaagcaggaagagctattgcaataccttatgcactgaaggcatgtgtaaggaattgcagcaggagcttgaacacctcaacttggggcttgtagaatacgggtacgtggctgccctagaggcacgacctacgctcgtggatcaagtcagagcagctcaagtaaatgatcctgaaatagcggatatgaaaaagaatatgagggtcggaaaagcccgggatttccacgaagatgaacatggcacaatctggttgggagaaagattgtgcgtacctgacgacaaggaactaaaggatctgatactcaccgaggctcatcagactcagtactccattcatccaggcaacaccaaaatgtaacaagacctcaaagaaaagttttggtgagtcagcatgagaagagaaatagctgaatttgtcgcactctgcgacgtttgccaacgagtgaaggcagagcaccaaaggccagcaggttttctacaacctcttcagatcccgaaatggaaatgggaggagattggaatggacttcataacaggactgccccggacatcatctggccacgattcaatctgggtagtcgtgaatcgactcactaaagttgcccatttcattccagtgcataccacgtatacggggaagaaattggcagagctgtacttggcaaggatcatgtgtctgcatggagtacccaagaagattgtatctgatcgagggagtcagttcacctcaaaattttggcagaagctgcagaaagaattggggacccgtttgaatttcagcacaacctaccatccgcagacagatggccaaaccgaaagggtcaatcagatcttggaagatatgctacgtgcatgtgtgctcgattttggtggagcatgggataaaagtctgccttatgcggaattctcgtacaacaacagctatcaggccagtctacagatggcaccgttcgaagcgttgtatggccggaagtgccgcacacctctctactgggatcaaacaggtgaacgtcaactgttcgcaacagaagtgttaacgaaagcagaagagaaagtcagaaccgtcagagagaggctgagaattgcccagtctcgacagaagagctacgcggacaaccgccgaagggagctcacttttgaagcaggggattatatgtatctccgtgttactccgctccggggagtgcatcgtttccagacgaagggcaagttggcaccacgcttcgtgggaccatacaaaatcttggaacaaagaggagaagtcgcctatcagctagaacttccatccaacatgatcggcatccatgtcatgttccatgtatcccagttaaagaagtgcttgagggtacccgaagaacaagccgattcggagcacattgacatccaagaagatctgacctatgtggagaagccagttcgtatccttgagaccagtgaaaggaggacaagaaacaaggtcaccaggttctgcagggttcagtggagccaccacttagaagaataagcaacctgggaaagggaaaatgggttaaaggccgcccatccgcacctcttcaccagctcttccgaatctcggggtcgagattccgtttaaggggggtaggtttgtcacaccctgaagttctttcccaagcctaaattgaagttataaatggtctcaagaaaatacaggtgtaaagcaagagtaaaccctaataaattaatgcaaataataaccggatttggcatgtgaaatttttcttgagttctacatgtcgaaatacgctaagaagatttttagtggaattttcagagctctggaaataattttaaccaattaaaattgagcacaagcaatatttaatcctaggaaaattcatttccttctttttcttttttttctttcttttctttnacccttttctctttcgaatgggccgccagcccattctctcctccctccccttcccgctgggccggccgaagg

SEQ ID NO: 29381 - DNA, 3308 bp, Oryza sativa
gtgattagtttcaccctagtctagtctaatggaattgaatagtataggtggatggttgggcctgttgcaatgtggtgtagcgttggacagtggatgtttaatattgattaattattacaaatgttttactgtttccaactactgtttataaatgctcgctttatgcaaatgaaccactatagctatccctcgatacttccctgcatcatacccctattccggtatgacgtgctgagtacagtgggtagtactcagtcttgctctatttttcccaaaccccagagtttgagtatgcgtcagatggtggcttctccgaggagtaggcttcgtccgtgccgtcgaggatgcctgtggagtggggatcccgctgcggtgcaagtcaaggcttagccccatttatcttttaattttccactgcatttatgtaagacttttataatgtttgtaagacgtggatctgtatgtcaactttgttgtttctgttccccggccggtcctggacgagaattttaatgcacattctgcttggaattctattcgagaatttctgggcgtgacaacaatgctggaggattgtttcaaatattacaagggatgtcaagattgtcaaaaatttggagcgattcaaagggcacaggcatcggctatgaatcctattattaaaccatggccatttagaggttggggaattgatatgatcggtatgattaatccgccatcaagcaaagggcataagtttatattggtggcaaccgattattttaccaagtgggtagaagcgattcctttgaagaaggttgattctggggatgctatacaatttgttcaagagcatataatttatcgatttggtattccccaagccattacaaccgatcaaggttcaatcttcgtgtccgatgagtttgttcagtttgccgaaagcatgagtatcaaattgttgaattcttcaccatattatgcacaagctaatgggcaagccgaggcatctaacaagagtttgatcaaattgattaagagaaagatttttgattatcctcggcagtggcatactcgattggccgaagccgtgtggtcttatcggatggcttgtcgtggattgatccaaggtcctccttataagcttgttatggacatgaggcttgtttaccatgggaagttagaatcggctcaagaagaacgagttgcaaatgatttgacagccgatgaatattatattctcatagccgatgaaagggaagacttggttcaatctagattgcgagcccttgcaaaggttaccaaggataaggaacgagttgctcaacattacaacaagaagggggtgcccaagactttttcggatggtgaacttgtatagaagttgattttgccgattgggactcaagatagtaaatttggcaagtggtcaccgaattgggaaggaccgttccaaatctataaggttgtatctaggggatcttacatgttgcaaggactcgatggagaagtttatggacgagcgctaaatgtaaaatatttgaagaaatattactcaagtgtttgggttaatgcatgatcggctggtgttgccgatacattatagccgatgtattcacatcgccttgagatggccgatgttatatcgcccttagttgttttcatattgtaatcggttatggtttgccgatgtacaatggctgatattgttatatcgcccttagtacaaattataattttatcaatgcttttgacattgtaaaattaggggggcacatatatgaaaaattgcaaatttttgagcaaaaaatatggagttatattgaatcggcataaaggttatcaagatgagttagataaagagctagagtttcttagccgattacaaaatttcctaagatctattacacaagatatcactgagacaagtagcgctggatagccgatatagctctttgcctaatttgttctacttcttcaatggcttgggcatcttgagcatcggtttcagagatgaatcttagggacttggtcatatcagcgacattcttgatagccgatttcagccttgccttttgttcttcgacagattgtgggagatcgactagcttcttgtgttccagatccagatcggcattgcattcttggagttgtgccaagagctcaatcttccgagcttcaagccgatcaatattagacctgatcgggccttcagatagttgatcaagtttggacttttcttcatgcacgagttgccgattggcttggatggtagcttcaatctctttgcgttctcggcgttcggctagtttctgcttggctttctccagcttgaattgatgctgttcaagataagtagctggagtaaggacattggctagttcttcaggaattagagcttgaacttcgtgtagccgggtcctaattgatccacagtcgaccaccaagctgcctagagaagatgcctctagccgatgagagatatcttcaagagttttcttcacatcatcggataagggggctaaggctttgcttgtggtatcctcttctgtctcatcaaagtagtccttgatgtcaatagagaatagatcggctaagacccgtaagaacaatttcaagagagttaggagctaaatagacatagccgatctaagttcttgtatcaaagggaaacttactgggatagcaggagcggctggttgttcttcttcctcaacgcggtgactccctatagccgatggagtttggtcactggatgattgctgtacagggggagaaggaggaggaggctaaaaagagacaagtattagataagatcggatgagatcaactgctgaaagaattaagaacatcttattggtggagccggtttgagagttggtgctgccgatttcttcttaacagcaattctctttttctgcaaagacaagattaataagtaatcggctgaagataaaatggttataaaagggaatcagggaatggtacttaccctcgagaaatgagctggggcagaaggagttgaaggggtttgattgggtgaagccgatggtgttttatctgtatcacttacttcggctgcggcttgatcaacatcttctccgatttcctcttcatccaaagcttgttcaatggatggatcaagggcaggcagatcatcggttggcttgggtttcagttttttggccttcttcttgagagccagaaccgatggatcaattgctggcactttgggtttccttttcctgcctgcatcggctggttctctcatctgcccttggagcagacttacggtcttaggggcatgatagccgataactggaggggtt

SEQ ID NO: 29382 - DNA, 2677 bp, Oryza sativa
agatatccatcactctatgacacatccaacggcttgattgtctagatgttgtccttcttttcatacttatagctgcatcagttgagtttgatcttatgagtcgtgattagaatctcaaatctctagcctgtctttggttgccgattagggtagtatcggagtttcagctgatcttacctaacttaactatattcatcttatatgctttactgatatgttaaatctgccctttatgttaagatcttgttgcgttaaaagtatattaggctttctgtttgatatattctacttgcattaatatcttaatatagagtggtatcggagtattagccgatacatgctagatctatctgatcggctatgctatgtacatatatagtctcattattaatatatatttcgatttaagtgatttatactatctcggcatagcgaccgatctatcccaatcacaaggattgcgtattgttaatatctacagccgatcgagtagatttagtatatccgacataaggattgtgtattgttaatatctacagccgatcgagtagatttaattctgtcttacttattaatgactgccgatcgatgcatatatgacatcggctcaaagataaatgatatgtcatcggcatttagccgatcggcgtttatggatttaatcgcggtttctttgtctttgtttcttattgattgcaggatcaaattaattggcacgctcacacacccaaaggcaagttttggacctgcactagagttaagcagatctcccaggcctcgtgtttttacatcaacaaaacccaaattcatccctacagccccacatccatacagcacattcgcattcatatttcacattcacatccacattctacattccacattccacatccacatcacatttcacattcacatttcacaattcacattcacattcacattcacattcatcacaacaaataaaaacctacaagccattcatcacaacatataaaaacctacaagcctaagtcaaaattcgtaaatccaaactcaaaatatatatcctaaacatttgcatataaatcctaaacatttgcatatatatcctaactcaaaatatgcgtaggttaaaattcctaagtcaaaagattgtaagtctaaatttttaggtcgaaaaattcctatgtctagattatgaacattaatatgaaaaattcctaagtctgcaatatttaagaattcataagtgcaaaaatataaatgcgattgtattttacctccaacatggggtgagcctatgattttaagagtttctcatcctcaagtcatcgagcatgtaatagaaaacatagaatagaatccataataatagcaaatattcaaatgcattacacataaagtacacttccatagttcatgcataaacactaattaaatacatttttttcacataaatctagctagtaggtttttttttcctaggagctaatttcttcgcggcttggtgccgagggggaggggcagaagattgcactcgttgtggggccttgttgatgttgtattcgccacgacatgatgacggatgaacccgcaaaactcgtcagtgagagctttgaagacgtgtggtagaatttcacttgtatcgagacccaatttctgcaacgcaaggatggaagcacgtagaaatttacttagtacttaaatagaattgctcaatgttatgacttaggtacctgaagcatgtcatacctcagcattgcggtgattgtatccatcctctacaaaatatagcatgtaccgcatgacgtagaatccacagaggtcgatggcctctggttgacgaaggatatatttatgttcgaagatccgaaattcagttgcatcaatcttgcatctcccatacgatcttccggacctacagtacttcttatatgccctatttagtgcactgaaaatagtttggtacttgtctatccctctcctcaggctatcatatatgcaaattgaactatcgtcgatgttgattacgaggaggatccaatgatggctacacatagtgacaatttatcaataacttgatatgggtcgaggggcaaacataactggaaatcgatgatagtgacttactgagaaaggtaaggaaataaaatgtggtcacatccattaagtttggcgagggcatcaaagagatagcggtcaatttcagcttcggatgtgcattgcttgtcaaagtttacaacggctgggtctagaaaagctatcttatggttcatggatctaacctgataagagcaatgcccgcaaaaggagaacacagttgagaattactgagtacgtagaatgctatggattaagaacgacaagatatcaaaggactcaaaatgaccacaattgcaggaggcagatatcgaattcccttctttggtacaacggggagtcctctaaattctacaaagcatgtattactggggtggtgaaaatccacatcagtgtagtaggcaccgaacatcccgacccccttttttggcctcctccaaataccattcatgcagccaatgcgcttgagttcctaaggattcaatttccgtgtcaagcaccatcggttgaccaagttggaatcgcagtacaatcggggcctcttcaagttcatctagattgtataggcttttcaaaccagctgacttgcagaaatcaa

SEQ ID NO: 29383 - DNA, 3295 bp, Oryza sativa
gcttcttaggtgacttcggtggtgcgcacttgatgaaatgctcgatgacattcggaggaattggaatctttggttcctcgagcttcttaggaccaaaaagtgaagtgatgctggcattgattgtcttcttaggcagcgatgttgttggctttgacactaagtatgaattggaatgtgtgagtcactatttgcttgatggaacagacatctgtgatgcacttggtgttcgggtcttttttctgagtgggggtggacttgtggacttctccggacgatgtggttcattaggtgtgttttcacgaggtggactgaaggtcctctgtcgaggcggagaaggagctagatttgcacctcgtccgtttgaagggctggaagcaccgtcgcctggatcccctgccccatcgttcaacgtgataacgatgtagcgtttgggccatatgatcaggttgtgaagagcagcgcccagagtgtcaaccccttcctccggaggaaactgtagcacataacctctgtattggcttggcacgtcttccacttcaacccttgagtggcctacaggcaatggaacaccatgtattgtttgccctgcacatattggatgtgccacaccgcgtgcaatctcctgagtaatgttgctttgaagagggacatggagcacgcacggcatatgtgttgttatgtcgtccacaacataacgtgatgtgtcctgttctggaggggggttatccgcggacgcgcaagtgctccgtttggcacctgggttaaccacttggtcaccagcttgcccctgttgtcttggtaacccattgggaaacagcactgcaagttgttcctttacctgacgggccacctctaatctcatacgtttggcctcctcttctctcatgggtcttcttggatgggcccgatacatgtgtgcatcatctgggaacccttcctttcatggatcggaaccaacgcctctcgtgcgtccagggtgctctttcatccccagtgccaatgtgaactcatctttttctcttactggcacatatttaccctgtctcgccaagaaaacagcctcggtgatcttttctttcagctcttgctatcgaggtcccagtgcaaccaactcccctgaatccgatagttgagccttcctggcgtacgcgtagtgctttgtccgggtcccccatccatctatctcaacaactatacctgcttggcacagttgttcctccttctcttcccatttggggatattcttagcatatctgctcggcccaagtcggtagaaagcttgttcaacgcggagttggccttgtttagggtgctcacttctcttgcctcttgagatgttttccagttcacaaactcatcccattaatctgtcaacttctgatacctgggtttctcaaaatccagggtccggttgcgttggaccaacttcgcgttcaagtcagtcctccactttctgaataatgtgctcatcttcgataaggctcccttctttgctagctcttcttggccttttggaaaggtgaatgtcagcttcaactttcgccaacattcttccttcaggttatgtggcaccgtccagtcgagttgtgttacatcatttgttttccaatgtctatacttgatgggaatgaaatccttgacgatacatccacacgccctaccatagggagttactgccgtcgatggttcgtgtggccacccagtttcagtgagcactgtcacaacgtagtgaccatccggcatcgagctaggacccctaggctacctcccatatgagacggttgaatcctggcccgaaccaccagtggaagtgccaacctccttggaaattgcaaattcgattagttcgaatggtccattagagttggaatttgctaatgcactattgcgtgaaatatacgtcgaaattacctcgctgccttcggaatgctcttgatttaagtttaagaatgcgctagggctggcattatgttcaccctcagatccggagctagcgaattcttcgtgttccatctagtcatcatcgagcataataacattactaatgttgaaaaataacatggtctaaaggtgtaagatattttgtgctctcggaactgctacaagcacaaaacaggaatatatttgctctcagatggcgggttgccaacttaatggcctcctcgccaaaatatggcaggctgccaattgcacggcctccatgccatggtgtactaggtcgtcatcgattatgtgtggcagtataaacagagacgagaataaagggcaattcaaaaatagtgaacaaaagagaataagggagagagcgtgtggataagagagatagagggtgaagtgggtaagtggttggccgggtaattaaatagtaggagataggtgccggttttataccctaatccggcacaattcacaaatcacacaaataaatgaaatactgccacacataatctcccatcatatgaatttcatcatcgagcagcaagttatattcacatggggagtttggaaagattgggtaaatgttcagatgtgcattccaagatatacttttcctttaccaaacaagaaatgaggatgatggatcatggaaacagaacctaagggcatgaacatattaatactagtaatataacctaagtaagcaagtaagcaaccttaagtagccacattttaaatcagcagcagcataaaaaaaagctattagcaatccagggagcatgctcatataagtattggctcacacgaaaaactgtactcttatcataataccatagatctgatcaactgtatgagatcatacaaaatactggtaatatgtaagacggatgctctcctagtgtcctgacaaaaaattgcaggccagcattgttacagaacaaagtggccttaactttagtgagtttatgattaaaatttagacaattctgatcaactaggcaaaattttaaatttgaaacaataggaaaataagtgtactctccatctccatcccaaaatatagtaacagattagacactgcctattactacattacaatagcgtgtcgattcagtaaataggcaactgcatcaaaaatcaccctgggaaaccatgctaggccatgcacagtgagaaacgactgtcctaaaatattaatatttagcataatcgacagatgtagtattgtatccaggtattagtatttagcataatcgacagtggaagtattgtatctagataatatccaggtgcacccccataatcgacagaggtagtacttagcatattcatgtctcagacccataatcgacagagg

SEQ ID NO: 29384 - DNA, 6226 bp, Oryza sativa
gcatcgatgcgcacagcactgttttgatttgtactcttgttgtcctgagtcttggtgtaaatggtatacccgttcatatcatagccctggtacatgtggattgtgttggatggcccccgagataatgaaaaaagggcaccatcgatgtctgcagttgtcaggtactccatcaaccatttcccgaattgaagtttatgcatcttcgcaagccatgctgctcctttcctgggattgtctctgcggagtacatccaagtgcatgtgcacgtacggagacaccaaagctgactgtcgtaacactgcaaaatgggcgtgtcttatggtttgtcgatcaggggtgaaaattctcctgtgacctaatgttccctttccaagcatcctaccctcatgacgaggcacaggaacaccgataggttgtagatccatgtaatctatacagaattcgaccacctcctctattgcataactgtcacacccagaaattctcgaaccagaatttctaagctgaatgtgcattaaatccctgtccaggaccagccagggtacacaaatgacaattgttgacatacagacccacgtcttacaaaaatataaaagattacaaatgcagcgggaaagattaaagcgagctaaaccgggaagcttgacttcagcagcgggcgacgccactccacaggcaaaccttgacggcagcgacgaaaccaacctctctgagacggctctaactaagaagaacttcaactctggtgtgggggaaaagagagcaagactgagtactacccactgtactcagcaagtcataccggaagaggaggtatgatgcaggatataaccaaaggaagctaggggttcttttgcataaagcaggcatttcaaagcagtagttgaaagcagtaaaacagctgtagtaattaatcaatattaaccaatcactgtccaacgctacaccacgttgcaacaggcccaaccaaccacctgaactacaccagttcattaagctaaactaggggtgagactaatcacggtgaatctggttgatcgcccataaccgcgggcacggctattcgaatagttttactctggccagaggtgtacaactgtacccacaagacacgattccacacatgtcgccatgccccgaagtatcaccatgatactgcaaagggtgaaatcgtgacaagaccctccacataaccctcccctaaccatccacaccacgctaaggtttcacccccacccctcaaaaggcagtgggcggtcccctcttgcgccgcagtgaatccggcagctggacaaccggacaccccggccgacccaacttcatcacgcccaccctcgccaccggtgcctaggaaagggtcgagctatacttcagatcaagcagttacccactcccgcttgtggtaagcacggtaagtctcccagggtttcccatgaaccggtccttaactgccatgggtgcgaccagcaaaaccatgcactcacagcccgccattcagaatattttaattaactgacacccttgcggtggcaccaatctaaagctatgccaatagacaaagtctatgtaataatgtgatccctttttgtgtactagttgagctaagcatggctaagcatttcctaaaccaacatctaatcattttgatacccaggttatcaatggcatatggtaaacaataaatggctgagtaataggacccatcccacatgacattgtaaaagaatgcaacatttaatagaaatgcagggtgtttgtaaattgggtacaatatgatcaaatgtaaagcatgacttgccttgctctcgaactgatgagacctcagcaacgtcttcgagaaaccgcggatcgacgaaacggccgaaacccacgcgacaaacaaagcacacaagcaaaacatgctataagactactgaaacaggaaacaaaaccatttttaatggattctttgcatttttcttgatttactgagacttgaatggacttaaacggagctcggatgaattacttatgaattttagaagataactgtgtttttactaataaagaaaaagtccttaattaattattgcgcaataatacccagggctgacgtcatccaaggggggcgccgacaggtggggcccatgggtcagcggctcaaaggggagaggaagggggcgccggcatgtgggccccacgggcagtggctcaaggtggccggtctaccgtagaccgggaccacgcgggtggtccaccgccggtccacgggaccgacggtccggatcggccgggaggccgatcggacggcacggcagcggctaggcacggcttcaaaaccgaccggccggccatggcaaccggctgtgacgcgcacggtcgccggcgacggcaatcggcggcgcgggaagcaacggcggacggggtacaggacggcggcgtcgaccgaaggtgacggcgagcgcgtggagagaggcggcgcaaacgagagagaggggaagagggaggaggggaggatcctcaccggcgagtatggcggccggggcggaggataaggtggcggcgacgacctggcgatgaagaagggccggacgggtggcggcggcacctacggagggtgttgagaaggattaggagtagagagagtgaccacggcggccaccattgttggccggagacgaaggagaatggatagctcaccggcgtgcgaggagaaccgggctccggtggggtttagcggaaatcgagcggcggccgaggtggctcacgcggcggcaatgctaatgccggcggcggcttggcgcggcggcggctctagcggctgcggcgcgcgaccggaggtggcggcaagcggcggcgctagtggcgagcggcgcgcgaccggtaggaggcacgggaaagcgcggcgaaaaggggaaaagggagagggagatgcgggaaagctttataggggctcgagaggggcggacatggccgggaaaccccccgatttggccagcgacgtgggggaagagagagaaagtgggggggattcaaatcgaatcccgcccatttgcgggcgcgcgtgcgggcgggaatggcggggagggcggcgacgtggggacgcggagtgggggtgcggcgtggagcggagaaggcggcggcgcggacggtttcggcggcggttgccgtcgtggggcgggcggctggaggaaggggacgacctgacaggtgggccccacctgtcagcgtcccggagagaggggaaaggggaacgggccggcccaaaggaaggaggccgagcgcgtggagagagtgagccgacggcccaatagagaaaaaagaaggaaaagaaaaagaaaaagaagaaaggatttttcctgggatttaaaattgcattttggtgatttttaattggttaaaattatttccaaggctctgaaaattccactaaaaatcttgttaatgcattggagcatggggtactcaagaaaaattccacacgctatttccgattattaattgcatttattaactagggatttagctctaggttaattaagataatttcttcgggcaatttatttaaccaatttttaaagcaagaaaaaggggaaacttcagggtgtgacaataaccctcgacgatgctgccttcgggtcttgatctattcctgacatatttctttatgatgcccataaacctctcgaaagcccacatgctatgcagatatgctggacctaagatctttacttgttccacaagatgaacaatcagatgcaccatgatatcgaagaaagaaagagggaacaacatctccagctggcaaaagttgagaatcgcgtcctcctgaagcttgcccaatgaagccggatcgataaccttttggtttatcgcattgaagaactggcacaacttgatgattgggtcttggaccttttctagaaggataccctaattgcgaccggtagcagttgcgtcataagaacatggcagtcatgtgacttcattccaaccaacctcttatctttcatgctaaccagtctcttaatgttcgcacagtaaccggatgggactttgacaccccacatgcattccaacatactcgttttttctgcagcactaagagtgtagcatgccggagataggtaatagcggtcatttcctctgtcctgaggatgcagctctttcctgatgcccatgtctttgagatctttccgtgcttgcgaagtgtctttcatcttgccaggtgtgttcaacaataccccgagcacgccttggcacacgttcttctccacgtgcatcacgtgcatcacatcgatcgcatgacgaatatccaggtctttccaatatggcaagtcccaaaagacagacttctttttgaatagaggggtctcaccgctcgatgtggatgcacatgtgcttccgctcccttgcatacttttcattactccaaatctgcaaattcaccacgatacagaatgcaatcatttagacaagcgtgaattttctgtatgtcaagactaaggggacatgtaacttttttgggttggtacgtcgattctggcaagacattgtctgtaggaagaatttctttcaagagctctagcaactcatgaagctcttatcagaccatccgttgctcgccttcaagtgaagcagcgataggaccacttggagcttgctgtgctctgccttacatccattgtaaattggagttttggagtccttcaccatggttgtgaacttgtgatattccctatcatcagtgtcaaatctctccccgtcgcgcaacatctgatctagattaggttcaccgtgatcgacacatgtttggtcctcctcctcctcgtagcctacatccgcatcatgcccatgacagttgccagcactttcctcaccttgattctcctcgctaaggaaattgtccataaaaccccttgtaaggatatgtgaatggacccgctgagctggaagttgtctgtctttcttacaatcatggcatggacaccaaatatattctggtgcatcgactaagtttgtgctggtggacgtggcaacgagagccgttactcccctgaaatactccacagagtcacgatccgctatagttatccattctagatccattatatccagtgggtacctgcggttattatcatttattacaaaccatgaaggaaaaaaacaatgaagatttcatcatttacaagcacattagaataaaaacaactaggaatgaccattttaccctacgacaaaaaagaggtttttgcacacacccacggcaccttaattagatagtcatggctaacaaaaatattaaaaaaattctattttttgtcaatccgaaataatatttggctaatgtgaaacattaatgacgatggcatagatggaataaaccattaattcaaatttagcataacacccgagaacagatctacgaatgacttatggatccatacaaattaatgactagtgcattttacatgtattactgcatggcagttcaattcaacgagcgggtgtgaatcggggtgagaaattctgaatatttaccttgtaggctttaatcttcaaccaaaacccaagaaaaatcaagcaaaaccgcttccacctcctctagcggatcgatgggcacccttaacataaatttgagataaatcaaactatcaatggatattttcgtggccttaacatagtttgacaagcattaatttgactaatggccatgacgtagatcgaagaaaacattaacgcaaatttagcatttcatccaacaatagacacaaaagagataaaaagaattatccctaaaaacaacacccatagcgtattttacatgcatacgtgcagcacacgacaattcaaatcaacaaccaagagttaaacgaagcgagaaataatgaatatttacctttaggcttcaatatttaaccaaactgtcacatcctgattttcgtttcaggatttataaattatttaataaattattaatagaatttatattaaacgttcattaatttactagtgaagttaaatgtgggaaataaaatttcctaaatataaagcatggatggatttaatttttattaaattctccatggttaattatactctctggagttttctcggatttttcggagctcaattcataatttttaatcatacaaagagcatttcagtaattaaccacatattaaattaatcattaaatggtctaattggaattttgttaagtactttgagtgtccaagtattttca

SEQ ID NO: 29385 - DNA, 5101 bp, Oryza sativa
gtcgtcggtcgtcgtttggcacgagggtgagtatcgttgggttcgtctcgtcgtcctctacgtgttcatgtcctccaaatccgcagccggtcgctctatctccggcgaggtcgccatcttggtccggccattgatgatgtcatcatgacgtcatcatcttctccttttccagttttttctaatagattaaatcttcggaaattcataactaaatcatcgtaactcggttttgagtggttcaagttgctaaattcatctaaaatcatgatctacatgtttgtttactttatatgtactgtttatttggttttattagtctttttcttcgttttgcgtgttagcttgtcgtttccgtcgttgcgaaggttcgtgagtgcgtccgaagtgatcaagaagattacttgaagaccgattattgcaaggcaagtcacacagatcctaaacacaatcctttgagcatgttgatcctatatttaaattctctatttatttcaactgtgcatttattttcgaatgtcaccgggtggtgtgaacttattcctttgttatggccaatttgcattgattactttattccttgataccttgggttattataacttgactagttgggctttatatattggttcagctagatattagttatgattgcttagccatgcttagaaacattagcacactattgggataacttatgactcactattatttaaggatggcttaatgatagttcacgatggttaatcgtgattggttaattaattacttgccaactaaaacttgataatggtgggttgtgagcacatggttttgagagtcgtgctcatgacaattaaggaccggttcgcgagctactgttgtgagacatttatcgtgccaaccacaagccagcgtgggcaacggctttatcttttgtatagcgtgattcattatagtgcgccagactgagaagtggcgagaagtccacgggggtcgctggggagtccatgcctctggtttttgagggggtgattatgatccaagaaaggtgcgctgtaatggattatgttgtgcaaggggtattgtcacaactcctttccgaggtaccgtggtggtattgaggcacatggtgacatgatgtggggttgtgtcttgtgggtacagtggtacacctctggccagagtaaaactattcgaatagccgtgcccgtggttatgggcgggttgagcaatgtttttcgtgattagtctcacacctctcacaataattatggatgttaatacctgataataatttgcttagctcctggtttggagttagatctgtacagccgggtatggttgttcaggatggttgggcctgtacagcatgggtgtgctgttcagtgttgattaaaatttttaattaattactctactgttttactactcttaactctttgctaaatgctgctttcgcaaatgagcctatattatgccatcctttggtatccttgtgcacttgcatatttgctgtgtggcttgttgagtatgtcatatgctcattcttgcaataatcaatcaacctcagttgaagaaaaaggatccagaaggagaagacgtttggcttataccccagttgagctgcctgtgggagtggagctgaagccatcgctagaccgttaattccgctgctgttttcttttcttttgtaagtgtgtaacgttattattatgatggatttgtatattaaattgtcagtttgtgtacctcggctgattcctggacgaggattttatgcacaaataagttcggaaattactagtgaatttccgggcgtgacaagttggtatcagagccatcttgactgtaggataagccaaatggtcaaaccttaaggacaaatcttccgaaaacataatttgtgaaaattttcctttcttccttatctagaattctttgcaaatcgttttgtcgttcttcccccttcctctttcaacttgagtagtcgttaatcttgatggagaaactcgaagacgtcgatgttgtcaacttctgcaagtcaagtggatcgaggaataagaagatgatagtcgaatcttaagtgttcagatagagtgaagtttggaacctatcttagaacctatgccgccaaagtgtctttgaagaatagttagtagggtagaacgcttgttgtttgctttgtgtgtaggtatggttgcattcccatcattggagtagttcattgatgagtgtgtaactatactaggttgcttgcttaatcaacttgaacaatataatggtctacacacatcagatcagtgttaacctagttaaggtcttgtctttagtgtaacccctctccttctaccttttctaatctgcatcagaatggtgggatcatttccggatgaacagagcagaacgacaaccaatcacttgggaagagtttaccgaaggattcaagaagacacacgtacctgtaggagttgttgctttgaagaagcgtgagtttagggctttgaagcaaaaggatcgtaccgtggcagagtatcttcatgagttcaatcgtctggctcgctatgctccagaagatgtgcgtactgacgaggaaaggcaagagaaattcttggaaggtccgaaggatgaactgtcagttatgttgatctctcatgactatgaggattttcaggagttggttgataaagcaattcgactggaagacaagaagaacaagatggataaccgtaaaaggaaaatgactgtatcccaggaggcacaaggtagtagccagaggcagcgtatcaagccactccaaattggtgaatctttttctgcaggtcaagaacagtcacaacaacagtcacaacagttgggcatcagtggtgagatcaactcagagactaatgcaagcaatgaagacaatgatgagcaagctactcaatcagtgtcatttcagcaggatcagtctcaagaagataacagtaatggaagggagcatcgggtgtgtttcaattgttatgagccaggtcacttcgtaaaagagtgtccgaagccgaagcgtcaacagccacaaggccaagtcaacaacattgtcctcacaggagcaaatgcagtgccggttgcgtctcaagggatacagctcagccatcagttccaaagcagcagtagctttctttaaaaccttagaataattattggagttgtggaataaaagatagactgtagtttacctatgcctttttctttctagccgttccgaatctcgggatgagattctttgtaaggggggtagatttgtcacatcctgattttcgtttcaggatttataaattatttaataaattattaatagaatttatattaaacgttcattaatttactagtgaagttaaatgtgggaaataaaatttcctaaatataaagcatggatggatttaatttttattaaattctccatggttaattatactctctggagttttctcggatttttcggagctcaattcctaatttttaatcatacaaagagcatttcagtaattaaccacatattaaattaatcattaaatggtctaattgtaattttgttaagtactttgagtgtccaagtattttcaggatttttcttgaaattatttgagcattggaagtatttttaataattcaaagatcatttaagtgattattttaattgggaaagtaataaaatcctcctcctcagcttgggccattttcggcccattccttcctttccttcctctctcttccgccggcccaacctgagccgcctcctctcctctcagctcagccggaaaagtctactttccctccctgcgctactgttcatcttccaactcaggcagagcccgagccagccgtgccgtgcacagtgccgccgcctcttccttccaaatctcgcctccccgttgctctttttctccaattttgctgaggggaaatattcctcttatcctcctctatctttacccccaaaaatcggagcaaatcgttgagtatcttatccgaatcaaactcgttttcgagtttatctccaaaaccgagtttttgatttcccggatcgatttcttgcgggaggagtccgatctcttcaatccaaggctataaataggaccccctagtcctcctctttcgtttgccccctctcccgtcctcttccgtgctccgtagctccgtcgccaccgccgccaagcaaaccgccgccgccggccatctccggtgccgccgcgccgccgtctccatcgtcgtcgccggtcgccgtcaccaccgttgggtgcgccgtggtgaggggaagctcggccacccttccttttccgtcgccggtcatcggagctccgccgccccgtgcaacccgagccgccgccgtcgcctcctcgtcgccggccgtcgtcggtcgtcgtttggcacgagggtgagtatcgttgggtttgtctcgtcgtcctctacgtgttcatgtcctccaaatccgcagccggtcgctctatctccggcgaggtcgccatcttggtccggccattgatgatgtcatcatgacgtcatcatcttctccttttccagttttttctaatagattaaatcttcggaaattcataactaaatcatcgtaactcggttttgagtggttcaagttgctaaattcatctaaaatcatgatctacatgtttgtttactttatatgtactgtttatttggtttttattagtctttttcttcgttttgcgtgttagcttgtcgtttccgtcgttgcgaaggttcgtgagtgcgtcggaagtgatcaagaagattacttgaagaccgattattgcaaggcaagtcacacagatcctaaacacaatcctttgagcatgttgatcctatatttaaattctctatttatttcaactgtgcatttattttcgaatgtcaccgggtggtgtgaacttattcctttgttatggccaatttgcattgattactttattccttgataccttgggttattataacttgactagttgggctttatatattggttcagctagatattagttatgattgcttagccatgcttagaaacaatagcacactattgggataacttatgactcactattatttaaggatggcttaatgatagttcacg

SEQ ID NO: 29386 - DNA, 2837 bp, Oryza sativa
catgaggcacacgccacgggtcctcatgggcacttgccaaacttgagactctaatgctgtggcgtggaacttgggtccatccgggtgcatccccagttggttcccaacctgcctcatacatctgcacgagtgttgaggatgatgaactttcccgttcattccttgtcatgttgcgtgtctccctgtatgctccacttgcacgagattcttctatgctctacaggggaatggttagttcatgtcagttatacaaatgataccctgcatttggcaacgggattttatttgtacaaccggggaaaaagtaaatcaaagatccatccactccatacttcagaatatgcccttgcactagataggtctcatccatacacggacgagcggctgagataaaagcaattttgttgctaacgacacctaccccttttgctatctgagtaatcagagaagtgcactcaacaggagcagagaactttatactttctaaccattgtcttatcatacatttcacaggagcaattttgatctttctaaccatggcaaacatgataatcaattcatcccccctaatggtctaagatcacctctaggaaacaaagtcatagcaatccatttgtgcatgagcctaagtgtaggattatggatatcattcatcataggtttcttgcaaattggagcaccagaaatatcttcccaaaacctatttttctcgaacccagaaattcctttctagagatcgattttacagcaatcgtgaaaaccaagaagtgtgcttaagcttttccatgtaagtgtaaactccttacggaaaaagcgaaaggaaaatccatcttctatttctttcaaagtgcatagaaattgcaaagtaagcaaacgagaaccaggctcatctaccacagcaaatctctgccaaccaacagctttccaaatagcacgaaattcaacatccatatctatctttttcagcagctccggagagtattctcgtgtatgagcatactcccggttgctcagcatgtagtaggcttttctctcccgatcacagacaaggtcgaggtcggtgtcgttcaggagtcgtcgcggagcttcggcgtcttccaacgagacatcagctgatgaatgagtactagactcatcatgatgacttgatgaagagccggaccccttggacagatgagacaatcggctcctcattctgcacaatggagcaagaacagactaacccgacgggggttagaatagcaagagtttcacccaccggttagttccaccaaagcaacttgtatatatgcaactagtgtttgaatttgaggaaaactataaaagcttgaatgaacttgagaacaaactttggagagggaatgaaaatgtattgaaatggggtggaattccctctcggccggctggtttttatagggtacccacaactgtcagaaaagacatgtgggacccaatagccgttgcccagccaaaaatggtaggtaactgttgcctggccggttcggtcgaacccctcgtgggcccaaccggcaccactttcggccgttggattccaacggttagtgcagtcgtggcacagtgaattttcgttgaaaattttattttggtttgctctgaaaaattcatttgaagattttcctcaaaactcaaagaatcctaaatggaaattttgaaattcaaacatgtgttgatgcataaattcaaattgttaaagcaaaaatgcagatacataccaatttcctatggcgaaggtcgcgtcatttaaaatccgacgtgcaagactgtaccttcttctgattcagttcgtggattttccacccgtctctgaaggtgatggagcgggcgtgtttggcttttccctccacaccttccatggctttggtgcagaaggcggcttcttctcagccgactgctctgacttcttggccggtatagttggttttatcaacgtcctccaataacggttcctaggcatcgttgtttccttctctaggaaattctgcatgaacttcaccaggctatccgtcttgggtggctccacttcgaccacttgaatattctgcgggttcggcccgtactttatcctgaccatggagcattgttcgacccttggttgaaactcaaacttttcctccttcccgttaatatgaaaacggatacttcccgctcccacgtcaatgttggcttccgtagtgctaaggaatgggcgccccaggatgagcgacatctcttttcccgtgtccatgtctagcaccacaaagtcaaccgggatgaagaaatcccgtatcttgactggcacatccaccgccatccctgctgggtaacggactaacgagtcagctagttgtaggcgcatcagtgttggtgccaacaccgtgaagttgagcttgtcaaagacgtcttttggcatgacgctgacactggctccaagatcgcataaggcctggtcgaactgctgtaccccgatcgagcaggacaccccggatctttcttcttctttgggagcttgtggagtatcacgttgctgcattgctccgtcagcttaaccacctccgttgttgggagtggtctcttgttgttgagtatgtccttgagataacgggcatatgttagtacttgcatagcatccaacaacagcacgtttatgtggattttctggattacttcaacaaaacgagcgaattgctcgtctactaacggtttcctactccgttgaagaaacgacagcaaccgtgcgtcgtagtactcctgcggcatggtcttttcttgctaaacctctttgtcagctgagtcactagatagcgcttcttttgtaatcccgttagttcgtgcagggg

SEQ ID NO: 29387 - DNA, 10171 bp, Oryza sativa
tatataacttgtgattgactcctcaatcacctttgccatgggcatgcacttccataatctataacattgagggacccagagatatctctccataggaggggcaaatcccatcttgattattcatatcccacaacatgtttcatagcatacccgaaaactacttttatagctacccatttacggagtagcgtttagcagtccctaagtaagctactacacatgttgagaagcatgataatctcaggtctaaggattcaacaccaacactaaatgagatcactgatgacacaacacatatggctcttgcagtgtctcatgttgggtctatccaacaacatgttcaccaacatgtgtccatattattaatttggtatctctataccatgatccatgagacatgatcatcaattaatatatgtgctgatcatataaacatatttgttccacatatgatatttgatcagggatcctttagaaatagtaacaaacaacataatgattctcatgaaagaatcacatattcattaaccaataaggagttatctatttcaaggaacaatgttggataaatatgtaaacaaagtatgtgatacaatcatctctataattgcctctagggcatatcactaacagtctctcacttgcactagagtcaatcatgaacgtatcatatacccattgccctagtgtgtgcctcatgcttaggctgagggagtggctttgtcaacggatctgcaacattcaaatccgtatgtattttgcatatcttcacatctcctctacccactatctcgcgaatgaggtgataccgccgtaaaatgtgtttggacttttgatgcgatctaggctccttggcttgcgcaatggcaccactattatcgcaatagaggtccattgggctagaagcactagtcaccacacctagtcgagaaatgaatttctttatccaaacagcctcctttgctgcttcagaagaggcaatgtattcggcttctgttgtataattagacactgtatcttgcttggaactcttccaactcacagcgcctccattcaggcagaacacaaatccagactgtgatctaaaatcatctttgtcagtttggaagcttgcgtcggtgtaaccatttacaacgagctcttcctgtcctccattgactaggaacatatccttagttcttctcaagtacttcaggatattctttacagctatccagtgactctcacatggatctgattggtatcggcttgttgcactaagtgaatatgaaacatctggacgtgtacatagcatagcatacatgatgaatctgattgccaaggcatatggaatcacactcatcttgtttcgctcatcagtcgtttgagcacactgattcttgccaagattaatgccatgtgacatcggtaagaaacctttcttagaatcttgcatgttgaacatcttcaacacctttcaatgtatgtactctggcttaatccaattagcctctttgatctatctctatagatccttatgcccagaatatatgttgcttcccctaagtccttcattgaaaaactatttttcaacgatgtcttaacggattcaagcataagaatatcgttcccaatcaataatatgtcatctacatataggattagaaacaccagtgcgctcccactaatcttcttgtatacacaagcctcttcttcgtttttgacaaagcccaacgccttgactactttgtcaagacgaatattccaactccgagatgcttgcttcaacccataaatggatttctgcaatttgcatatctttttagctgattgtggatcaacaaatcccttgggttgtgtcatgtacacatcctcatcgagatttccattgtggatagctattttgatatccatttgccatatctcataatcgaaataggcagcaatcgctaaaacaatccgaatagattttagcatggcgactggtgagaaagtttcatcataatcaacaccttgaatttgtctgaaacctttcgccaccaatcgtgccttgtagatgttaaaatttccatctacatctgtctttttcttaaagacccatttgcactcaatggcttttacaccattaggtggatcaaccaatagttccaaacttgattgacatgcatagattctatttcggatttcatggctccaagccatttctcagagtctggtcccaccattgcttcctcataggtagtaggttcatctttgtctaacaacaatatatcacgttgtcctgtagttaacaacgcatacctcgcaggtgtacgtcgtatcctatcggatcttcgtgaagccggtgcttccacaactggttcaacaacaacttgttcaacctgttgaacaacatcttgctcagcttgtggttgtgtggacgttgaagcgttttccggtgtttcttgaatttcttcaagttgcaccatgctcccactatcctgtcttgaaataaactctttttccaagaaaacaccgtgtcgggcgacaaacactttgccctcttcccgattataaaaataatatcctttcgtttccttaggatatcccacaaagaagcatttatctgatttaggtgtgagtttgtctgattgcaaacgttttacatagaccacacagccccaaatctttaagaaagacaaactgggacgctttccagtccatatctcatatggtgtcttatccactgattttgatggaaccctgtttagtgtgaacgcaactgtctctagagcgtaaccccaaaagcttagcggcagatcagtttggctcatcattgatcgtaccatgtccaacaatgtacgattccttcgttcagacaccccattccactgaggcgttcctggcggagtgagttgtggaacaattgcacattcctttagatgatccccaaattctaggctcaagtactttccaccacgatcaaatcgtagatacttgattgtcttgcccaaatgattttgtacctcattctgaaattccttgaacttttcaaagtactcaaacttatgcctcattaagtagacataaccatatctactaaagtcagcggtgaaggtaataaagtacccaaaaccacctttggcagttgagctcattggtccacatacatcagtatgtactagtcccaatagttcacttgccctttcactttgacccgtgaaaggtgcctttgtcattttgccaagtaaacaagattcgcatgtctcaaatgatttaaaatcaaaagagtgtagaagtccatctctatgaagcttctgcatgcgtttctcatttatatgacccaagcgacaatgccaaataaaagtgggattcaaatcattaggacgttgcctttttgcattaatgttatagactgaacatccatcaagattcacaatgtataagccattcatcatgggtgcatggaaatagaaaatgtcattataatagactgaacaatcattgtccacttcgcctcttgctaagctcctacttcttttcagcccctgcaacgatttgcatatgtgagcaactgacccggtatcaaatacctaagaatcagtagaggaagtagcaagattaatttctataacattaatacctgaggtggaactctttccatcctgctgcttctgcttgaactgctctaggtatttcttacagtttctcttccaatgacctgtctccttgcaaaagaagcactctgcatccttagcgggccctgtcttttgaaccttggtcttagagttgctagtactcgtgatctcatcagagtttagctttctcttttgacaacttttcttgttgttgggcttgcgcttatgcacaactatcacatggttggagtttttcttaatgctttcctcagcagtctttagcatcccatgcaattctgccaaggtcctgttcaggttgttcatattgaaattcattatgaacggctcaaagctgggaggtagcgactggagaatcaaatcagtaaccaactctcggctaaggggaaaaccaagcttatccagactctcggcgtaaccaatcattttgatcacatgtgggctcattggattaccttctgctagcctgcacgcaaccaaggactttgaggtattaaacctctcagctcttgcttggtcctcaaacatgttacgtagtctcgtgattatcgtatgagcatccaatgcatcatattttctttgaagctcaggggacatagtagcaagcatgagatagcttgtatcaagataatcattgcatcgcttttcatgctccctacgttgagcagcaggagcattgttgggcaagttagcttgtaaaggctctgtaagcacaaactctttgtgctcttgcctgagaacagttctcaggttgcgataccaatccatgaagtttattccagtcaacttctctttctcaagaatagaccgcaagttaaaattggatgatgcaggagctgccatgatctacaatagaaatatatgtatgcaaaatcagcatcatgtttacatttaacctttcattaaacaatttaacaaaagatacttccactatgtattgtgaaacaaaattccctctagtaacatagtgagtcaagatcctcattttattagtgtctagtgagctttggcatcatagctagacaactatcaaaataggtaagcaacaccttgctaatcacatcatatgtgactcttgtgctgttggggtgacatctccatgtccaacccaacctatgccccaaggtccaaaactgttttaataaccttgtcaagtaaaccaataatctccgcacatagatgtccgacatctatcctattttatcatgataaaaagtgacactttgctatgacaaacccatcacttatgatcacaaccgtattaggtgcaattactggaagagcataaatcacacttaatttttctgagggaatctatcctaccatgtcatatcaaatatacaacagcagtaaagtaagatagatataaaaaccccaagcgaaatctaaggggcaacgcacacggcggtacatagatctgagggaatctatcctaccatgtcacggggtacatagatctcatctacgattcgccatgtgaaaaccttaacggcgtaatcgaattatgccgaaaccgagtcaatctcactggctcattttttctcattggcgtacggttccagtggacatcggactatccgatgaacacaatcgcgctcagccttggtgagtactagacattccagtgaagtcaccaacccatgcgactatcggttcatctcatcaacccatgcggctatcggttcatctcatgttccgatcacctaagaactcatatacaacataatagatctcatctactacacccgcatatcaactatatgcaatgatctagatcataaactatacaaggcggctctgataccactgttgggataagcgtaagctacgatagcataaatcaaacatttctatcgcataaaccaggaaccaagcaagtattagatcatatatcgttaccactcgacgcgctgcgcagcggaagaagacactgagaagtcgaagaaactctcgcgaagtagcacgcgtcgttgtagaggaagtagtcgatcgcaccggctcgaccttctcctcctcgtgcgttctccttgccgtactcctacgctgatcagcaccgcaaaccagcggcgcctctaccggtatccacacatacagggacgaaacgccacgcgcagatgtgctagcacccgcgcgcggctagggttttgctcggggagggaagtgacggctagggtttctcacgtgatgcaatgcctccaccggtcacacccctcacgaatatataggatccatcactcgggcctccaaggcccgtaagactcctatttggatccctatacgaagtatgctcatattggatctccatccaatccccttagtccggcccattaagcgtgcgaccctgtaggttcatgtatactcggctgcaacccgaaaactccttttcggtccatgcgtcaacagcggctcctagtagaacgaattgacccaccgtgcatacataaagatcatatcggctgaacctctagtgtatacttgtatgaacccctttgcctcacgatatcgattaagctcaaggctagatatatgccatcctctaatagctcaatcattcactcgaacctgttgatagattatgtaacttgtgattgactcctccacctttgccatggccatgcacttccataatctacaacatcgaggggcccagacatatctctccataggagggtcaaatcccatcttgattattcatatcccactacatgtttcatagcatatccgaaaactacttttatagctacccatttacggagtagcgtttagcagtccctaagtaagctactacacatgttgagaaccatgataatctcaggtctaaggattcaacaccaacactaaatgagatcactgatgacacaacacatagggctcttgtagtgtctcatgttgggtctatccaacaacatgttcaccaacatgtgtccacattattaatttggtatctctataccatgatccatgaggcatgatcatcaattaatacatgtgctgatcatataaacatatttgttccacatatgatatttgatcaaggatcctttagaaatagtaacaaacaacataaagagtctcatgaaagaatcacatattcattaaccaataaggagttatctatttcaaggaacaatgtcaaataaatatgtaaacatagtatgtgatacaatcatctctatgattgcctctagggcatatcactaacagtgcatgcctcgctgacgggtctggagtcgttcctcgctccaacccatattggagaccatcttctctattaaatcaacggttcctcgaaccgttttagagaagaatgctcctccagctgcctcgaccatgtgatggcgggacattggggtgagtctattataaaagttctgcaggattaatcagtcttccatcccatgatgaggacatgcggccacatactcctgcagacgttcccatgcttcccgaatggactcgtcccttgtctgctggaaactggaatccgtccatgaagggcattggttttgcccgttgggaagaatttcgagaggaatgccgtagaacatttgtcctaggtgttgacagcagcatgattggcgtagaaccactgcttcactctcccgaggagggagaacggaaacagccttagcctgacggcgtcgggaccgacgcccttcatggtgcacgtgctacagatctccaggaactgctgtagatgagcgttggcatcctcgttaggcttgccacagaacgggctagcctgtgccaacgtaacgaggctggacttcaagtcgaaatccacgtctcccatgttgatctgtggccaaatggccacattctcagcagagggagcagcgaactcgcgaagggtcttgtcagccatagtcttgaaggatgatggcgttggtacaactggtttctctgtcggtagagttttctgcggagcaatgactcgcgacctgatgctccggatgaaagcttctagattttcttgaagtttcccggcaagttggaaccagtcatgcacgaccctgttttcacaacaaaagtgaaaacaaccaaggttatacagaggtaaatataaagtattagttcagttaatctctgttatgaatcttccccttcaacggcgctagaaatgcttgttggtatttcttaacaacattattagaaatataattcccagcaatggcgcaaaaatacttatggtatattatggttatagagtttatccgcaagcgcacggatataccattgtagcaattcacccgagagtattccaagggtatcatatttattttatcccgtgggaagatcatgtagagagaacttgactaataatttatatattacttgtgataatcatattctaagcaggggttagaataatccaagggtagagtgacacacaagcattagctacttattctcataatatattatctaagctaagtggaaagaaaagagaaagataatctattcctatacttctaatatatatagtatacatacattcttgttatctgatatactagctagtaccctctatccgatgctctcctggtactctgagaagccacccctgactgtcgagttccttacgacagcccattatgaccatacaaccggggctaaataaggaggaataccctccccagtgaattaacataggattatatacacacgcggaggaatacccgtactgagctattgccatcagcggcccacctctcatccgcagcatataaccccaaataatgatatcctgtaatctagacaccacgtctaaactaccagatactactctaatatcatcgtcatgacatagagtaattgcatacacaaacattatacctgcaccaaagcatctcccagataagctagcagtatattcagtataacatgaacataatataaagtaggcattcatatactcggaaagtatttcaataccataaatgtataaagaagagtattctaataaaagtacaaagcttacaaaagaggaaaggaaagctactagagtcatacccgaactcttccgaaggcttccggactcctgatttctactctattcttattccactagctagatactactaaactaaacttgagagaatatgagagagctattgcttgaggtgtgtgagtgaagtgagaagagcaactccttttatagcctcccaatgacgattgtgatggttggaatggtcagaaataccctccaaccgtcattgggggataatccacaccgtccaggcgaagccctggatcagatggcgctgatgagggttcggcctaaccccctggttcggccaaatctagggccggcccaatccagcccaatttcggctagcggcctcctccgttgttcttctatgcaaacttgtgaattttggcccagtttgtcgtgtcaattctaagttcttggcccattcatacataagtctgattctcaacatcgcccgattgatttatcatctatgttgatgtcgattctcctccactttatttttattctctgcaaaaggttagtgaacctaatactagtggaatattattattctaacatgtatatgcattgcaagcatcactagttctcctctattttggctatattgatggtcgaaacttatcgataacgaccgtcaacaggcttgaaagagaatacgtcccacatggtagagctgaaagaacccttgtggctgcgattggaatggatatcccttgaagaatttatcacgataacactattccatatgattatgcgaaagtgcagttgcaagtggtgaacaaagggttagagtcatacgatctggacatccaaactcctgatggcatatccgtacttggggatgcggttgacattatagtattgtagcacataaagatatactctttgggactggcaacaatgctctgtcgaaaccactgagacctcctcaaaaacaactatcgaatgataaggtggaagaacatgagcaacctaagagcactgaagtggcatctacatcagcaatattgtcaattatgccagcaatagaaccgaaatcgaagtcgcaacaggtttggaatgggtcgaaatagaaccagatgtgtatgaggatccatctcctgcaaaagacaacgtggacgcaccctcggtcgatgactatgtcatcgacaagtccgaagtgcctaaactggtcaaaagccacaactccaagtccaaggataatcagaaggtgaagtggatggtaaccgccttctgaggtggtaaaaaacgtgccaaggaaagagatgttgatgagaagaagaccggtgaacttgccggcccaaaatactttggaacagatgattgtctggcagtgtttgaaaatggcaaagccttttggctggattatgcacttgaagaaggtccgtgggagatgagaagattacataaatggtacacggacgccaacaagaaaggcctaatgtcattagctgtttgaacatcacctgatgctttcatggccgaggaaggtttcttgtggctcaatttcgctgatcttcacgccgtctgtcggtgacatgggatcaggagtatcatgact

SEQ ID NO: 29388 - DNA, 3792 bp, Oryza sativa
  unsure (1)..(3792): unsure at all n locations
ccctaaccacatttattgcggtttggctgagcgcgtcatgccgcatgtaacgcagtgcagtgcactcgtttatccggtctgtgaccagtcacagactggtcagatcgcgggtttggtggcgacaggcgatctgacgcacgcctcgccccatcccgtcaggacgagggcttctaggcgctcgtccccagctggagctagcgtgttacctcccagagatggcacgttagtcctagtcagatatatgccaggcttcatcctaaccattacaggcaagatgttgtgtgaagaagggcgaacatgtagattgctaagctgacacgtggtggacaagaatgaccgacgtgactggtctgacaccggtcatgtcgtcagcagacagccacgattccacgtcgcatctgctcccggcgaaagtggaggtagttgtgggccgtctcatcagatggtgactcggacggcaactatacaaatctccgtccatttatgaaaaggtggggtaagtccccacaaaaaagagagaaatggtgcatgtggtatccccttaagatataaaaggaggaccttgcccactgggaggggggactggacttttccagatggggaacccagaacaagggagaggctggctcatactttgtagctccttcatacacagatctcccaaaacacaggagtagggtattacgcttctcagcggcccgaacctgtatacatcgcccgtgtcttgtgtgtttcctgtctcgcgagccttccacatacagagagcttagaatctcaccctgagtccccggccgaactggcaaaggggggcctgtgcggtctcccagtgaggagccccacgctccgtcatctggcgcgccaggtaggggactctgcgagggattttctgagctctcgcactctttcgtgtgcgccaagcttttcctgttcagcccaatggccgagccagcaaaggcgcacgacctctccccgagtatgagcggtgacgacggggagccaaacccacgccgtcgagctcgtactccaccgccccctccacgccaaagtcctatgcgggagaaggcgctcgagagggccgaaggatccgcgacttcgacacccacaggaggtggagaagggcggcgagatggggagcgtcncctcctcgtctacggcgatggcagcacgccccagggcgcgctccaagctgcgggcgcgctcctacgtcacccgcccgtcgcccatgacccggagtctccagcccaacgttggctggacgatgtggccaaattgatcatgactgcacggcagcgcctagatgctggtgggcggtcctccgccaccaaggcctctggtgctgctaccaccggctccgcgtcgtcaagacggagggcgcggcgagcggcagccgctgttcgccattcggccgccactccttcgtcaacgcctccgacccggaaagatctgcgtggggaaccggatgcccgcatcagtatcgagcgccggcgtaatggccgacgtgctccccacgcaacggagggcgcctcctcgtccggagtgtcacctcaccacggacgcggggatcagccctccgtgcccccggttgttggtgtcggctgtagagcctttgtggcgagccttcggaatgtccgttggcccccaaggttccggcccaccatcgccgaaaaatatgacgggagcgtcaaccccgccgagtttctccaggtctacacgaccgggatcgaggccgccgggggtgacgacacggtcatggcgaatttctttcccatggccctgaaaggacaggcgcggggttggctaatgaacttgccacccgcgtctgtccactcttgggaggatttgtgccaacagttcaccatgaacttccaaggcacatatccgcgcccaggtgaggaagcggacttgcacgcagtacagcgaagggatgatgagtcacttcgctcgtacattcagcggttctgtcaagtccgcaacaccataccatgcatccctgcacacgcggtgatttacgcgttcagggggggtgtgcggcacaaccgcatgctcgaaaagatcgcctccaaagagccccagactaccgcggagctttttcagctcgcggaccgagtggctcgtaaggaggaggcatggacctggaacccctccggttccggtgtggcagcttcggccgcccccggatccgccgctcagatagggcggcgtgacaggaggaggaagaagaggtcagcccataccgacgacgacggtcatgtcctcgccgtcgagggcgcttcgcgggccacccgaaaggggaggcctgcgggaggcaaaaagaacgaggccggcgctcccaacagggagcgcccaaccggcaagtggtgcaccgtccacaacacttcccttcacgacctcgcggactgccgtgcagtcaaaagtttggctgagcggacgaggaagtgggaggagaagaggaggcaggagcgccgagagggcaaatccccggcggttccttccggtaatcggcgaagtgaggccaagcagaaggcccccgccgaggacatcgatgacggcgatgatgacctaggtttccaagagcctggggccaccattgcaaccgtcgatgggggagcgtgtgctcacgtttctcgccggagcttcaaggccatgaagcgagagcttctggccgcggcccctactcatgaggcgacgtgtcgggcgcgggtggtcgaggttgccctcaccttcgaccagaccgaccacccaccgtgcgttgcccggggagggcagattgcgatggtggtttctcccaccgtttgcaacgtgaagttggggcgtgtcctcattgatgggggagcggccctcaacatcctttcccctgcggcctttgacgccatcaaggccccggggatggtgctccggccgtcccagccaattatcggtgtgacgccggggcacacgtggccgttaggtcacattgacctaccggtcaccttcggtggatccgccaacttccgcacggagcgggtgaacttcgatgtggcggacctcagtctgccctacaacgcggtcctggggaagcccgcgttggttaagttcatgcggcggtccactacgcctacctacagatgaagatgccgggccccggtggccccatctctgtccatggcgacctcaaagtcgcgctcgcttgtctggagcagcgcgcggaccacctcgccgctgcgtccaagcccgagggtggcgacgagaggcttggcgcctccgcccccgccaccccgaggcagcggatgatcacaggcgacgaggtcccggtcaaggaggttgccctgggcgacggcccgtccaagaccacacggatcggtggtcttctggacggcaaataggaagacgcgctcgtctccttcctgcgggcaaacgctgacgtcttcgcatggagaccggcggatatgcccggggtccccagggggttgattgagcaccgtctcgccgtgcggccgggcgcaaggccggtccggcagaaagtgcggcggcaggccccggaacgtcaagccttcatccgcgaggaggtggcacgacttctggaggccggattcatccgtgaggtcatccatccagagtggctggcgaacccggtggtcgttcccaaggcgaacggcaagcttcggatgtgcatcgactacaccgaccttaacaaggcatgtcctaaggatccttaccccctgcctcgcatagatcagattgtcgactccactgcggggtgcgaccttttgtgttttctagatgcatactctggttaccatcagattcgcatgg

SEQ ID NO: 29389 - DNA, 1205 bp, Oryza sativa
tatgggctgacctcttcttcctcctcctgtcacgccgccctgtctgagcagcggatccgggggcggccgaagctgccacaccggaaccggaggggttccaggtccatgcctcctccttacgagccactcggtccgcgagctgaaaaagctccgcggtagtctggggctctttggaggcgatcttttcgagcatgcggttgtgccgcacaccccccctgaacgcgtagatcaccgcgtgtgcagggatgcatggtatggtgttgcggacttgacagaaccgctgaatgtacgagcgaagtgactcatcatcccttcgctgtactgcgtgcaggtccgcttcttcacctgggcgcggatatgtgccttgaaagttcatggtgaactgttggcacaaatcctcccaagagtggacggacgcgggtggcaagttcattagccaaccccgtgtctgtcccttcagggccatgggaaagaaattcgccatgaccctgtcgtcacccccggcggcctcgatcccggtcgtgtagacctggagaaactcggcggggttgacgctcccgtcatatttttcggcgatggtgggccagaaccttgggggccaacggacgttccgaaggctcgccacaaatgctctacagccgacaccaccaaccgggggcacggagggctgatccccgcgtccgtgttgatgtgacactccggacgaggaggcgccctccgttgcgtgggcagcacgtcggccattacgccggcgctcgatactgatgcgggcatccggccccccacgcagatcttcctgggtcgaaggcgctgacgaaggagtggcggccgaatggcgagcaacagccgccgctcgccgcgccctccgccttgacgacacggagccggtggtagcagcgcgagaggtcttggtggcggaggaccgcccaccatcacctaggcgctgccgtgccgtcatgaccaagttggccacgtcgtccagccaacgttgggctggagactccgggtcagggacaacgggcgggtgacgtaggagcacgcccgcatcttggagcgcgccctggggcgtgctgccgtcgccgtagacgaggaggcgacactccccatctcgccgcccttccccatcacccgtggacgtcgaagtcgcggatccttctaccctttcgagcgcctcctcccggctaagaccttggcgtggagggggc

SEQ ID NO: 29390 - DNA, 594 bp, Oryza sativa
tgcatcccacacatcatacaccgggacatgaagtcgagcaatgtgcttcttgacaacaacctcgatgcccgtgtatcggatttcgggatggcaaggctgatgaatgcgcttgatacgcatctgagtgtgagcacacttgcaggtacacctgggtatgtgccacctgagtactaccaaagcttcaggtgcacgaccaaaggcgacgtctacagctatggtgttgtgctcttggagctcctctcaggtaagaagccaattgatccgactgagtttggagacaacaaccttgttggttgggtgaagcagatggttaaagagaacagaagcagtgagatctttgatcctacattgactgatagaaaatcaggggaagcagagctctatcagtacctgaagattgcatgcgagtgcttggatgatcgacccaaccgaaggccaaccatgattcaggtcatggcaatgttcaaaagctgcagcttgactcggacagtgatatcctcgatggcttttcgatcaattcgtcaactatagatgagtcaggagagaaatcaatgtaatgctgtctagttcttgcagattttgattatccgaagt

SEQ ID NO: 29391 - DNA, 4149 bp, Oryza sativa
gtgagcacacttgcaggtccacctgggtatgtgccacttgagtactaccaaagcttcaggtgcacgacaaaaggcgacgtctacagctatggtgttgtgctcttgaagctcctctcaggtaagaagccaattgatccgactgagtttggagacaacaaccttgttggttgggtgaagcagatggttaaagagaacagaagcagtgagatctttgatcctacattgactgatagaaaatcaggggaagcagagctctatcagtacctgaagattgcatgcgagtgcttggatgatcgacccaaccgaaggccaaccatgattcaggtcatggcaatgttcaaagagctgcagcttgactcggacagtgatatcctcgatggcttttcgatcaattcgtcaactatagatgagtcaggagagaaatcaatgtaatgctgtctagttcttgcagattttgattatccgaagtggtaaaatatcagactagctcaaccattttggctccatggtagaaaaaaaggtagtatcctccaattcagtaggaaaagttgtaattttggttcaaatcactgtacataatacatcaaagtatgaaggagaacacggtggtaggatttaatttcagaaaaaaaaggcagttctctttacctggagagactagtatgtaccaatcaaatttcttgcttttgagcatcaatattgtcaagaatgtaatacatattagctttccttacacttgcatgtgttttgactttgtgaaaattgagcttcttgtatctgtcagtttctggttgatatcttgcagaaaagaactggacaaaagagaatttctgatgtttaatcttctggcaagtccctttcccctttttgtattgcacagttgactaaaactgcaattgtatttattatttcccagcatggctatgtttgtttgaccaaactgtaaaagatgttgccgatgttgccagttaccacatcatatttgcttaggggtgttagacaatggcttaggggtgtaagacaatgtgtgaaaaaaaatccagccactggattttgtgggcagtcagtacctgaatcatgttgatagtacaggggttttccttgtctgcttcttgaatgattgctgtcatgacaaaactgtacagcataaagaagttttcagttctgctgacactgtctgaaatggatcttgtggacatggcagtacactttcccaacaggtagttatggacaaactgagcagcacaaagataatgcatggattatgtactctttttcttttttcttcttttagaaaaatgagaagattacatgaattttgctctcattctgtgtttgtgataatattaccagcttgggagatcagttctgtttttgaaactttagtagatgctacatatatatacttgcaacttgctattcttttaaagtcaggtaagaagatttttttactcttgcctttttatgctgtgagtgtgatggaaatgtagtttatactgtcaacatggtcatacctgctgaagtttggaagcatctgtgtgcccaaaaagaaaaggaaaggtgcatctttcattcattcatacctgaagcactccctctttttccacccaggaacattcgcttttctgctgtcaaaagtggtgcaatttcggttggatttatactctttctgactttgaaaaatactcatgttgctcactgactacctctgattgtagattaggaccaaatggtactactgtcttgataaacttatattatctttgatgtggtcgtgccgttttcgagtgtataactttatccatcagggtttaaatactggcgagcgtaattaaatgcattagaaattattactttcattattaaaattaagctagtatttttttcccagtaatcattatttttctttgcctgactaattaattttccaagagagattagatgagcaagcaaggtaccaacgctatcacatcatcacaaatattttcaaaaggatttggtaattaggtagctgacctgcacagcaggataagaagatgttgcacgcgtgcgtacgcccgcacgtgtgcatgccgctgccgttggattctaaaattagggctccgtttctgctgatttgtacaggattaggcaggaggattacgactttagggacaacgactaccctttagttttcatcttctttgggggtcccctgtatatatatatgggttcagatcctttgtggttatggtcttgtgttgtgtatccgcataatttcgatgaggtaaaattgtctactagacattctagatttattttagataatggacatcatcctggcctctacactccaaccggacactgtggtattgtgagggatgtcacagtgagagtcattacgatccgatgttattttgacggatcatagtattgttggttaaacgccatttttttttagatccgcaatgtctagtagtcaattttttttgtctaccaacgatagcactgttgatatagttgtaggtatatggctctacatggtatctatattcacgcacataattattattctaaaaggaatttagtgaggttcttcgatttattgatgcctcaatctcttaaccatgtgttaataggaacactcacaggtgtgtcagtgcggtttacatgtgtggtgctgtaggtacattttccatgtagttgaattattttgcgtagtgttgggaaaaatatatagaggctatttatgttttgtcggcaaaaatgagcagtaatggtcggcaaaaaatacagcaagatgctaatgcggtgcttactctggcacaaacaattccccttaataatggtcccttggattggcgtcccgtttgcacttttgatgtcatcaactctttgcatctcacaaaggggatctctttgcacactaccccttaattttggtggctgtgtggaaaaggtagagctaatcacctaattagatgacctggttgttgttgttgcaaaaatggtcaaacataatttgcgtgttcctttgggttttggatcttttttagctgagagatcagagatggagaaatttttgtagttaggtagaagtatgatgtatattttttttcagaaacaaagacaacttcagatagtgatataggaatcttatcttattaacatgaagtaaaactgtttagtaaaagtagaggtcatatgtgttcaacaacaacaaaaaaagatcaatgaaaatgaaataataagataaatttgaactccaccctgatgctgaactagcaatgtttatgtgattgtccattcatttcttcataggatgcttgaaaccatcatgatgaacagttgattaaaaaaaaataattatgtgtatttacatggtagacaaagaggagtgccatggaaggggaatgaattattgctacacaaggagtggctcaactggtgccaatgactgctgctctgcagcctggcaatcccatctgtagacagctacaggtgccagtataatcatcttgcaggccaggagtatatatacatatactactacaggtatatatacaaatgtcacagcctttttcccctacatagtggctacaggtataccaaataaaggactcaacattgtttatttataaacaaaggggagagaggaagaaagagtttagccttcaaagctccatcgtttgcttgtggactccacaattaaaattcgaattttcaaacttgactttcatgttttttatcgtagtttatttttcaggctttaaatctctaggaatacgcatatataaaagttttactcataaattatttttagttgcttcatttattattccagcaaacaatgggacacaattcaccttaaatccttaaattgtatattgtgaagtcttaactgatctctagtctaatcttcttttcctcttgtgctatcacattcgtacttgctgacaagctatgtgtatcaggtattgatgtactgaagaactgataagaccaaacaggctggtaggtcatcactgcaaaaattgtctgttcctcacaaagaaaggaagtgcaggcagtggctttctacttcttctgcagaagaaagctaagagaggcttgacaccaaaaagcagctctgtacaagagtcaagaagcatgggcacacacatctttaga

SEQ ID NO: 29392 - DNA, 5334 bp, Oryza sativa
ttctacttcttctgcagaagagagctaagagaggcttgacaccaaaaagcagctctgtacaagagtcaagaagcatgggcacacacatctttagatctcactaccaccatggcaggcactgtcacctatcaatgaggtttgccaaatatcagcaaggctgcagactgacaagcatagtcagcaataaatcagtgccaattggctaattgtcataccttctcatgatctcatctaagcagtggttgcaatatgcatttttagataatgagaatgtattacatctccggcctctgccataaggcacacagccaacgaggttgcaaatacggatggactgaagaaagttcaatatacatgccagatgatgacaaaggaacacattatatttgttaatggagttcagctgaaacatacgtcttcggccttgattatattatgtgcacagttcaattactgtcttacttgagccaagagcaagagatggcttgatttggatccaatggtgcttgataatacacatataacatacttcctctgttttacaatgtaagtcattctagcatttcctatattcatattgatgttaatgaatctagacatatgaatgtgagaataatatatatctagattcattaacatcaatatgaatgtgagaaatgctaaaatgacttacattgtgaaacagagggagtacaagcctgttgattctgaaaataacagtaaaggcatcagatagaaatggaccaaaccaccacaaaattatgaaaaatatgtgttgatgcatacaagtctgactggcttcttgacaaggttacaataatcacaaatgacatgatcacgcacgctcttcagggtataaaccaaagtgtgaatcaacatgggatttacagatgatgcaattttgacagtactgtacagaaacgggcaattagttcagagagacataaccatcttggatcttaacatgacagtcaaccaactagactcgatttcttgcaaggtgcaacgttgtcaagaatgatagctgctaacccattgcgtatttctgggtccaggccctcgccgtctcctcataacgtggcctctggctcttgtagacgtgggcgatctctgggacaaggggatcatctgggttggggtcagtgagaagagagctgatggataggaggacctttgatatggtcaatgctgggctccactgctccttgaggatgtcaaggcaaatgcttccattggagttgatgtttgggtgatacacctgcatcgtcagtgaaacgattcatcatttatggcattagtggagaaaaatgacaaatatcactaacttcagaataatttatcaaatcatctaggcttttacgccagcgtcataacaatctagtaactagctaggtgaattaatacaatgtgtcttgcttgaatctttcctgatatttagaataggatagcaatacaactgttcttttctgatatatcggaaagattactgcaaactgttagcacatattgttatcaattctttgttcaactcattccttgaagagattatgatagtggggccacactctagggaaccaacatgatttcagttacatctgggaatggcagtgaatcattgctgagcgcagacagattggaactatcaaatataaactccatattgtccattccaatttgtgaagaagctatatagccttactggttacaatttttgatgattttaatttgggactcacctggagaaacatcgctacatggcatttccgaagcatgtaacaaagcatgcaattgaatgagaatttcagtctgcaacagcctttgcccaagtaatttgtcagaagtgcaatactaccagctcaagcttagagtcgcattatagttaggcagagcatttttcttatgtttttcccctgcttttcccctgttttctgttttgtcaaccttatacttattttcctaaccccattatcttaatgaaattatgcaagggatctcctgctatctgggacacaaagtgataatcacagtagcaatgtgacagtaagaactgcaaataatgattataaacagtcagtatgattttaactatgaaaacaatgatgctacggagaggcataaattttagccaatttgtggtgaactgtgctttagaatttacaccagtacataactttttactgatattgactgatttataaattctcctattcatcttgaatttccaaagaccgcactctaccttatctagtacatatcaataataaggttaagagtaacaatttaatataatcaagaagttaaaaaaacaagaaagagagacaggtaaaacaaacaactcacctttgtttggaagttcacttttggaggcttaaaagggtagtcaggggggaaatggatgttaacaaagaacaccccaccagcgtaggggctgtcgctagggcccatgattgtggcctgccaatggaataaatcctctcctgcaggcccagcactgcatgatgttggtggatccttccgcaaatccatgagttccttctgaatccttttgcttgccatatctgggtaagtggaacacagaatataatgattaaggcaataatgcacaccaatatgaatatattgcaccttctttcagcttgaatttgataagatggatctcctcatacaaaattttcagaagtactgaattatagtttcagaatctggatatgactactaagtaattactacagtctatgtactcaagagaaattccttgttgtctgcatagcatgggtctcaactctcactaaaagtttgtaggagttcactcaatttttgtatgccactttattctttttgtcgcttaatattaataaacagatcacaatgccatattatataagatgacacaaacaacagactacaaccagatggaatagtcaagtgaagcacaagctgattacttcagtatccaagtaggttgcatccatagtgctatcatcatacagcttagcaaaacaatttcttgattaaggttatcaaaacacagagttataattaacttactcagattacaaactacactgatataggttaagtaaaattttcaaatcattgacatatttgtgttgattgacattcttcagtaaaacgcccaccggcgtcccacaacctgtctgtttcaccaagaaaccaaaaccaccaacttgcctaaaattaaaatcaccttccctcctttccccaagtagcaaatccaatttcacatttcctgtttaagaatctactcgattgtgacagatcactggtcagagcaaggccctacagctcaaacaccaaactcatctgaaatttcagcagaaggaatgcgcaattaattctttctcctcgttcatccccaagtcaaccccgaccccaagatgaccaaatctttctaatcttgcgatggctacacaaccccaagtaatcttaagcaaacaagctacttctattcaatcatggcgtgcgtcgccaagaactcaaccaacgttcaaaacgaagaaaaaaaaagagaactaaacagaacaagaactagtacactttgaatggaccaggaaagatttggaaagaaactgaagattacctgcagactagagagctcagattagatgtatcctcaatcgggtgaagagatttggaaggaatcggctgcggcgacgatcgatggagcgtgggggattacgggatgggggcttaatcgtgggcttgtaggcctgagagaccctggatcgagtcttcgcttgtgtgcagttggccaactggtaattcttttttccttttttttctagtggaattgcactttgcgccccttttctcaccttaattgcatattggaccagggtctgctaaactttgcacttaatttctgttgttagatcaaatcaatcaagagaaatttgttgccattgcccattttacatttttcccctccaaatcgatattactgtagtaacatatactcaggccttgtttagttcgcggaaagaaaatttttatgttacatcggatgtttgaccggatattggaaggggttttcgaatacgaatgaacaaactaatttcataacttgcatggaaaccgtgagacgaatttattaagcgtaattaatccatcattagcacatgtgtgttactgtagcacttatggctaatgatgaacttattagtttttcattttatttatatttaatactatatagatatgtctaagatgtttgatgtgacgtttttggaaaaaaaaatttaggacctaaacaagggcctcaatgttggttcaaaaccagcagcaaggaccagttatgaatctttgacatcctctcagggtcgatgctatcttcgtaacattgtatatttaactttttatctttaaaacattgtcatcgcagtgatgggtactcatcgctggttcaaaacccagtattaaaaccagttataaatcgtcagcaattgttggttcaataccggccgataactcatcttccatagatttggactgaaatgtctgaaatccagagaatttcatccattttagtgaggtccgagacaaaatttaaatcccattttgtaaattttggtcaaatttcatttggaatttccaatttttgtccatttcagcggagccgaaatttttacgcaatcccatcacagaactttgccaacggcaacgcattgcgcatgacgcaaactggcagagtaggtgtagtcatgaggacgaatagaaattaacgcagcagcagctaatccgattttaaataccatatttagccattttgtgatttttaacatacaagagtcgaatgaggaacgaagcaaaactgatcaaatattaatatgcatattcaataggaaactcacaagataatttttattactgacaataagtaccataatatagagtgatatggctatgtataaatgaagctattttctactacttaaaaaaacaagacttacaaagatttaaatgacttaaatgcactacatgtcttcagtggcagagcttagtggaggccatcctaggtggtccccaccatagccatgaactgtatatagggagcatgcatatgctctcaatctctcatcttggatagttgtagtgtgttggcttagttgttattgcttttttttatagtgtcgcgggttcgataccagcatcacagttatttttctatttttcttattttttctgtttctcagcacatttctatttttcttgctttttcagttcctcagctcattccagcataattgttttcttttttttcccaggtctcaagtcttatacttcctctgtttcacaatgtaagtcattctagca

SEQ ID NO: 29393 - DNA, 520 bp, Oryza sativa
ctggttgtgcacaaactagtgaccagtggattcttgatactacatgcacctatcacatgtgcccgaatagggattggtttgccacctatgaagctatccaaggtggtactgttttgatgggtgataatacaccatgcaaggtagcaggtattggaacagttcagatcaagatgtttgatggctgtatcagaacattgtcagatgtgcggcatattccaaatttgaagagaagtctcatatctttatgtactcttgatcgcaaagggtacaaatattccggtggagacggaattttgaaggtaactaaaggctctcttgttgtgatgaaagctgatattaaatctgccaacctgtactatctgcggggtacaactatattaggtaatgttgcagcagtttctgattcattatctaattccgatgctactaatctttggcatatgcgttttgggcatatgagcgaaaatggtttggcagaattgagcaagcgaggattgctagatggacaaagcatcgggaa

SEQ ID NO: 29394 - DNA, 6162 bp, Oryza sativa
tcaagcttgcatgcctgtagtttgttttcttaggggagtttttcttcctttgtaatcacccaaaaagatgaccggtgggcatccatagaaacaactgtacaactgatcagtaatcctatgagggtatcacgaaaataagtgatctcgaccattaatttattagttctattatcaagataaaaattgatcaaactataccaaataatctgtttcctatatctcgcaagtcagaatcaactgtttctgtcgagaaatggaaaaccaacgattgtatttaattccgggtgggctgccatcgttacttgctttttttttttctatctgaacttgctttttggttaaaaaataatttaaccgaagactagaacagatcacattgcaggcgtggttatagatggccaaagggcccgcccggcacggcccggccctggcccggctaggtacggcccagcagccatcgggccggcacggctcgataggcacttcgtgccgggccgtgccggcccatgggctgcacctcccgcccaggcacggcccaccagctgtcgggccgtgccgtgccggcctgaaggcatgggtggtccatcgggccttttttaaaataagtatatttttcgttcctcctctttgggctatttcatatgtatagctaaaataagtctattttccgtccctcctctttgggctgacatatgtatagctaaaataagtctattttatgtccctcctctttggctgacatatgtagagataaaaaaagtctattttagatccctattctttcgtccatggcatataatatgtctatttttactcccctattttttttgtgtatcgggcctagctgccggcccatcgtgccgggccggcccaacatgccggtggaggggcccaggcacggcccggtggtcggcccgggccggcacgggcccgacctctgtcgggccgtgccgtgcttgggccgggccaaaataccgtgccatgggccgagccgtcgggcctcgggccttttggccatctataggcgtggtgaagctggacaagcgacctccccactctgctttggccactgcctccaatttaacctgcctacgatgttggcctccatcacctctcgctcaacaccggataggttcctgatgaggactagggtctcgagctttcattaggtattgggataggttgattagaaagacttgacgttgatgatacaaaggctccgatcaggacgatcagacccctcacacacgaatgacctcgtcgataaggctatctcctacaagcgaattgagaacacaagcaagagtgtagaagatgcaatctaaatatattgtgcatataagatgaatctcacaaattagggttcgacaaaccagactagcggtaaaactacattggcagaataaactaagcaaaactcccctctaaacgatgaaggctgctaaataaataggattaggaacattttagggttaaccccaggtcgcacacccccttgcacttagtccatgacataattataaggcccattgtccaaatcagactcaaactagataagatacgaattgttttgcagattgtcgattgctcatgaagaattttaatgtgtgaccaaaaccatatgatagtagactccataagcttttcaaaagtactcacaagcctgagagtccttctatatcagtagttaggtccgtttgatgttgatgttgtcatgaggctcgaatctgattccaaaatatggagaagttattctcttgctttaaatggaccaaaagtgacgtggggacgttggagtagacttggtgaaggatattgattggtctccaatcaacttaattgattatcgaatgtttgttcaaatatatagtaaataaacctaatatatatatagagcatgtgaacgcttgttgatgtgtaatataagaatgattatatccaagccagtaaaatcctcatcagtcgagacccctgccaatgccacgacggcctcccacctgcctagcctttagtcggaggctactacaaaactatatagctttattggatgtttaattagattatgaatgtacgtttccaattatgtattgaacgagttgaaattatttgtattttgtcaataaagaattgttaattaattttcagttattggtctgttaacatcgtgttcttgtgagtgttatcattaattaaaatatagctctaacattagtaaaactagatgaatatcccgccacgttgatgggggaattaagttagataatatgaatacattaggtgaaattaagttatataatttgcacatgggttgcaatatagttcaccatgaataattgatacttaaaaattttgagcctaaaaatagctgattacatgttttttttatgagagaagatagaagagacaatttgtatcatagatccatcatccaaaggataagaataattgggatgatgtgactgtgttctcttggaggggttggaaacccctcccctccgcacgcaaaacagagcgatagattaacacaaaattaattaagtattagctatgattatggtaggaatagaaggatataggaatgaaatgaacactaatatcctgtcgatcagagtatattcaaaaaatccaatttaaccgtgctgccttcacagctagcaatggaaacttataggttagctacccgtaccctttgtcaggactgcacacaaaagttgtatataaaaccaatcacactcctcttcctacatgtaatcacacattgttctttggttttccaatactatcaacagttcacttttctaaactcgagttgataataatactggaacgggcggttccagtaaatatgttagctcgatctcgattacttcttcatgtagcatggggatcaatctaatgtagggagggctaggtgtccaacactttgtttactctgttttatttagtgcccccaaatataagctctacgtttgtctacttaagaataatcatgtattatttacctcttatgatattccacacatcagtacaatcatcgttgtcatgagttatgacattaagtgatacatgccagtttcagtatgttgtacacgtcggttacctctgctgttcaatttccacaagttcagttcgttgaattgatattttttgttcaagtttaaaccctggtctggtttatcaggaatattgattcattgcagctgtgcaggtgtatgtagggtgggcgtcgatttttttttttttttggcttcataagttcggtttctcatgagctcggttgtcatagaatggagaccgaagaaactgcgaaagggcccgtagcccggtagttacaagagtctcagtagcatcttagattctgggttcgattatccatgagagtgaattttccaggatttatcggcgttgtgctttcagtgatttttctaggacttatcggcattgtgctttcagtggtagggggtgagtgcacgtgcgttgtgagtgtcagtgttgttataaatttataaaaaataacttgagaaaaaacaaaaaccgaaatagaaacacctaaatgcgttgtgagtgtctgcgttgttactatgtaatttaaaaaaaaagaaaaaaattgagaaaaaaaagccgaaatagaaacaccgaaaaaaatccgaaataaaaacagcgatgtaatttaaaaaaaagaaaaaacaaacacagaaaaaaatcggttcggtttttcccgaataaatccatcgccgttggctggtcgatctcatgggttgcagcgtggggcccatgcgggacatcagcggcgcatgcatgcgaagattccaggaacactgtgtggggtccacatttaagctagggaaaattggaatcatgccattataatttttcaaatttgagatatatcatcctaacccacatatcattgaatcatgtgggtcctacatgtcattaagataccaatggcatatcttaaactttacaaaattataatggcatggttccaaattacccaggaaggtaaccatgttcccatggcccggcccgtggcccgacagcccggcccgtggcatggcgctttggcacagcacggcccgactagtgttgggcccgtgtcgtcctagcctaaaaattgggtcgtacctaggccgctaccttgacatggtgggctagcccggtacagcaagaaagatagtgaggagaaataaacttattttcaaacatatgtaaggcatggaccaaacaagagggatgaaaaatagacttattttagccagaaagaggagggatgcaaaatatacttatttcaaaaaaaaacacaataggctatcataccttcggaccggccgaacacggcctgagtcttattgggtcgcgcctgggccgtgggtgtagcccatgggcaagcacggcacagcttgacgtttagatcggcctgtgcctgggccgtgccatgccgggtggcctatttgggcatctatagtcacagggagacaaatcaggcaaataatcagctgaacgcatgaattcccggttggtacagtgctatcggttcacagagaataaaaaccgagtaacaaacgagacactgaacttgataaaaataaaaaagagccaccaaccgaataccgtaaaaaccgacacttcggtttggtttggtgcggtttggtttgacttttggtccacagtttctttttgcccacccataggtgtatgagaaacttgattatgtcctttagctcttagttgagacttttcgctatcgacatggaagatgtatgtgtaataacatatcctagttgtagaggttgcgtatgatccatcatgtagttttcgtaggattagtaccacacatgaagagtttatttaaattttttgcataaagcaagagcagaagtgcaagtttggtgctatgaacaggatgatgtggattattgaaagatgaacattacaccatggcctttaagccagactatataatagcaggtacaatagcagactataagccagctatacacacatattgaggagataaaagagaagagatctaaaaaaagtagcggactacatatttatagccagatgcagcacagactccaagacacaatgtgtgtatgacaggtatgacaggtgtagtatatgtttataggtaactatctatctatctatctattatatattaaaagtccattaaccttcctacaaacgctcttaagccgccacttggcgctcctataaatactctttaatcgccacatggcactgtttaatctcaccgtcgattttcacttaaattggtggacctggtattttagaccattagattagatgtactattttaaaagtaatacttttcctcctgtgggccggaataaggaaaaaaaactattctacttacatctaaaggaaaaacgatgaagaatacgttcaagaaaaacctatgtacggacttatacgataaaagcgataaagtaaagaaaaaaaaagcatatatcggttgtcattgaaaaaaaaatcgatgggctttaaaataggattttctactatttaaaaataaaatatagtactctataaatatatgcagttaaactatatcttgtatataaaatctatatattatctattatgtactagaagttaattaaactttctacaaatactattaagccgtcatgtggcactataataaataaaagaaattcctagaaattctaagataaaagcaaaacatgtagtccttaattttcacataaattgatggatccgttattttcaactggcagattagatctatttaaaaaactcccctcttttaatttcccgttctcgtaagtactgctcgtaaaaacaccccccaaaatacaagtactcccaagtcgccacgtggaaccctaataaaataaaaaatcttacattcgatttttatttaaatcggtggatctagatcgttagatatatcttaaaaacaaaaacctcccatgtccgcatatcgtgcaccacgcacgtactgatcaatttgtacgccccttctgttcctttctctttttacatacctatcacaattaaaattaaaattatctttatggaaaaaaatcacaaataggcattaaagtcctttcaacatcttataaatatttctaaactattgtgtgacactcttaaattagagaaacattc

SEQ ID NO: 29395 - DNA, 600 bp, Oryza sativa
acacgtggtggacaagaatgaccgatttgagaccggtctgacaatggtcatgtcgtcagcagacagccatgttcccacgtcgcgcctgcttccggcggaagtggaggtaggtatgggccgtcccatcagaaggtcattcggacggcagccatacaaatctccgtccattaatgaagagaagtcaagttggagggaagagaggatgagtccccacacaaaagaaagagagggagagatggtgcatgtggtatccccttgagatataaaaggaggaccttgcccacttagagaggggggaggaaaaaggatcccagaacaatcgggggctggctcacactttgtagcttcttcatacacagatccaccaaaacacaggagtagggtattacgcttctcagcggcccgaacctgtatacatcgcccgtgtcttttttgtttccactctcgcgaacttttcacagaccaggagcttagaatctcacccaagggcccccggccgaacccgccaaggggggcctgcgcggtctccccgtgaggagccccaagctccgtcatctggcgcgccaggtagggggctctgcgagtgatcttctgagctct

SEQ ID NO: 29396 - DNA, 1154 bp, Oryza sativa
tatatatatatatatatatatatatgaacaaaatatatttacattatagaaaatgtgtacacatgcatatagaaacatatgtagtcatgtattaattacaatccattatatgtcctagctagttacgatttcgacgtagtagtagtcgttagctcagaagctaaggacctatgaattgtgtttccgtcgtagtagaattcacccttgggatcaaggatttgttcgttgatgaatcccatgagttgttcttaaaccgccgcgataaattccttgtgtgtggtcaggttatccctcatgcaaataaactatatgaatgtatgaaattgattagtaattaaacaagaaatcgatacgtaatgaaattttgaatttatttgtacgtacatcgagctctcttgtggtgatgatttggtctgcaaggcaatggcaatacttgcacacgtaatagccacacaagttagttcccttcttttgctttgcgcactacaaataaataacaaacaacgagagatctaattaatatacacttgtatgtatttgaatcggagaaatataaatatagagcatgtgtactcacaggaaatttgaacttccgcctaagtctttttctccatttgccgcggaccaaatgacggaactgataccaagccctaaatggagtttaaagctatgattagtagcaattaacataataagattttcttaattaacagaggaacttatgacggtacctgtctataagttcgaaaaccttgtcaaacgtagactcttttttatccattgagtcatacacgttgacggtgcaggccgacaggtcaaagagtaaaagcacccagtggaatctgcaatgtgcgtgggatgcattacatatgaaacacttagcaagttcgtacgggaatgaaatttggtataggaagacagtaaaattaaactaactctgtgttgtacggcaacagtatgaacgtcttgtaatgctgcgccttcaggagatggacgagattgtcctctgtggcttgcggatattggtcgagcattgcgacgtttactttccgagggtcgatgaatccattatcgaaaacccccgccgtcgggccctttgaatctccattctacaacgataaaagggagtatattattttctatagtctactggg

SEQ ID NO: 29397 - DNA, 5175 bp, Oryza sativa
agtgatcggattggatatgtgtggaaggtgggagggcgtggcttcggtggcttggaggaccggcgacctgtgatgggcacgccgatgaaacgagatgagaaacagagatgaggaaatagattaaatctgacttatcccttgaatgatctaaacgtgcctcttataggcttgcaaaccataactaacaatctgctaatcaaaaggaactaactctaacaactccctaaacatctcacgagataactggatactattccccgtccggcacggagaagatcacgacgctaatccttttgctgtgccatcactatcgccaagcgacgccttcttgcgtcttcgttggtgcacaatcccgaccatgacatctttgtgcatttcgactcccacaatggcaatctcccttacagtcgtttgaaacgacgagactaattgttttgagttcttttacggtgcacctcttaccatcctagaggtaagagggaaaacaaatcaaaagcgttatctcaatcaacatgtttacgtttccaatgcactacctaaacacgaaatccagcagattatggttttcatgaaatttgacatattttttttacaaacttaatttggaaaccaaaatttgagtatgatcagcacttgaaattttgggagcagcgattgaattttggtcgagatattctaattaaattttgacaaaaatgcatcaaattttattagagagcatgtagtccttcgtgagtctgtgcgatgtcacaactggttatagataatggaagatgagtagtactctctctgtttcacaatgtaagttattctagcatttccgatatttatattgaagttaatgaatctagacatatatatatatctatctatattcattaacatcaatatgaatgtgggaagtgctagaatgatttatattgtgaaacggaggaagcaatacacatttcttttttctgcatttagtgcaccgagccaaaactgtaacaacatgtacggaggactgatgaatcactacatgggaatgtatacgtacttaaattgttgtattttagagaagtgaaaaagataaaattttcggtagtcattaattttgtaaatatagagatattttcttgttttgatggaatcattgcattatgaatttaatgtagattgtacagataccatgcgtgtgtggcttcgatgccttggcacactaacaatttttatttgcttgttttatatatatctgagttcccgaccatgccaattcttccccattcagatactaagacaacctcaaattcttaatacaaccatggactactaaaacgacgtttttctacaaattgggataggaatgggaggattcgaaaaggaaaatagagcttttttcggcggaggaacactgctatcgtgagacaccatgtaatcagatgagccatgcatgtttctaggtgtcaccgtgcgatttttctgtttcgatccagcggaatttaatatcgttcaaaagggaaatatggctaactgctagtgacaatgcgcgattaagagatgcaatgctgcctcttccatttttcctggtggaatgacatttgctgcatgttgccatgtccgttttctaatattcgagtgaataattccatagcgggccatctatttttatccggcctatacccagcctgtaagctgtaagtcgtacccgctaacctatctgatatgagcaattctacggtctttaaggaggtaccatgaggtaccaaaaatttagtgtaaaatttggtaccttatggtacctcatagtatctacatatcaagaggtaccaaatttacaatagaaaaagtggtacctcatggtaccttctcaaggaccataaaattgctcagctgatatggtgtgcacaccaccatcgacctaggcaggcttggtttatgcattaacgcatgcactgatgcaccgacaccaccattgcgatcaagcagggcaacactttatatgtttaattacacgatcttaagtgaaaggcaaataaatagtaagatgcaactcaagtaattatacatagcccaaagtgcaatttaatatttttttaatatacaacacaactgagtttttttttctcgaaaatattatgtagtgttagtctgttacctcaatttatctctcatcagtttagttacttcaaatgcctacactgacatgtcaacattgtatcaacggcccaccataggtcataaatctaactactaccatatcatataagcaatttgcaatgcatatttatttgtcttcgatgccccctccatttaaattttatatttgaaggcactctttgattgattctattaataggagtttcgatagtagaaaaatgatggtatagaaatggaaaggatcaaacgtacacagttaaaccgagacggcagtcagaacatatcttcaatccaactatgtatttttcactaaattgcggagaaacacattgggaatgggaagatttaggaaaatagtgttgccaagtcagagttgatctagttagagtcttcgactgtatagctgctacaagtggaagctaaactgatcgaccacgagagtgctcgcaataatatgacaattgctggcgacaatagacaacaagaataacaacactgagatattgtgccttttgggtttactctactttttggctaataatgcacatttgagaatttgtggtttatagatagcaattcaaatgtgtgcgcagattcttgttggatgcaagggaagagaaatagtatgaacaacattaggtgataagcaacatcatgaaagaagtgattgcttgagtttgagagtttcgaggaactatacttttcttgaaagagcagtcaccttactgtacttttaggaattcaaatttttctaccagcaacagataacatgacaaacaattggagaggaacatcgagagcatttttcatgttaagtcatgtcacttgcctagtaaagttataacatactagccaagagcccgtgcgttgcaacgtagacagttgagtttctagcttattaagtcaattaagcacacatttaatcaaaaatagtatttttatgattttccttattgaacaagtaggtctttttgaaatttgggagagccgaccgtgaaaccgaggactcgttgaagggtgatgtaacagtagagattgtgagacccaaatatcaataggggtggtatggcagacttggacaccgccaccattttaaagtagtatagatatagatgtcagtttcaaaatagatatccccttgccttcattagtcgttgtctctctccatccaaaaacataaggaactccagaaattgaggtgaaaagtaaaagatgcttgttaaatgagggatgagagggtggttgggtgtatgattatgtgaaaataaaatcataagtggttagtggaaattgtattctaatagttctttatttatatggacgaatttcaaatgccagaatctattatattttcaaatggaaggattcaatggcatttggtagagtatttagatcgagtatacctattagagtagagtacctgtcacgcccagaaattcactagtaattttcgaactaatttgtgcataaaaccctcgtccaggaatcagccgaggtacacaaactgacaatttaatatacagaatcatcaataatacagcgttacatacttacaaaagaaaagaaaaacagcagcggaattacaatctagcgaagctccggctccactcccacaggcagctcaactggggtataagccaaacgtcttctccttcgcaacttgtctttaactgaggtttgattgattattgcaaggtgagtacatggaatactccgcaagccacacaacaaatatgcaagtgcacaaggataccaaagaatggcataatatagggctcatttgcaaaagcagaatttacaaacatttgagaattgtaaaacagtagagtacttaatcatcaatattaatcaacactgaacagcacacccatgctgctcaggcccaaccatcctgaacaaccatacccggctgcacagatctatctccaaaccaggaaatgtaccattgcaaaccaggagctaatcaaattattaccagttataatatcatttattatggtgagaagtgtgagactaatcacaacagacattgttagacctgcgcataaccgcgggcatggctattcgaatagttttactctggccagaggtgtaccactgtacccacaagacacagccccacaacatgtcaccatgcgcctcaataccaccacggtacctcagaaaggagctgtgacagtacccctcgcacaacataatccaccacagcgcaccgttcctggatcataatcacccccttataaacaaggcatggactccccagcgaaccccgtgggcttatctccgccacttctcagtctggtgccccgcaatgaaccatgctatacaaaaggtaaagccgttgcccacgctggcttgtggttggcacggttaatgtttcataaccgaaactcatgaaccggtccttaaatgtcatgagcacgaccatcaaaaccatgtgctcacaacccaccattatcaagttttagttggcacattaattaattaaccaatcacgattagccatcgtgagctatcattaaatatccatcattaagtaatagtgaaacatttgttatcccaatcgtgtgctaatgtttctaagcatgactaagcaattatatctaatatatctagctaaaccaatatatcaatccaactagtcaaattataacccgaggtaatcaagaaatagggtaatcaatgcaaattggccataacaaaggaacaggttcacaccacccaatgacattcgaaaataaatacacagttgaaataaatagagaatttaaatataggatcaacatgctcaaaggaattgtgtttgggatctatgtgacttgacttgcaataaagggtcttcaattaatcttctgaaccacttccgacgctctcacgaaccttcacaacgacggaaacgacaagctaacacgcaaaacaaagaaaaagactaatacaaaccaaataaacagtacatataaagtaaacaaacatgtagatcatgattttagatgaatttagagacttgaacggcctcattctgatttcatatgaattagt

SEQ ID NO: 29398 - DNA, 2124 bp, Oryza sativa
ggaacaggttcacaccacccaatgacattcgaaaataaatacacagttgaaataaatagagaatttaaatataggatcaacatgctcaaaggaattgtgtttgggatctatgtgacttgacttgcaataaagggtcttcaattaatcttctgaaccacttccgacgctctcacgaaccttcacaacgacggaaacgacaagctaacacgcaaaacaaagaaaaagactaatacaaaccaaataaacagtacatataaagtaaacaaacatgtagatcatgattttagatgaatttagagacttgaacggcctcattctgatttcatatgaattagttatgaattttacaagatttaattccaattaaacctattaaagaaaagactattccaaattaattaaataatttacaaatgatttataactgagataaaagattaaaacaacctctagaaaatattagattatatttagtagatgacatataataatataccactaaaaagagagaacggatttatatggctgagattaatctcgacagagtcgaccaagatcggatggcttggtttgatctggcaagcgagcctcacgagataccgactaaatgagtcaattctacgtgacacgggattacccaaatgatcaaccgaaaccggcgaacggaaccggcggctctgaacggctctaaactataggacgactccacaaggatgaacgaaacacggggaacacctcgtttgaacgaacgagcgaacgactcaacaacagctgcggctaaaccggtgggctagacacgattcacggtaaagccccggtatggcaaacgataggcctgtaggaatttagggatgcacctacggctagacaacttggctaccgagcaacggctaaagcggcggctaggttaaagcggcacacagctacgagacggcggcactaaggcgacttggctaagctaggcggcggcttggcggaaacacacagctagggttagggtgacggcacagccggtagcgatgcatgatagcggcgcggcggctgcagtacgtgcactagggcagcggctacgcggcggctagcagcggacaacagcgggtgcggtgcatggcaatgaccggctcgacgctagggcggcgacgcggtggtagcaagcggctgcggcacgcggtatagcagctgcttggcagagccagcgcagcgagcagcggcatgatggcagcaagcgacggcgcaaggcggtggcttggacagcagcggcgatgcaactagggcagcgacggcgcatgggtcggctgcggtggctaggcacacacggctacgcacgggctaaggctgcacaacagcgactacacgaagacacgattgcagctacacaaaagattaaacctagggaacggaaaggaggcctcactggggaagaccgaagaggaagaggcaacggcaacgccggcgacaacgcacggagacgacgacgacgacgctagggccaaacaagattagattaaattggattaagtccctagggataaactacaccggtaaacgacatgggagcggcggttgccggcgaaccacggcacaatatgcacacggagggcaccgggaggaagagcgcgagacgacggtccttaccaacacttacgcgacgacggacggcgacggaagatggccggcgacgagcttcgaagggcggtgaggtactgtccacggcggcgacgactttccggcgatgtgcggcgacaacggaggggtggccaggcttcgtcttggtgctgcgatgccgaaggagggagcagctctgaccagggacagccggaacgacggcgaacggcggctgtagatcaaaagacggcggcaacccactggttcacgacgaggacggcttccggcgagatttcggtgcaagggaaccggctgccgggcttctcctcctccttgcgaatccaacggcggcggcggcgcgaccgaaggagacgatggacgacgacgaacggcgtggctggagcggcggccggcgcttggagagagaaagcgagctcggggaggggcggctagggcacttcgaaggacgggacttgaggggataggtagaggacgactagggggtcctttatataggca

SEQ ID NO: 29399 - DNA, 2563 bp, Oryza sativa
atataatagatagaagatagatagatgtaaatcagagattatgccatctcataaaaatatagcccgggctagggctcttcttcccccattgaaattcattgagcacccagtggccggtctctccacaagttcaatccagcttgaaaattcagtttatatacaagtgctgtgatgggaatggaaggagttaggaagaaaataagcacagaaattcagttttacagcgccttgctgtgcccttttccttcttgattatgtcctccgactgtgccacatacacctcctcgaggtcacccttgaggaacactgactttgaggccgaggtgatgtacctgctatccgatctgctgcgagagcgagcacgacgcgcatggtgtcaagcctcaccaccagcatgaacacttcatcgaagtccactccttgccgctccactcctcgcttgaccacctcgtctgccgtgttcttctccggtttgaacacccacttgagcccgattgctctatggccagctggcaacgtggtgagcgaccacatcgcgttctacatgagggttctgcttcaacaatgattgatcaaaaaaattctatagtgcgcttaggcaaactctactacgacaaactactagtatagattaaattgaagtgcatccttacactttgtttcatgccgatgagcccaggcgagtgacttgggtggccagacactggctccactgctgtgtgttggcttattgttgggagaggtcttaggctcttagctacaatgaatacccaaaagctccgaaaaatcttatgtaatctttagtagtcctctttgtatgccaaaggagtatcttggaatttgtttcgctcttggttccattgcgtaaattatatactgttttccactaaaggaaagtactattacatttatattactcatcaatttagttacttcagatgcctatactaacatcaacattgtatcagtggcccaacataggccacaacaaagtaagagacattgcatgaccagctcacaacataggctacaacaaagtaagagattgcatgaccagctcatctatttaacttggtcaccatttatataagcaatttgtgatgcatatttgtttgtcttagatgcgctttccatttaagttttatatttgaaggcactcttggttttggataagttgaaaatatgatgatcgtgaaatataaacggtaaaacattgttaaacagagacgccaaccagagcatatcttgctcgaaactatgtatttttctcttacaaaattgagatagaaacacaatgggaacgagaggacttaggaaaataacgtctctgacacagatttgttccacttggagtcttggactgcaaagctgttacaacttcagataatgctggtagttccacccggagagcgagcataatataatgtgatgcctgctaagggaaaaatagaaaacgatagtaacatgcagtgagatattgtctgtggtttttctctattttttgggttaataatacacatttcagaatttgtggattgcagataacaatttgagtgtgtgcaaagactctagttggatgcgagggatgagaaatagtataaagaacattaggtcataaataacatcatgaaagaagtgattagtagagtatgagagttgcaaggaacagtttttgtcctaaaagagcagccacctcattatcattttatgaaaccggccagttacgttctttgtaccagcaacagatagcatggcaaataattagagaggaacatcgacattaattggaagccatcgtttggcttattttaagcataagcgaaacggcatatttacaaacaaaaaataatttgtgaataaaacttttatatacgtgttcctagcaatttaaaagcaaaagctgaaaaataaacttcgatgaaaaaaacctcaaaaacaacttcaaatttaaggttgaatatttaaattttggctgataagcataagtataaacgaaaagatgaggctgatttttcatgtttacgtcgtatcacccgcctcgtgaattaagtcactaagttatactatcagtttcagaactgatatccttgtacgcctctctccatctacaattaaatataagcggttttactttgtttattggaaattaaggtgggaaacaaaacgatgcatgcactcctgactaaatgagggatgaaagggtggttgggagtaaatattatatgagaattaaaagagaagtggttggtgaggaaagtagtactctttattcccatttgtagacaaaattgaaatatcagaatcacttttatttttttacggaggaacaaaatatcatcagtagatagaatcccttgttatattttagaacggcgtgactagataaaactaaagcatgggttttacaagaacaggacaaaaaagagcaacccaaacggtttgtgatctgtagtaatgtgtgattatttcctttttagatgatcagcactatccctttgaccagatgggactgttcttggttaacgacacttctgggttaataaatgatggttttaaacacttg

SEQ ID NO: 29400 - DNA, 5658 bp, Oryza sativa
  unsure (1)..(5658): unsure at all n locations
tttcgtaaagcccatttcacggttctgcaacaatcttcattggtggctccttacattgaggagcacttggctctagttcgtgccagaaacatcggtaagtccgatgcatggattacacggcatcacattgatactttctccgcttggctgcgacaacatctcatgggtaacgagacgattaaccaacaaccagccttcctagcgaggggaccatctggctcgatcacgacaatccaaggatatgaaatcaatgggtacacattctacacgagagcctaagacctgaagagcacgaaccagaacagtcctgttcgtattgatgccatgggacacgatggtacaactggcacgtattatagtaccatcgaggacatatgggaacttgactatggacctctcaaggtccctctgttccggtgccaatgggttaggttgcctggtggaggcgtaacgattgatgacagtgggatgacaacggttgaccttaacaaggttggatactcggacgaaccttttgtccttgccaatgatgtaacgcaagttttttacgtcaaggacatgtctagcaaaggaaaaaggggcaaagggcctgacgagccgaagcaccacatggttctcccaagaaaaagaaaaatcgtcggagtagaggacaagactgacgaggattacgatcagtttgatgggcaaccccctttcacggtgacgattgaccctagcatcctcctatcaaatgacgacattccttactcacgtagcgatcacaagaaagaaacaatagtgaggagaaaatatgtgcggtcaaccgtcaccggcgatgtattgccgtaattgttgtgtacacgatgtaaactattttggatgtattgaatatccatacaaatcaattgttgtatggcatatgttaattatgtatgatcattacaatttttatcaaattgaaatcatctatatgctagttatatatgattattagaatttttaaaagttttaaatcatgcatgaggtatttacatatgtaattagaatttttaacaatttaatatcatgcatatgctaattatatatgattattagaatttttattaattttaaatcatgcatgtggtatttacatatgttaattagaatttttaacaatttaatatcatgcatatgctaattatatatgattattagaatttttaacaattttaaatcattcgtgtgcttattacatattatccacttagtttactacatacaacaataatttttcgaaggttttgtcattaatttttcgactttaaataattgtaatgcattatttactattttagaaacacatatgtaatgaaattcgaaattcagtgctattatctttagtcccagttcttaaccctaaccgggtttaaaaagaatttggaaatagcgggaagatatctttgctcccggatgttctcaccaaccgggactaaagatctaggggtataaatattcccggtacgtcctcgtcttctccaccaacacttagaagtttttcctccaatcgatctcggcttctccttcgccgccactgcctagggaaaccccgcaccaacgccgccatcatctctcaccgtcgtctcgcggtcctcgtcgcctccaccgccgacgcatctcttgggtgagagccgcgctgcctctctctctcgatctcgatctctctctctctcgaaaccgccgctgcctatagctcattgccgacgctgccgcacgcggccgaccccgaccccgactccgcctcccgccgattccgaccccgacttcgacgcggctgccaccgctgacgacataacgttcacgcaactgccacggcgacgatgcgacacgccctgccacgccgccttgagctcgncacgccgtcgcgccacaccgncgcgacgccacgccgccgccgcggnatgccgccgggtcgcccgacgccgncggaacgcgcgccccgacaccgccggacacgccaccaccgggccgccacgacgccgttccgcttcgcgccactgtcgcgcgccccgacattgccgaacgtgaacgaatgtgaacgaacgtgattgaaaacgtgacgaacacgaacgaacgtgaacgaaacgtgaacgaacacttaacgaacgtgaacaaaacgtgaacgaatgtgaacgaaacgtgaacgaacgcgaacgaacgtgaacgaaacgcgaacgaacgtgaatgcacttgtactaaaagtgtgagaacgaacgcgagcatatatgattattatacgattattaaacttagcatataatatgattatatatatatagttgaaaacgtgaaatacaatatatgttcctttgcatttagactaatacattttcctggtaatgttgtagagaagacgtcgtcgtcgtccctcaagctgaagttgtagctagccatcgaaggaattcgcgcaggcaagtgatgtaaagaagtgattgttagagatttaatataagattattagagttttaatataagattattagattattagcatatgtgagtgttagattattagacttagcatatgtgagtgttagagattcgtgatagacttagcatattgtattagacttagcaaatgtgagtgtcagagattattatattattagacttagcaaatgtgagggttagagattattagattattagattgttagacttagcatatatatattattattacaattttaatataagattagtagcgatttaatataagactgttagacttagcatatatgattattacaattttaatataagattagtagcgatttaatataagattgttagacttagcatatatgattattacaattttaatataagattagtagagatttaatataagattgttagacttagcatatatgattattacaattttaatataagattagtagagatttaatataaaattgttcgacttagcatacatgattattacaattttaatataagtttagtaaagatttaatataagatcgttagacttagcatatatgattattacaattttaatataagattactagcgatttaatataagattagtggagttttaatattacgcttagcaaatatgacaaatgacttaccaaatatttcttgtatgaacagatggctgatcgcgatgaggaacatatactgtacgatacaatcgcagagggaagcagccagtattggaacgaagaagaggggaacgaggatccaaaccagtacttgaacgaggagaggaacatggagagggatgcggaggggaactaggaggggaacgaggaggaggaggctagtggaagtcatccctccgctggacagaagagggcacgcggacaacgaggtgccatgaagaagatagagggtcggcacatcataactgaggtggacgaagacggccgaccaagtgccccggcagaagcagccaagaattttgtatgccacagcggttgggttgtgagggataacgtgcctgtcagcatggtgtactggcgcagaacaagggcacgagggggtaatgacagctttgtctcggaatcagagaaagagatgctgtggaccacaatgctcgagacgttcacgctccctgcgggtacggagaacatagtgaaacagtggactcttaagaaaatggctaaacagttccagagcttcaagggagatctctacaagaaatacatcctgaagggactaataccgaacttcgacgtattcccaaagctaagagattattgggacgagtttgttgcttagaagacagggcaacaagggcaagcgatgatggttagaaacaaagaaaatgccaccaagaagaagtaccatcaccacttggggtgaggcggctatagcatcgcaatgccgaagtgggaggagatggaggcaagattgattgagaggggtatcgaaccggccaccgctaaatggccggatcgatcgaagttctggtactatactcacggtggaacgcttaacccagttgatggctcccttgtcttcagcgatcagatacgagggaaaggcgtgattccctggaagattggattcaaggaggacatccacacgtacaggagtcggatgaggagcaagagagataccgaggtgaagattgcaaatcttcagaacagggtatcgagttacgagctcagcatgcaagaggaggtggcaaggaagatggatgaatgcatggccgcacatcggtcccaggatccccagccgtacattcctcctgcaatggtcagcccattaggcaatcatagtagttgcgcctcaacggggtaggtaggatcacagagcatggacgccatgcaaacccaggacgaaaccacttgccccgttgatgagatcacgcaacggacaccatgtgagctacatattcccttcaagaacttatcaatcaaggtatgctcatagttttatgatttttgacttgtacattccgcaagttgctgcttaggttgattactaatagataacctctcatcacatgaaggtggcgtcgggaatggccatcccaacgaacatttcagggacttaccactgcaggccgattccagcaggatactcgagggtcgaagttgaactggtggaagccgcgtacaaggacctcgagttggactacctaggaggagacggtgagacgcatctatgaaacacaagccatgccattatactatggcgcaagcggtacatcatcctccttgggcgacaagcgacgtctcgtgcaccatctcctctggctccgccatctcctcctgcaccatctcctccggttcctccgccaagtcctcctgcaaaatctcctccggctcatccgccacctcctcctgcaccatctcctccggctcctccgcctcctccacctccaccgtgtcctcctgcacctcccaagacaaggtctcgccaagctccaccgtctacccgcacaagggcaacgaagaaggcgaaagttgacgccaccaaaaacaaggagccgtcgtacgattacagttaagaggagcttgatgcttatgtggcaggagaagtgaagaggcaactcaagcctcggagtcctgaaaagaagatacctattgacccgagcgtgaagaacttcttcaagggaatgcccacaacaaataaggaggcgttaaagatatcggactatgaccgaacacttcagaaagcctatcacaagaagtccaaaccagtcccttagcttggagaacaaccaaaccaagaggtcaagccgttggtgaccggcgaagattttggcataacggtgtaactgtggatcagctgattggaggcacaccaatcccgaaggcggaagtagcatacaagtttgagctcggtaaaccgcttgtcacgcctgagcagcagcagtccctaccgacacagatgtacaaattccatgaatggtacatggaaatgagcgccaagggtagagagatgttcggagcgaggattagaaactccgacttcttgcaaggaggagatgttctctggatccatttcaaggatgtcttcgatctgtaccatctacacgccctcgtcgtctctcttctgagcgcatggatttcgtaagtatctttgagttcgatttgtttcgttcaataactagctccttgcatatatgtaaacaataataatttcattttttcgttgtag

SEQ ID NO: 29401 - DNA, 4095 bp, Oryza sativa
ccagagtgagtttttattgtcgttcgaacaaatttcattcccatacatatagcatgtacattttcatatatatctcatctcacgcatattccagattccactggtcctgttattctttgacttggacgcatgcagagtcactgtgtatgactcaatgaataaagaggagaagatttttgacaaggtcttccaaccgatagacaggtaatataatgccatctattccaaagtcgcggggattctattgctattatgttgatctcgggtaataattaattaatcatagcttgtagctgcatatgtagggcttgggatcgattccgtcaattggtccgcgggacttggaaagaaaaacttggacggaggtttcattttccagtgagtacatgcatgatccaaaattatattgaattgaatctctaattacagttaatataaagagtatattaaatctcccatcatttctcatgtagtgtgcaaagcaggacaagggaactaacttatgcggctactacgtatgcgagtatgccaactgcctatcaaaccaaatatgcaccagacaagagctcgatgtacgtatacataaaccattcaaaatttcattgcgtatcgatttgttaagttgtttattaatttcatatattgatatttcattatttttcgaatgatagcgtattcacatgaggaataatctcccacacaaggattttatcacagctgttcaagaacaactaatgggattgatcaacgaagaagtccttaatcccgatggtgaattctactacgacagatcgacaattcataacgtcggtccttcctcttctgacataacgccggcatcgaagtcatagctatagctagcgagcaaatgaattgtactatatatatgcatatgtacacatttactttagtgttaatatatgtatttatacatatacacatatgcacatatatatatgtattatatatatatatacatatatatatatatatgagttggataatatgaacctaggttcatttgcaccctagtttgttgaatgacacgtgtgctattcaggttagtagatgatggactattgtttctaaacttggtagtaaatgtacctactcaattcaatctcttataggggaaaaatgagggaggtacaccatcggtcatgtcttttcacacatccataaattgtgaccatgtcttttcaccatgtgaccattgtacattagaaagagagagaggtcattctattttaatctattcccttgcagtattcacattaatccacatggaggcctactatttgctatcaggttagacataagtacgttgatttctttaattaatctagttgtttgtgtcaagttttatttgtccattcaccacccaaatatgatgttcacaaaaatgacatttcagaaatatcgttttgcaactgtgatgtccaaaaaatgctattgcaaaatgatatatcatttttagtagaataaaaaaaccacatgattgttacttttacagatatatgccatattctaaaatataattttgttataatcgacatagatatatatcaagatgaatgtccactcagctccccaaacatgatatttgcaaaaaaaaaaagatgacactttgcaaagtaatgtccaaaaaatgatatagctaattggtataccacttagcatttattaaaataaaaaaatcatatgaatgatattctaccgatttatgctatatcgcaaaaatctaattttgttataaactacataataaatagtgtctgggagacataatatcatgtgggccatcaactaaagtatccaaattttggtgacttaatgacggttggtcaattgtagtatgatactagtatccattgccaaatcaatttgagcagtaagtgcatatgtcttgctagccgaacaaccatgtgtatgctaattgtaattaagagaattgataacaactctcgacatgcaaaatcaattagaacagctaactagcagtgttaagtcactcaaatatacaaatatatttgtaaattatgatgttaatttgctctctctggaaggagcagagagttgttgagtctttcagaataaatactacatgcatgtcccaatcagtgctacagcgtattgtgtacctccctattcttttcctctacagtaatcattcatttgatgaatgattggtatatttggtcaacacgaatcttgacacacatgtatggctcagattctaggtacatatgaaccttggttcatatatgatttatatatataatcaatcttgcagcaaacaaggccatgcaaataaaaaaaatggtacaccgatctttagtcccgattggtaacacaaaccgggactaaagatggttcgtccggccacgtggctgaccgatctttagtcccggttggtaacacgaaccgggactaaagattgatctttagtcccggttatttcacccgggaataaagatagctatctttagtctcggaaccggattcgtagtcccggttggacaaccgggactacaaacggtttctcaaccagtgaatgatgattatacctctccgcacatatcttttttttttataattctccttcatgtttctctactacgctaactagcatagtacttagggcgagaaaaaaaatatcatgattaattttatttaaaatagtaagaaatgtttaactttagcacaccgttgagcacaaactactgttaggtgatagttgaatagcaaccaaaatacggtaaaaaaaatcatcgcgtacttacttctctagtttataatatctaatatgtctcctaaaaataaaaaaaaatatatatagtgccttcatcaaccaaaacaattgtgccgtagtcccgtagagatagtaattactatgaacatctcgcaatataagtaataataactcacaaagctgttcactcaatctcctatctcagccaatcaactcttgtagtttagaacaaaaggaaattagcacagttctccgtcttatttatgtttaagatgcgctattaaccatagatggctataggatgagattgattacagaagtttatggtgtttgcataaaaaaatggtaaatatccaacactctatagtgaaaggtaccctacaaaagatatttaagtattgataaaggcatttagatagaaagggtaaaaagataatttgctaatagataaacaatggtaggattgtcttttgttattagttgcacgtacatcggtaccagtaattattccccatcttcattctcagtacacttttatgtcattctcatatttacatggttctttcaaatttatatttttttaaagaaaacatgaagtgttaaaatatatgaatgaatttttgtatggtcattctaaaatttacatcgtttaaaatatgaccgaatcctacttggccgggccttgccttgctgccgccggttgcctgctagatgccgccgcgcccaacccagctgcatcgatcttgccgtcgccatgcccaacccagatgcttgctgccgctgcgcctagctgtttgctgccgtcgaggcaccgacgctccggtcgcgcagcctagtttcctgccagctgccgtcgcccgcccatgcctccttggagcttgctgccgctggccgtcgcacgccgccacaccgagattgtcccgattgttgccctcgacatgagtcctgaccatagatggggaaaggggaattggggagctagggttttcagcctaaaaccagtcaacattttgatccaaatcaacatgactaaatcactgatttaaatatttgcgtatatagagcaggtacttttttatgatgagtttactagttaattatttcattcccattggatacaataattttctttggtatcttgcctctatcttaatcaatagtctatattgttcatctctcgctacctccacgtaccatataagcaccgtaaaatgttaaatatatgatccgaattttgggcccataatatattcggattagtttcctagtacgacttcttttctatcctattaggtgtctttcttttatcgatcctatagagtcgacctgtaagcatgcacggg

SEQ ID NO: 29402 - DNA, 4052 bp, Oryza sativa
tttttattcatgtggaaattgctacggccaccaaagcttgtgtaccaggaagattacagatctacgctacgtgcacacagaaagtacacctaggttttgcgtttttgcttggtttaccctaatttcttactagcaaattcatgattaattcccatggcaagtttgaagtatgatctaccgcttctggaccgagacacaagattctcactttggcaagtgaagatgcgagctgttcttgcacaacaagaccttgatgatgcgctttctagatttgacaagaggacacaggattggtccgtcaatgagaagaaaagggatcgtaaggctatgtcatatattcatcttcaactatctaacaatgttttgcaggagatgcttaaggaggagacagccgttgggctgtggttgaagctggaacagatatgcatgaccaaggatctgaccagtgagatgcacctgaagcaaaagttatttttgcacaacttgcaagatgatgagtccgtgatggatcatctctccactttcaaggaaagtgttgctgaccttgagtctatggaggtaaagtatgatgaagaggatttaggccttattttattgtgttcattgcctagctcatatgcaaacttcagggatactattcttaattgccgtgatactctaactttgaaaaaagtttatgatgctttgcatgccaaagaaaagatgaagatggtaccctctaaaggttcaaattcacaagcagaaagcttggatgttcggggcaggcaacaggagaagaacagaaagaaccaatcaagagataaaagctcaagtagctaccatgggagatcaaagtccagaggcaggtataagtcatgcaaatactgcaagagagatggacatgatatctctgagtgttggaagctacaggacaaagacaaaagaaccggaaagtatataccaaaaggtaaagccgcagttgttactgatgagaagtctgatgtagaattgcttgttgcttatgctggttgtgcacaaactagtgaccagtggattcttgatactacatgcacctatcacatgtgcccgaatagggattggtttgccacctatgaagctatccaaggtggtactgttttgatgggtgataatacaccatgcaaggtagcaggtattggaacagttcagatcaagatgtttgatggctgtatcagaacattgtcagatgtgcggcatattccaaatttgaagagaagtctcatatctttatgtactcttgatcgcaaagggtacaaatattccggtggagacggaattttgaaggtaactaaaggctctcttgttgtgatgaaagctgatattaaatctgccaacctgtactatctgcggggtacaactatattaggtaatgttgcagcagtttctgattcattatctaattccgatgctactaatctttggcatatgcgttttgggcatatgagcgaaaatggtttggcagaattgagcaagcgaggattgctagatggacaaagcatcgggaagctcaaattttgtgagctttgcatctttggcaagcataaaagggtgaagttcaacacatctacacatactgctgaaggtattcttgattatgtgcattctaatttatgggggcatgctcgtaagacatctttcgaggtgctcgttacatgatgactatcgttgatgattattagcgaaaagtttggccttatttcttgaagcacaaatatcaagcttttgatgtgtttaaagagtggaaaacaatggttggaaagacaaactgaaaggaaggtgaaaatccttcgtactgacaatgggatggagttatgttctaagatatttaaatcatattgcaagtctgaaggcattgtgcgtcattacaccgttcctcacacacctcacaaaacagcgtagctgagcgtatgaacaggataattatatcaaaggcccgttgtatgttgtctaatgcaggtttgcctaaacagttttgggcggaagccgtttccactgcttgttatcttatcaatcgatcacccagttatgccattgataagaagactccaattgaggtatggtctggttcccccgcaaattattcagacctaagagtatttggttgtactgcttatgctcatgttaataatggtaaattggagcctagagctattaagtgcatttttcttggttatccatctggtgtgaaaggctataagttatggtgtcttgaaactaaaaaggttgtgattagaagaaatgttgtcttccatgaatcagttatgttacatgacaaaccttctactaatgttcctgttgagagtcaggagaaagcaagtgtgcaggtggagcacttgattagttcagggcatgcaccagaaaaagaagatgttgctattaaccaagatgcacctgtttttgaagattcagattcttctactgttcagtagtctccaaaacgttctattgcaaaagattagcccaaaagaaatactaaacctcctcaaagatatattgaagaagcgaatatagttgcttatgctttgagtgtggcggaagaaattgaaggtaataccgaaccttctacatattctgaggctattgtttctgatgattgcaatagatggataactactatgcatgatgagatggagtcacttgaaatgaatcatacttgggaattgatgaagttaccaaaggagaagaaacctatccgttgcaagtggatcttcaaaagaaaggaaggtatatctccaagtgatgaggcaaggtacaaagcaaggttagttgctaaaggttatagccagattccaggtattgattttaatgatgtcttttcccctgttgtgaagcatagttcaattcgcactttactcagtattgttgcaatgcatgattatgaactagagtaaatggatgttaaaactgcatttttacatagggagttagaagaggacatttttatggagcaacctgaaggttttgttgttcctagaaaagagaacctagtctgtaggttgaagaaatctctttataggttaaagcagtcacctagacaatggtataagagatttgactctttcatgctttctcagaagtttagaagatccaattataatagctgtgtttatctcaaagttgttgatggttcagctatatatttgcttcgttatgtcgatgatatgttgattgctgcaaaagacaaatcagagatagcaaagttgaaggcacaattgagtagtgaatttgagatgaaggatttgggtgcagcgaagaaaattctcggtatggaaattactagagaaagacattctgtcaagttatatcttagttagaaaggttatatcgaaaaaagtttttcgtcatttcaatatgcatgatgcaaaaccagtgagtactcctttagctgcacatttcagattatcttcagatttatgaccaaagtcagattatgatgttgagtacatgtctagagttccatattcaagtgcagttggttcacttatgtatgccatggtatgttctcgtcctggcttatcatatgcattgagtgttgtcagtagatacatggctaatcctggcaaagagcattggaaagttgttcaatggttcagatacctacgtggtacatctagtgcttgtttgcagtttgggatatctacagatggacttgttggttatgtggattcagattttgctggagatttggataggagaagatcgcttacaggttatattttcactattggaggatgtgccgttagttggaaggcaagtttgcaagccactgttgccttatctactactgaagcagagtatatggctatttctgaagcttgtaaagaagctatttggcttagaggtttgtacactgagctttgtggagttacgtcttgtgttgatatattttgtaatagtcaaagtgcaatatgccttacaaaggatcagatgtttcatgagagaacaaagcatattgatgtgagatatcactttattcgaggtgtgattgctgaaggtgatgtcaaggtatgcaagagaagtacgtatgataaccc

SEQ ID NO: 29403 - DNA, 616 bp, Oryza sativa
gagataaaagttcaagtaggtaccatggcagatcaaagtccagaggcaggtataagtcatccaatatgcaagagagatggacatgatatttctgagtgttggaagctacaggacaaagacaaaagaaccggaaagtatataccaaaaggtaaagccgcagttgttattgatgagaagtctgatgtagaattgcttgttgcttatgctggttgtgcacaaactagtgaccagtggattcttgatactacatgcacctatcacatgtgcccgaatagggattggtttgccacctatgaagctatccaaggtggtactgttttgatgggtgataatacaccatgcaaggtagcaggtattggaacagttcagatcaagatgtttgatggctgtatcagaacattgtcagatgtgcggcatattccaaatttgaagagaagtctcatatctttatgtactcttgatcgcaaagggtacaaatattccggtggagacggaattttgaaggtaactaaaggctctcttgttgtgatgaaagctgatattaaatctgccaacctgtactatctgcggggtacaactatattaggtaatgttgcagcagtttctgattcattat

SEQ ID NO: 29404 - DNA, 6792 bp, Oryza sativa
gggggttgaatagtaggaaaaactaaaaaccaaaaaacttttagcggaaataaaagttaccctcaaatcaacgaaaatctcgacagtcctgtcgtcgccggtcggaccgtttgcacgccaccgatctaaccgccgccttgtcgccggttgaaccgcctccctgccgcgagtgtgaccgctatactcgatgaaacacaaatcgaaaaactctcaaagtagatgacaactttattgcttctctttgtgtttacaaagtgcaataacagcactccttacaaaaatctcgactaaactcgaaaccctaactaaaccatcaactcaattgctctccaaaacgataccgggaagtcttacgctccctctttatttataccgtaaaaatctcctactcaaagtaggtgtagaactcctattcacaataggactcgatcaatcccttaatttcttttttctccaaaactgcagccgcaccgaagtcgaactcctcctgccgcgatgctgttgcttgctgcatgaagccgactcggcttgcctatgcatggatcaagccttgccatcgaccaggacaccatccatccaaaccaatctcagctccacatgtatatgcatgcatgctagccaaccagctgcacacagtacacatacacactacatactagcatgcatgcacgcatcgatcacacatacatgcatgtactgcatactactactccaaatttcctcaaccaatttcattcacgaacaccgacgcttgtcctcatacctcgtgaagcccgttgcggatatctctcccacacgatatccatccatcgtatgccatctcgtatccaacttcgtcacccggtatccttaaccgtctggacctcaactcctccctgagtctagtcccgatccccaccgttgaccaaagttgatcttcaagaatcctgactctagtcaccttctcacatggtatcccgaccgcactagacctctgttcctccctgaacatattccggtcctcaccattgaccaaggctgacctcaagtcacctgcacacaatcagataaaccaaccgtttctgggcacagatatcacaacctgacccacattagtcacacgcactcacaccaacatccacacaaaccaattcattgaataaatcatttgtaaagccaattgttcatcacaaatattaatcttgacaatgatttcagtatatacttaatttgtctaccggtcaatacaattctttctactgtagtgtgggagcgtataagcgtatagaaaaagcacgagtgatatttgtatgtccagttgctcctctcatgaaaatctaccggactagtgtcgtcaatcagttaccaaaataaccaaaattgtttgcctctacaacgagtttttttctgttttctattgttttgaaatataggaaggtacagtttgtatgtattgattgagatacagagagtaaaaaattagaagagaaagtgggcagagcctgtaggccagttgaaaagaaaaatatgttaccctacattaaaagaagtatcgattcacgcagtgtacataaatacatctcaaccaatgcccctctttatgctcccctaccaagaatgcccaattctgagcttgtttgtgcttgttgcctatgctgcaactagttttttgttgttgttgttttcttttgttttgaatgttaggaaggtacagtttgtatatgtattgatagagagatcacacagaaaaaaattacaagagagagtgggcagagcctgatggcctagttgaaaagaaaaatatgttactcttccctagtccctacattacatctcagtcaatccccaatttatcttcccctactaagaatacccaattctgaaacctctaatccattacaaacatgaaaggttcgtttttagtatatatagatagtagtacctccgttttaggttataagactttctagcattacccacattcatatatatgtgttagaaagtcttataacctgaaacggaggaagtagaaaagaaaatggattgtgaatgggaggacatgggaagaagtctgtcactatggattctttagctctagttccttcgccattagaaccatcaaccaaacagtctctagctacagtccgcaggtacacaacgtacaacgagcctccatttcacaattttttgatacacaacgtgctcttatgtctgtgaaagtatacgtgtataaaatgaagcactcagattgtcaatgccgcatggttccgtcaggttttaattccatacttattggattgcagtcagattgttttctttttttgaattttcctgattcggatttcacaacaagttattgtggattacccagtaagaagctggccaatgtgtacatacttcaaataccaagttttgtttcatgatctactacactgtaaatttatcagagcaagatgaagatgattgaagttagtaccgagaaacattgctgctttcaaacatttttttcctagaccactggttactttttaaaaaaatgtggaacctcagttttatgttacaactgttccaaaaccctgtgtgaaatttagacaaaaagaatgtgaaaatataagagtttagcaagaaaaagttggtatgtataaccttttcctatctgatatgcatatcttctatgaggtgccactgttgcgttccatatgaaaaagctaataaaaatacagaaaagattccaactcaagtagctacctagcgtgggggaaaaaatgttggaatggaaacatgatctagacacgattgatttgcttcaacagacaactgttcttttctatgccctgaccaggactcttcttcttccccatccagggagacagtcgatcagaattacacagcaaccatggattaattactacatttctgaagtgtaggtaggaattatgataggaatgggaggatccaggaaggaaaacgacagccaccggttattttggtgagccatcaagcttcttggttagaaatgatctaaagtttcaggggaaattcaaggaaccttcgcaggtgtgtcatgcggctgaggctatggtaactacttgtttgaaatactcaaatcactatacactgcatgctgatcatcaattggaagatcataacaagagaagggagcgaggaaaaaccaaatggtggcaggtgttacgttgatgcaggctgggagaatgaattaactcgagttggaatcttgcttcatataccttagagcaaggataataatacatttgacctgttagctataagtttttttagttttctcttagcctacacatataatagttagttctttacgattaataaagggctcacttgtctttctcacggagtttcttggttcttgtgtccaagccggctgtaagtttacagcccacttttcttctctctcctctcttttctcctacacctcagcatttagccggcttatagcctactattatacttgctcttatagaaagaagagatatttttggagaacgaaaataactaccatgtgcttgtcttcagtgcatttggcactgccattttttagtactcatcctgcaggcttcaattgaggagctagctaggagcctaggagtgttgatatatagctacgtgttggaaagttgtttggagtgcagataaaaagacagacattccaacttctgatgaaaacacaatccaatttcttcgagagaaagactatcgcatcccaatatgatgatttgcttcaacacacaactgttgtatataaaccctgaccagggcacttcttccacacacagaaaatcgatcacagcgtcaaattcttaacgcaatcacgctagaatcatgaatgaattaagtactattacatttctgaagtttgggtaggaatgggaggatacaggaaggaaaactgcactgcactggatttcagtactactctccaaaactagctatcctaggatgagtcaccaggtaattaaattaaatgagccatcaaacttctaggtgtgaccatgtgaactgttttgggcgtgttcggaggagattgttctggctgcacagcgcagcggctgcaacacgctcagtaaatttagtgctgcttgcactgttggtaactaggtacagacagcttcagccccagatgagcatgtttgtcttcaatgccaaagcacatactagatttttccggaagacccacatcctttgtacaattagtagttcgatgcaagcattttcaacaacttttttcccatcctgtactcaccatatgcgtgtcaaactctcaaggtttccccccagccagaactatgaaatatccgattaacttttattgcatgctgcattagaaatgtgaggatacaggaagagatttatagcacactggtgtatccctaacagtagcaatataattaacatgtcacaagtcacaactccatccttatagctccttttcatcagatgctcccacacagattgtccgatccagactgcagccgcgattgcaacttcgcatttaaaatggcagtaggagatttttaagtagctgtccatatccactgctccatcaatctataacaccccaaaaataaaaagaaatgacatatcggttttcagcttcagcttatagaaaaaaaaaagaagttgggggcagaaattaagggaaaaacaatttacatatggactagtacactaagcaatcgtaggccgaggccctactaaggccctgtttgtttcagcttaagattgttgtaatctagattattaaatcagattactataagctggattatgataagctggcataaaataatctacgagttgtttgtttctctggattattagaggcatctaagggtagtgggtctttagccacttaataatctgaaaaaagctcctctagagaagattattggattatagtaatctcgtttatagattataataatctagcataataatctacttgtttgtttcagcttactcctaataatacagattataataatcctaagctgaatcaaatagggtcttagttgcatctccacctacaactttagaggtcaaccaaatcgtgcctcctcccctagatctcctacaccacagcgttactcaagagagaaggcggtagaaaggaaacaaggaggaagaggattgttgctcttgttataccagttgtttgagagcattttgatggtttaattcgtggttaaggatgcatacatataataagcggtttggtcgttctgattcggattgagttctgcgcacaagcagacttatatagttcctctgttattttttttatgattaggtggtcaaaacgattttcattttcaaaaaaaaaacatataactagaaaccttgttgatatcatcgaggccgagccattagtaaagtcatagttgttttagtttttttttcttaatatacagatagaccctagcgtttgtaaaaacctagctatttcaagtactgcgaattagggaatctaaatggcataataataatgtggtctctacatgaatgttataggtcttgtacggtagatttcaaatatgttaaggtctcttaggttatgtacatttaaaaattttgacaatttgaccctttgcaaaaactatttttacaaataaaccgctgccaaaacttatttcaaatctgacccttttgctcaacgccaaatcatatggcgctgaacttagacacctcaacgccaaatagcatggtggacaaaccatctttcgtcggtcggccgaattccacaatagtcccggatgcaataaaaaccggggctaaagatgatctttagtcccggttaaaaagggtaatgggcatatttgatctttagtcccggtttgtatcatctttagtcccggttcaaatgctgtcagggcctgtcaggccccctaggatctttagggactaaagatcgtaactttagtctaccaaccgggactaaagatctcggggatctttagccccggttggtaacaccaaccgggactaaagtcccacccctatatatatgtcttcttcctcctccagctgcccgagcaagcttcaaaatttcttcaaaaaagaggggaggtcatgccaaaatttctagtgaatttattttggtgaatacatacaaatctgaggtgcctaaaaggtttgcaacttcatcctccaatgttttttttttgtcatattacatttgcagctatgttttgcagacttttttgtctccaaaatttagttgtaagttgatgagggagaaaatttgtgtggggaagaaagaatatatagaaatttagttgatttgctaaagaaggttttataaaatagttgagagggaaaactatagtgaaagttaatcttgaatactagaaaacaaactaaaatgaaaattaaaagaagtaaaacacattaaaattagtttaaaactttagaaatagtaaataataattatttgctgtaatattttatgatttttgtatgaataaagatatgtcattattgtatgactgttgaaacagtttgtaattatcttataattattgtatgactgtcattgttgtaagaataattatttttgtacgattttttttgactcatgtagatggatcagcaatggatgtacgctgaccggtggtccaaagagtttattgacggcgtgcactattttttgagagtggccgaagctaacaggcaaaggggttttatttgttgtccatgtaataagtgtaagaatcagaaggagtattttgcatccagaactattcatttccacttgtttgagtcggggttcatgctaag

SEQ ID NO: 29405 - DNA, 981 bp, Oryza sativa
gtcaagaacattctccgaagggaaacaattgcaaaagacaacgtcgaggttaagaaaatagtttgcccgctagacttagaagttcaaaagattcacgcatgtccgaatgattgtatcttatatcgcggtgaggagtatgagaacctagaagcatgccttgtttgcaaaacactatgataaaagattagccgagcgatccaggagaagttgacggacagctacaaagaagagaattcctgctaaggtgatgtggtatttccctataataccacggataaggcgtttgttcaggaacaagcggaatgctagaatgatgcgatggcacgctgaagagcgtcaacaggacgggatgctgagacaccccgccgatggttcgcagtggcaaaacatagacaaaaaatttaaagaatttggaaaggactcacgaaacatacggtttggtttgagtacggatggcatgaatccttttggagagatgagcagcggccatagcacttggcccgttacgatgtgtatctacaacctccccccctggctatgcatgaagaggaagtacataatgatgccgattattattcaaggccccaagcaacctggtaacgacatcgatgtgtacctaagaccactggtcgaagatcttaagctgttatggaagaaggaaggtgtccccgtgtgggacgaggacaaacaggaggagtttaacatacgagcgctgctgttcgtaaccatcaacgattggcctgcacttagcaacctatccggacagtccaacaaggggtacaaggcttgcactcactgtatggatgaaacagaaagtacatatcttaagcactgtaggaaggttgtatacatgggtcatcgtcgattcattgcagcaaaccacccggtacggaagaaaggcaagcacttcgaacataagcctaaacatcgcaacgggaaaacagtgtttgctatggttaaagatcttaaagtagtgttcgt

SEQ ID NO: 29406 - DNA, 744 bp, Oryza sativa
ctctcgccattattccccttgtcttcgccgcttgcgccctaactccttgtttcctatgccctaccttcgccacacgcgctcgctctcaaacatctcttcttccggcgtcatggcacggggctccgctccgcttgacggtagcgtgctgccgccttcccgcatcgtgagcgagagacaggccgggctgccgtgccgcttcatgccggaatctgccaccggccgggaaatagtctcgctgggcgagggatgcccggcgccacgctacccggggcggtccgtcttcttcctcccttttgctatggcagggctggttccgccattttcttctttcttcatggatgttctggagttttacgatctccagatggcgcacctcacccccaacgcggtaatgacattggccatcttcgcgcacctgtgcgagatgttcatcggggtgcgcccatcccttcggctgttccggtggttcttcaccgtacagccggtgtcgccgccgtcggtggttggtggttgctacttccagccgcgggggccggtgctgaaccgctacattccctgcgtcctccgcaagaagtgggatgactggaagagcgactggttctacacccccctcgccgacgaagcgcgcctccgacttccgagccagcctccagcgcaggcctccaactggcgggcgccggtagatctgggagatggcttcgacgccgtcctcgaccgcctggcgggcctgcgatcccaggggct

SEQ ID NO: 29407 - DNA, 936 bp, Oryza sativa
gatcccctaattattttccattgttaaatatacttttatgtatacatatagttttacatatttcataaaagtttttaaataagacgaatagtcaaacatgtttacaaaaatcaacggcgtcaaacatttagggaaggagggagtaccacgcattcaataaactacatttttgcgatgtccgtcaaccaatcacatgatttttacttgtcatgtagtgaatatgccgtgttattattgtccaaaacaacgagaattattataaaaccggtgggagtatccaaacttatttttcagagtgtaacagccctatatgcttattacaagctcaactggctatcgacaacatgtcacgatagccattattagttcagtgtgcaagccgttcgtccgcaagctcgtgcagccccaccggcgaacacgcgaggatgacgcgtcccaacgcctccgcttcggccaccaccggcgcgcacgcaacccacgcccaccgctccacgccgccgccctccaccccgccccgccggagctcgtagaggacggcgcccgtcgccggcacggccgcattgtacacgtacccaccggcggtgttgccgcacaccccgatcgacggcgacgacgtctcctcctcgccgtcgtcgccgtgcgggaacagcctctcggacatctcgctcggcatcgtgtcgtgcgccgccgccgcgccatgggacagggagaggctgtcgccgtccacctcccatgatcggatgacgactcggctgtctgcatgcttcactccgaacaggatgatcttctcggcgccggcgcggccggcggcgaggccccatgtggagacggtggcgtcagggcggaggcgggaggtgggtccccactgctgcttcgccgggtcgaaccagctcgccgtccccgtggctctgtccgcgacgtacactctctgatccg

SEQ ID NO: 29408 - DNA, 3396 bp, Oryza sativa
catcaacctaaaccggatatgatcatatgacgatcctggttggaacacttaatggacaattatgatcatatgacgagaaccggatatagtcatatgatgatcctggctcgaacacttactgggcaattatgatcatatgataatcaagcagataacttaatatgatcatatgacgatcttggttggaacacttagtgggtaattatgattatatgacgatcctggttggaacacttaatggacaatttcgatacatgccattttctttcatagagaaccggatatgatcatttgacaatcctagttggaacacttaatggaaaattctgatacacgccattttctttcattttcttccatccccggacgccattttctttcatagagagaaccatatatgatcatatgatgatcctagttagaacacttagtggacgattttgatacgcgccattttctttcattttcttccatccccaaacgttcatcaacgtcatcaaatagagaaccggatatgatcatatgacgatcttgtttgacgatcctggttggaacacttccagcattgtctgatgaggtctaacgggagtttgtgagtccaactcagatgttttttttcttttcatacttgggtccatgttttttcgagtcctaattaattttgcgagctacgaggacatagaaaaggtttgctattggttgaccggccccttcataagggctgtcacaagttctagccaacagagtcgttctttaacataacatatctactttttaccgtaagttttgcactatctcatccatcttcagtagtttgcacttaagttatctgttctcctttggaagtgcaaatctctttgcaggtctgtcctgaaaacttttcgtttcgctcacacgataagtgtctatctccaatttatatatggtagccggtttttatctctttttcatcttgatcaggagttttttaacttcaagatggattatgactccatacacaccacaaggctcgtgaagaggatcctcgtgttggaggtaaaatacgaacactatgtgtcaagtcatgggagtgggtcaaagggcctagatcatatgttgtttgctttgagattattactacacatgccagaaagatgggtgagctaatttggccgaagaaatgacagatgtgtagtgtgtaattctcttccatggtattcctagttaatatttctatcaaccatagctatcaattaatgttaactagtatcctctccatcccaaattgatcatcatatatgtttatgcaccaagacaaaggagaatttaaatcgcatccatcaatacaccatgcaaacattctcccacaatgcgtgcatcaattaaaacactatgccaattataccctagcatacacacattctcccatgatgcattaattgtattatgataaaacccgtatccatgcggttatatgatgatcaatttaagaaattttggattccattatatgatgatcaatttgggaagaaggaagtacatgcatataacttttttcatcaacaccaagaaagatttaactgccacataaattgtatttaatgtaagtttatgatggggaagaatcagaaacaagcccctaaggccattcccaacccaagacactagacatagtttccataaactccacatcatcaagaaactagtactagacactactcttccaatgtaaacaccactattccatacttaaattgacggagcttggggctcctcaccgggagaccgcgcaggcccccctttgccggttcggccgggggccctgggtgagattctaagctcctggtctgtggaaagttcgcgagagtggaaacacacaagacacgggcgatgtatacaggttcgggccgctgagaagcgtaataccctactcctgtgttttggtggatctgtatatgaagaagctacaaagtgcgagccagcccccgattgttctgggatcctttttcctcccccctctctaagtgggcaaggtcctccttttatatctcaaggggataccacatgcaccatctctccctctctttcttttgtgtggggactcatcctctcttccctccaacttgacttctcttcattaatggacggagatttgtatggctgccgtccgaatgaccttctgatgggacggcccatacctacctccacttccgccggaagcaggcgcgacgtgggaacatggctgtctgctgacgacatgaccattgtcagaccggtctcaaatcggtcattcttgtccaccacgtgtcagtttaacaatctgcatgctcgcccttcttcatacaatatcttgcctgtaatggttaggatgaagcctggcatatatctgaccggaaccaacgtgccatctccaggagctaacacgccggctccggctagggacgagtgcttggaggctctcgtcctgacgggatggggcgaggcgtgcgtcagaccgcctgtcgccacctaacccacgatctgaccggtctgtgactggtcacagaccggatagacgagcgcgctgcactgcgttacatgcggcgtgacgcgctcgtccaaaccgcaataaatgtggttaggtgagccccgctatgctcacctaccccatatacgcggcgcaaaacccacaaggggtcggggcgcctcggccctcggggccgaggcgggagcggtccgaccccctcggggagataaagaggagggcgaacacatcaccctcgggcccgacgccccccgagggtgccaggccacgtaggcgattgtgtctgcctcaagcctctagtcatgatactcccggtcccatgtcaccgacataaatttaatgctacttatctcacatgatgtcttggatgttgtgtagaacccatctgttaggcaagacatggttttcttctctttcctcatttattcacttgccacatcctttttcattctaggtggcagcttatttaatgctatggacatcatcctaattattgggttaggaatagcctaagtatccctaaatgtctgcatgcatacatgcatacttaattctcatgtatagatgcaataatggtacacgccaaactaagggacaatggttatgtgatgataaatttggattttttttatttttggttatatgcttattaatatgaattggagaaagtactacttaacatcaattatgcgttggtgggagaactgtttcgagacaacctagaagaaacaagtttttgttatagtataaaaatgaaaatgcgcagtacgacaagaaaaaatattaatgtggcagaaccatggtcaacctaatttgatttcattcaactcagaattactctctctctctctctctatgtatcactcaagcacgcggggggggggggggggggg

SEQ ID NO: 29409 - DNA, 4287 bp, Oryza sativa
ggggggggggggttggtgcagcactgtagtagcaaatttttttctcaagctatattatagtaaattataatgttttcatgtattatcaccatcaatggttcaacataagtaacaatggagttaggttaataatatcgagtagaatacttccttttattttagtcatgaatatttagtgtctaggataatacattcagtcaaaattgtatgttttgaccataaaatttctgaaatacttaactaaaaaataaaataaatggtcgatttgtctggaaaattataatcatccttgagctttatcatgcctaatatgcttacttttttttgcatttctagtattaaccagagttttttttaaagaaattctccataaatgcacatctcatttttagtcatgcaacaatatttagataaaataaaagacagtaactatacatactatcctaccatggttacattgcatcacagcatgtatatatttttttctctccaacgacaactattatcacacaattcaaaacttatctttcaccggagttcttccaatgaatcaaattaacttgtaaagaattagaaaaggagaagaaaagatagaggagactgcaaactgcaatgtaactcatggacaaaaagaaaggacaaagacatgcgtgcatacagctgtactcataaataactgcagactgcaacataactcatgctgtgtttatgggccgctcgtgtgtctcctgtggtctggtttctgatgtagggggtacactaagctgggagaaggggggtgcccatacggtaagtaagggtgttaagcactaatttttcttttttagccgggtgcccaggaaccccgcaggctgtacttagcttcgagcctctcaagcactgatgcactcaccatctcaaattatcaatgcatcaaccgtacaacaatgaatccatgctattagaaagtttaggaagaaattgctataggaatgagaggcatcggtaagaaaagtagcactagatcaagaatatctctcagcgcagggataacctattgatgagcaatgattttagcttggaggtctgtgcgaagtatctcaaatgccaatgttagctgttctttcgctcaacagcctacagttgtctcttcaagttgcgctcactgtttccacccattttaaaatgctagaaaagtaaataatgacatcactagctcaaatataatcatggataccttatgtattcatcaaacgaaggtgtatattttccatttgagatttacgcgttatatttgtgaacataaattattgctcttttagattttgttttgttgaattttaggttgcatcatcgtgtcgagtgttggtttagttttagatttaattttttgttttgagtcaggtatttttaggtttgagtttgccgcttagtctgtactttgacggtagtatttcatgttagtgagtttaggtccaattttgtaagaatctgtttttgtcgggaccatggaaaattgaacatgttgttgtcggttttttgtttttatagtttgcataaatttatgtcggttagttttggagttacattgttagagtttgtctgtcttatcgtgcttgtttgtgcacctagattagattagagaagttatcctccatcgcgtcaaggcttaccttgctccacttggttggcccaatttagtgtcgatccgacgtaggttatgatgatagtctttatgttttacagtgaccaaattttggtttacataaacggtacattgtagttgagtcactatataacttttgtcttttacatttgagtctctgtaatattcatatttacttttgagtccctagtcgaagttcattgataagtaataattgaaaaaaagataaaaaagagaaaaggtaaaatggtgctaacaagccgcaccaataaaaggcaaaaaagggaaaagaataaaaaaagaaaaagaaaagaaaacaattatctttttagtatgtttggggagtgcaaagttgttctttgagttgtttctaggatttagtgttgtcgggtgcttacttgagctagagctcaatatagtattttcaactattattcaactttgtatttactgattagcacaaatgcttttccttgctactatatattatgcccccaagctacacatacatattttttgtcatcacagttttaaccttgcaattgttagatcacatcctcaaggtatcattatcaggcatcggttgtaccatccctacctttgctggtaagaacattgttagagcacggtaagacacttctatttgcgagttccatcacccttgttcttatgtattgtttactgttttctactaacaacggcaggttatatcactcatcgacacgagataatgttggatgggagacaaaccacagttggtatgtcaccttctacaattgaagttaatgtaagaattttggtgcaaaaagtgctaaattttcaaatcgagaaagcagagcaaaagcattgccacaatttattttaaataggtttatggttaacgatagagcatatcatgttacaatcgataatgataatggtaatgatagtgatgctacatttactcaaggtatgcatagttatgatgcgctaaatatgtccactacttacgctatattagagtatccaatagtgaaaacaattactaaaatatctttatcacaaaaaaatttgcttgttgttttaggtaacgacgaagaagagatgtgtgatgcttcacttatatccatgccacaactagtaaatgaacatgttaattctatgcttgaaccaccatatattgagtttaaacatgttattcacatttttagagagaatgaagagcttaaatcgttatcttcttcaaatacatggggctatattcaatttgaaaatctttgtcaattgaactgtttagagaagaatttagttgctagatctgaattgccacagccatctaatatgatttttaacgttattggaaattatgatagtaaaggataatataatatacatcgagtatatatttgttcaaatttgaatgtatttcgttttcatgatgagatgtattgtccggaggaccgcatccatataagtaattctctatctagattctctagatatttaaatgagttaagttgaatttcaagaatgggagtactgtggttttcccgagtataaaaatttcagaatccaaccatttgaccatgacgaagactacctcgcctgatgcttttgtagataaaaaaaaacatcaactggcacaaaaaggtgaaactgagaacggtttccaatcttgaaggggatgacgatgatggcatcactagctcagatataaccatgcataccttatgtattcaccaagcaaaggtgcattctttttatgtgagatttactttaacacagattatttcatgtcgtgggctaagctaaagggatggacgccctaaggctaaccctaggacgtcactaatcatatttattcattagcaatcaggttttgctaagattattttggcaatacaatttttccactagtttggtttgtggaaccccaaattagagtgcttaatcattgatttgcaaattaagttgtaatctatcgtgtttttacttgtgtttttcaattcgcaagcaggaattaggcttctcgatgaggtcaattgagtttcgatacgattgataactagagaagtcatggtgcttcgattgtggggtttggatcgtgtgtgtcaactatccgctaaatcaagaattatcaatagctatcgaaagctcgggacctagttccccatcagttacgtaattatttatcatcctggaacagctgccaccacatgcatgccaccacaacatgactacccccaatctgtgtttacccgtcatgatctcatatcatgttacccgtcttgttaggtgtgacatcctagcctaattagaatgaggcctgtgtagcccatgcgagctgtgcgtgcatatttactaccacctttctagtttagcaagtatggaactaacttataaggcctcagtccctccaaccatgccactcccgagttaacccttttacacgaagcgaggacgtaatgtgtagtaagtgggctcgtccgtcggatgggctggctacgcggttctggatggagggctattacattaggttattaagatgaaacaagttgagatgagataaacagtactattattattcttgtggaaacactaaaaagttgcgtgcagaataaaagtgtcatcgtcctgattcgattttcttcagtacagaactg

SEQ ID NO: 29410 - DNA, 3206 bp, Oryza sativa
gtaattatttatcatcctggaacagctgccaccacatgcatgccaccacaacatgactacccccaatctgtgtttacccgtcatgatctcatatcatgttacccgtcttgttaggtgtgacatcctagcctaattagaatgaggcctgtgtagcccatgcgagctgtgcgtgcatatttactaccacctttctagtttagcaagtatggaactaacttataaggcctcagtccctccaaccatgccactcccgagttaacccttttacacgaagcgaggacgtaatgtgtagtaagtgggctcgtccgtcggatgggctggctacgcggttctggatggagggctattacattaggttattaagatgaaacaagttgagatgagataaacagtactattattattcttgtggaaacactaaaaagttgcgtgcagaataaaagtgtcatcgtcctgattcgattttcttcagtacagaactgaactacatattctgcacctcaaattatcagtgcatcttcaattcctacctactggttttcatctctgtatcatcttggttgatagtagggctggagattagattggtttctttgacatcacctcttttctataaagctaatgtgctaaatcatcattctcaaatcattttcatgatattttcaatccaatcatttcatcatttagttattactacacacgtccaaaaaaggatgagataaaacaaaggaccaatgtgatgtgcaggtttgttccatgcatggcatctttatctatctattatatactaaaagtccattaaatttcctacaaacactctcaagctgtcacgtggcgctcttacaaacgctcctagaccgccatgtgccacaatctaatctcaccgtcgattttcgcttaaattggtggacccgttattaaaaaataataacctcctcatgtttataacatataggcgtactactgctgatctttccatacgtacaaacttacattatctttcctaatcttgctggaaaaaaaacgtacacatgaatataaaaaaagatagaaaaaacatatatccataaaaatcaatggtttttaaaatatgattttagataaaatatattagttcacaaatataaacatatttagttaaatatatataaatatccaatcaatgttctttaaaccatattctaaatctatctaataaatattaaaagtacattaaatttctacaaatgcttttacaccactacgtggatctcaaataaattagagaaatcctagaaatctattatatactaaaactctattaaacttcctgaacgctcctacgttatcacgtgacgctctaatttagagttgttgtagaaatttagagtaaaaaaaagaaaagcatccaaccttcaattttcacttagatttgtggaaaattattttaaacattagattagagttcttaaaagtcccatgttgctaatctctatcccggaaaaaacataacgtgcttacgtcagtaccattgtctccctaccgggaaaaaaaactttaataccgacaccatatatgataaaaaaataaagccaaaaaataaaaaagaaaacatgcacacatacatagtagaatcgaaaagaaatactaacaagaaaaaatcatcgatgttggcacatatttgttgtcaacagcctttaatctatgattttaagatcttcctccccaatctaatattatagtcccggtgtagatagaaatttctttatggtctaattccgagtggtagtaaataccatgagttagcaatattttcattgataataatttggtatattccatttattataaaggttgctaaggaattcctatcaattatagggatgcttccaatagaaatggtttgcttatgcacatcgaaaccaaaaattaatcgtgcggatatgtagaattttaaagaataggtgagtgattcatacacagcatccctttcttttatcgaaggttctagcaattgatatcgggattttttacttaaatctaagatccattcttatcacattagtagtatattaaaatccaccatctattttacggtaaatatatttctttttttattgtaggataatctaaatttccttagtcatgtatgattcttttagcattttttaatatcaaataagatgcttgtgcatcggtgcgaaattcctttctaatttatattccggaaatgttctccagtttatattatattgttatagtgtttgaaacacaaactatacatgcccacgcattttacttcctagttcctaattaatacttctatctatcgtaactatcaattaactacaaatcgctaggacaagcatatgagtgatgacgggtaggttggagtgtaccgtttcgtgatgtaaaaatgagaaacagttttctttgttcaactattctaataaaaaactacagttacttggacaaaaatgttcacagcctaatttcttttccatcaattcataataactactctatatatacctcgccgttcttttgtacagcccaaacgttaaccatcacaaattctcaatgcatccaacctacaaagattaattcacttgtaattttgaggaagaaattgccataggaaccagaggcttcaggaagaaaaacaggactggatcgacaatatcccgtaatgggtagaaaacctcttgaacagcaatgattttagcctggagattcaaaacaacaaatcgaggctgactctgccatatgccaagtttccttctgttcacaagttgattacctggagttgtggtagaacagttctaagtgcagcacttcatttacaactaggaaataagagacttcgtttaataaacaatttgaagattgatcgagcttgcaacaccaacaggaggaatactctgtctgggagagctagggtccagtcttgctgtgaaactgcttggtgaactccacgaaatgtttgtcttccatccatgaaacacaatttagtttcgtattatcgcgaggagaacaaaaaccatgattctcaatttttaataatggaaaattgttgaccttttctccattctctgcagtgtgtgcatactgtctgattattttgactagaaaataaagtggaatgaaatctataacagggcaaaccattgaacattaactaaaggaaaatagtattgatctttctgataggagctatattacctgta

SEQ ID NO: 29411 - DNA, 4941 bp, Oryza sativa
cttactgctaaatcactggtggagaaaccatctttcgtcggtcggccgaattccacaatagtcccggttgcaataaaaaccgggactaaagacgttaaaaagggtaacgagcatatttgatctttagtcccagttggtaaagatcatctttagtcccggtttcgtaactttagtcccggttggtgttaccaaccgggactaaagtctcacccatatatatatatatatatatatatatatgtcttcttcctccttcagcccgagcaagcttcaaaattttttaaaaaaagaggggaggtcatgccaaaatttctagtgaatttattttggtgattatatacaaattggaggtgcctaaaaggttagcaacttcatcctccaatgtttttttgtcatattacatttggagcaatattttgcacattttttgtctccaaaattttgttgtaagttgatgagagagaaaatttgtgtggggaagaaagaacatatagaaatttagtttatttgctaataaaggttttataaaatagttgagaaggaaaatatagtgaaagttaatcttaaataatagaaaacaaactaaaatgaaaattaaaagaagtacaacacattaatattagtttaaaactttagaaatagtaaataagaattatttggtgtaatattttataatttttgtatgaataatgatacgtcattattgtatgactgttgaaagagtttgtaattattttatcattattgtatgactgtcattattgtacgaataattatttgagtatgatttttttttcatttcatgtagatggatcagtaatggatgtacgctgaccggcggtccaaagagtttactgacggcgtgcattattttttgagagtggccgaagctaataggcataagggttttatttgttgtccatgcaataagtgtaagaatcagaaggagtattctgcatccagaactattcatttccacttgtttaagtcggggttcatgctaagctataactgttggacatcccacggagagcaagtggttgaaatggaagaagatgaagtgaaagacgacaatattttggattttgctcagtacgctggatttgaaggaaatcaaacggatgaggaggaaagggatgctgatggtaacgacgttgcagatgatcttggtcagatgttgcaggacgccaaggaggactgtgaaagtgaaaagggggcccataaattggacaagatgttagaggaccacagaacgtcgttgtacccaggttgcgagcaggggcacaaaaaattggataccactctggagttcttgcaatggaagacaaaaaatggtgttagtgacaaggcatttggcgatttattgaaactcgtcaagaacattcttccggagggaaacaaattgcccgagacaacgtatgaggctaagaagatagtctgccctctaggactggaagttcagaagattcacgcatgtccgaatgattgtatcctatatcgcggtgaggagtacgagaacctagaagcatgccttgtttgtaaagcactaagatacaagattagacgagatgatccagaagaagttgacgggcagctaacgaagaagagaattcctgctaaggtgatgtggtatttccctataatactacggctaaggcgtttgttcagtaacaaagggaatgctagaatgatgcgttagcacgctgaagagcgtcaataggatgggatgctgagacaccccgccgatggttcgcagtggcgaaacatcgacagaaaatttaaagactttggaaagaacgcacgaaacatacggtttggtttaagtacggatggcatgaatccttttggagagatgagcagcggccatagcacttggcccgttacgatgtgtatctacaacctccccccttggctatgcatgaagaggaagtacataatgatgccgattattactcaaggccccaagcaacctggtaacgacatcgatgtgtacctaagaccactagtcgaagatcttaaactgctgtggaagaaggaaggagtccctgtgtgggacgaggacaaacaggaggagtttaacccacgagcgctgttgttcgtaaccatcaacgattagcctgcacttaccaatctttccgggcagtccaacaaggggtacaaggcttgcactcactgtatggatgaaacagaaagtacgtatcttaagcactgtaggaaggttgtgtacatgcgtcatcatcgattccttgctgcaaaccacctggtacggaagaaaggcaagcactttgaacataaggcggaccaccgtacgaagcctaaacatcgcagcgggaaaacagtgtttgctatggtgaaagatcttaaagtagtgtttggaaaggggcctggaagccagcctatagagagcgaagatggtcacgcggcgatgtggaaaaagaactctatattttgggacttaccctattgggaattcttggacgtcagccatgccatcgacatgatgcaccttactaagaacctttgcgtaaacctttttggcttcctaggtgtatacagaaagtcgaaagatacactggaagcacgtaatgatctgatgcatatggaacaacgcggcgaccttcaccaggaaccaaaggagaaaggaagccattacttgagtccagccagctacactcttagcaaggtagagaaggaaagtatgtttgaattcttggagagcataaacgtaccgtctggatactccatgaatatcaagcgaataataagcacgaaggagaagaagttcacaaacctaaagactcatgactgtcacgtgttgatgacacagctgctaccagttgtaataaggggtatccttccagacaatgtccgggcaacaataacaaagctatgtgcattcatgaacgcaatttcgcagaagatcatcgatccggatagattagaagcccttcagaatgatgtggtgcaatgtctcatcagttttgagttgatatttctaccttcatttttcaatataatgacgcatctgctttgtcaccttgtgaaagagatcagtattctcgggcctgtgtacctacacaacatgtttcctttcgagaggtacatgagcgttctgaagaagtatgttcgtaaccgtgctcgtccagaggcaagcatcgccaagggttatggaacaaaggaggtcatcgaattttgcgtagaatttattgaagatcttcgcccaatcggggtacctgaatcacgccatgaaggcagactacggggaaagggaactctcggaaggaaagcaataatgacggtagacaacaattattccgtaaggcccatttcacggttctacaacactcttcattggtagctccatacatcgaggagcacttggctttagttcgcgccaggaacatcggtaagtccgaagcatggattatacggcatcacattgatactttccccgcgtggctacgacaacatctcatgggtaacgagtcgatcaaccaacaacttgtcttcttggcgaggggaccgtctgggtcgatcacgacattccagggatatgagatcaatgggtatacattctacacgagagcccaagacatgatgagcacgaaccaaaacagcgttgttcgtgtcgatgccatgggacacgatggaacaactggctcgtattacggtgccatcgaggacatatgggaacttgactatggtcctctcaaggtccctctgttccagtgccaatgggttaggttgactggtggaggagtaatgattgatgacagtgggatgacaacggttgaccttaacaaggttggatactcggacgaaccttttgtccttgccaatgatgtaacgcaagtctttttcgtgaaggatgtgtctagaaaaggaaagaagggcagagggcctgacgagcctaagcgtcacgtggttctcccaggcaaaagaaaaatcgttggagtagaggacaagactgacaaggattatgatcagttggatgggcaaccccctttcacggtgacgattgaccctagcatgctcctatcaaatgaagacaccccttactcacgtagcgatcacaaggagggaacaatagtgaggagaaagtacgtgcggtcaaccgtcaccgccgatgtaaactattttggatgtattgattatccatataaatcaattgatgtatggcatatgttaattacgcacaattattagaggttttaacaagtttaaatcatgtatatgctagttatatgcgatacttacaatttttaaaagttttaaatcacgcaggtggcaatttcatatgttagttagagtttttaacatttaatttactatcattcatatgctaattataattgactagagaatttttaaaagtttcaaatcatgcatgtggcatttacatatgttaattagagtttttcacaatttaatttactatcatttatatgctaattatatatgactattcgaatttttaaaatttttaaatcatgcatgtggcatttacatatgttaattagagtttttaacaattaatttaatataattcctatgctaagtatatatgatgattacaatttttattaattttaaatcatgccgtatgtatatacatatgttaattagagtttttaccaatttaataatatcattcatatgctaagtatatatgattattagaatttttattaattttaaatcatatatttgcttattacgttttatccacttaatttattacagacaacaataagttttcgaagtaattgtcattaatctttgtactttaaataattgtaatgcattatcttctattttagaaacacatatgtaatggaaaataatattcagtgcgcttatcagtagtcccggttcttaaccctaaccgggtttaaaaagaatttggaaatagcgggaaaagatctttagtcccggttgagg

SEQ ID NO: 29412 - DNA, 3179 bp, Oryza sativa
ccgggactaaagatctagggctatatatattcccgatgcgcgccctcgtcttctccaccagcacttagaagtttttacccgatcgatctctctcggcttctccttcgccgccactgcctagggcatccccgcgccgacgccgccgccgtatctcgccgtcgtctcgcgctcgtcgtcgtcgccgccacctccgcctcctccgcccccgccgcatctctggggtgagagccgccgcgcgccgcctccctctcgatctctctctccgatctcgatctctctctctccctctcggttgccgccggccgacgagttttagacgccgacgccgacctcgtcacgacacgacgccgcgccacgacgacgccgcacaccgccgccgcgccacgccgatgccgcgcgcggcgccacgccgccgccgcgccacaccgccgtcctgctgccgccacaccgagaacgtgaacgagcgaacgaacgtgaacgagaacaaggtgaatgaacgttaacgagaacgagcgaacgaacatgaacgagccaacgaacgtgaatgagaacgagcgaacgaacgtgaacgagaacaaggtgaatgaacgtgaacgagaacgagcgaacgaacgtgaacgagccaacgaacgtgaatgagaacgggcaaacgaacatgaacaagaacaaggtgaatgaacgtgaacgagaacgttttcggacgaacgtgaacgagccaacgaacgtgaacatgaaatgcaattataggcaggttaatgaacgtgaacgaacaaacgtaggtgaatgaaacgtgaccttaacgagaacgcgaacgtgaacgatatcgtgaacgaaacgtgaacgtcaaatgcaatatatgttacttcgcgtttatcctaatacatcttttcgtatcttgcagaaaagacgttgtcggagtcgtccctcaagccggagtggtagagctagccctcgaaggaattcgcccaggcaagtgacgtaattatatatatatgattgttatatttgtaatgcaattaagattattagatttgtaattagagttaattagcatataagattgtgtagtgttctaatatacgacagttacacttagaatacatgactatttgagttttagtataagattattggagttttaatataagattattatatttgtaattagacttagtatataattattgactagctagggtcctataatatacgtcacctagacttagcatatatcactatttaaggtttagtataagattattagatttgtaattagacttagcatgtaagattgtgtagggttctaatatacgacagttacacttagcatacatggctatttttatcttagcatataagattatttgagttttaatataagattattatatttgtaattagacttagtatataattattgactagctaggttctataatatacgtcacttagtcttagcatatatcatcactatttgagttttagtataagattattatatttgtaattatacttagcatgtaagattgtgtagggttctaatatacgacagttacacttagcatacatggctatttttgttttagcatataagattatttgagttttaatataagattattatatttgtaattagacttagtatataattattgactagctagggtcctataatatacgtcacctagacttagcatatatcactatttgagttttagtataagattattagatttgtaattaaacttagcttctaagattgtgtagggttctaatatacgacagttacacttagcatacatgactgttcgtttagtcttagcatataagattatttgagttttaatataagattgttaaaacataaatgtctcatgacttagcagatgtttcctgtatgaacagagggctgatcgcgatgaggaacagatattgtatgatacaatcgcggagggaagcagccagtactggaacgaagaagaggggaacgaggatccaaaccagtatttgaacaaggaagggaacgtggagagggatgcggaggggaaccaggagaggcacgtggaaaggaatgtgaaggggaaccaggaggaggaggctagtgaaagtcaaccctccgttggacagaagagggcacgcaagcaacgaggtgccgcgaagaagcttgagggtcggcacatcataaccgaagtggaagaagatggacaacctagtgccccggcagaagccgccaagaactatgtacgtcacagcggttgggttgtgcgggataacgtgcctatcagtacggtgtactggcaaagaacaagggcacgcggagatcatgagagctttgtcccagattcggagaaagagatgctgtggaccacaatgctcgagacattcacccttcccgcgggtacagaggacaaagtgaaaaggtggactctgaagaaaatggcagaacagtttcagagcttcaagggagagctgtacaagaaatatatcctgaaggggcagacactgaacttcgacacattcccaaagctaagggatcactgagacgagttcgttgcatataagacaggtgaacaagggcaggcgatgatggaaagaaacaaagaaaatgccgccaagaagaagtaccatcaccacttggggtcaggcggctatagcgtcgcgatgccgaagtgggaggagatggaggctagcttgcttgagaggggtatcgaaccggccaccgctaattggccggaacgatcgaagttctggtactatgctcacggtggaacgctcaacccagctgatggctcactggtcttcggcgatcagatacaagaggctgcgcgtcgactaacagacgcagtggaaacctcttctcagggcacgttccgaccgaacagagagagggacgagctgtcactcgccctgcagactccagagcatccaggacgaccacgagggaaaggggtgattccttggaagattgggttcaaggacatccacacgtacaggagtcggatgaggagcaagagagataccgaggcgaagattgcagatcttgagtttagggtatcgagctacgagcttagcatgcaagaggaggtggcaaggaaggttgatgaacgcatggccgcaatcggtccaatgatccccagccgaccattcctcctgcaatggtgagcctgtcaggaaagggg

SEQ ID NO: 29413 - DNA, 1534 bp, Oryza sativa
catctacgagacacaagccatgtcattattctatggtgcaggcggtacatcatcctccctgggcgacaagcggcgtctcgtgcaccatctcctccggctccgccatctcctccttaggatcctgcaccgtctcctcctcaggatcctgcaccgtctcctcctcatgctccagcaccgtctccacctcaggctcctgcaccgactcctcctcaggctcctgcaccgactcctcctcggtctcctacaccgactcctccgcaagctcctcttccggcaccttcaaagtcaagggccccccaagctccaccgcctgcccacagaagggcaacgaagaaggcgaaaattgacgctgccaagaacaaggacccggggtacgattgcacgcaagaggagcttgacgcttacgtggcatcagaagtcaagagataattcaagcctcgaagtccagaaaagaagattcctatagacccgagtgtcatgaacttcttcaggggtatgtctgcacctgccaaggaggccattaagctatcggactatgagcgaacgctgaagaaagcatcttctggaaagtccaaaccagtccctcagcttggagagcaaccaaaccaggagatcgagccgttgatgaccggtaaagaaatgacgatagaagaatttattactgacatcggtttaactacggatcaattgctaggagtcgcaccaatcgaaaaggcggaagtgaaatacatgtacgaactcggtaaactgcttgtcaagcctgagctactgcagtccctacccacacaaatgtacaagttccatcagctgtacatggagatgagcgccatcggtagagagatgatcggagcgaggatcagggacacggacttcttgcaaggagatgacattctctagatcaatttcaagggaatctacgaactataccagctggacgctctcgacgtctctattatgagttgctggattttgtaagtatatcgttcagttagatttcttactacgtctcctttaattaattaggtccttgtatataagtagactatagaaaataatatactcccttttatcgttgtagaatggagattcaaagggcccgacggcgggggttttcgataatggattcatcgaccctcggaaagtaaacgtcgcaatgctcgaccaatatccgcaagccacagaggacaatctcgtccatctcctgaaggcgcagcattacaagacgttcatactgttgccgtacaacacagagttagtttaattttactgtcttcctataccaaatttcattcccgtacgaacttgctaagtgtttcatatgtaatgcatcccacgcacattgcagattccactgggtgctttcactctttgacgcgtcggcatgcaccgtcaaagtgtatgactggcaagaatccagagtatgcgtttacacaggttttctcacatataatcaggtccagtcataagtccctctgttcattaagccaatcatataatgttaattgctgttaatcatacctgtagactccaatta

SEQ ID NO: 29414 - DNA, 796 bp, Oryza sativa
atgaagcctggcatatatctggccggaaccaacgtgccatctccaggagctaacacgccggctccggctagggacgagtgcttggaggctctcgtcctgacgggatggggcgaggcgtgcgtcagaccgcctgtcgccacctaacccacgatctgaccggtctgtgactggtcacagaccggatagacgagcgcgctgcactgcgttacatgcggcgtgacgcgctcgtccaaaccgcaataaatgtggttaggtgagccccgctatgctcacctaccccatatacgcggcgcaaaacccacaaggggtcggggcgcctcggccctcggggccgaggcggaaccggtccgatcccctcggggagataaagaggagggcgaacacatcaccctcgggcccgacgccccccgagggtgccaggccacgtaggtgattgtgtctgcctcaagcctctagtcatgatactcccggtcccatgtcaccgacagtagcccccggcgttatgccagggcgatcgccctccccgagggaagcggtcgggcgtgacgccacttctaaggcctggtgacaggtggggccggtttaaaaatcgggacaagccggttcgtttttcctggagatatggtgatggcgcttcggtcggcgagcgtaattaacgcgcgcacgagatgttccatctcgactgccacagccgcatatccacctcatgcaccgcaaacgggcgaatgggattagtggaagcgtgggcgcgagaaacgagggggcaagatagtgggcgcgagaaacgaggagccgg

SEQ ID NO: 29415 - DNA, 6637 bp, Oryza sativa
gcctttgacgctatcaaggccccggggatggtgctccggccgtcccagccgattatcggtgtgacgccgggtcacacttggccgctaggtcatatcgacctcccggtcaccttcggtggatccgccaacttccgcacggagcgggtgaactttgatgtggcggacctcagtcttccctacaacgcggtcctagggaggcccgcgttggtgaagttcatggcggcagtccactacgcctacctccagatgaagatgccgggccccggtggccccatctctgtccatggcgaccttaaagtcgcgcttgcttgtatggagcagcgcgcggaccacctcaccgccgcgtcaacccgagggaggcgacgagaggcttggcacctccgcccccgcccccccgaggcagcggatagtcacatgcgacgaggtcccggtcaaggaggttgccctgggcgacggcccgtccaagaccacacggatcggtggtcttctggatggcaaataggaacacgcgctcgtctctttcctgcgggcaaacgctgacgtcttcgcatggagaccggcggatatgcccggggtccccagggaggtgattgagcaccgtctcgccgtgcggtcgggcgcaaggccggtccggcagaaagtacggcggcaggccccggaacgtcaagccttcatccgcgaggaggtggcgcgacttctggaggccggattcatccgcgaggtcatccatccggagtggctggcgaacccggtggtcgttcccaaggcgaacggcaagcttcggatgtgcatcgactacaccgaccttaacaaggcatgtcctaaggacccttaccccctgcctcgcatagatcagattgtcgactccacagcggggtgcgaccttttgtgttttctagatgcatactctggttaccatcagattcgcatggctagggaggatgaggaaaaaactgcattaattacccccataggaacttattgttatacgacaatgcccttcgggttaaagaatgcaggtcctacttttcaacgtactactcgaatttctttgggtagccaaataggacgtaatgttgaggcttatgtcaatgacttggttgtaaagacgcgcaaccaagagaccttactctcggatctagcggaaacttttgagagtctccgctccgcccgcataaaactgaaccccgataagtgcgtgttcggtgtacctgcgggcaagcttctcgggtttttggtctctgcccgaggcatcgaggccaaccccgagaagatacgagctatagagcggatgcgcccccccagcaagcttagggatgtgcaatgcgtcaccggttgcatggccgccctaagtcggttcatatcgaggctgggagagaaggcgctacccttatttaagctcctcaaacgctccgggccgtttacttggacggaggaagctgaacgtgccctcactcagttgaaggcgtatctcagctctcccccagttctggtcgccccggagccaaatgaacccttgctactctacttagcggcgaccccgcaagtggttagtgcggcgttggttgtggagcgcgatgaggacaatcctcattccgcgcacccccaccctgtgctgacttggcccgggagagagcagggaggagaggcccccgagccgaacggtggcccaaggcccccgacgaccggagcaggccctctgcccgcttgtcagacggtgccaggtgcccccgacccccaggatggcccgagggccactgcgggaaggccgcacctatcgccctctgaccccgaggctaaccctgtgccgactcgacccgggagagagcagggagaagaggcccccgagccgaacggtggcctaaggcccctgacgaccggagttggccctttgcccgcttgtccgacgacaccaggagcccccgacccccaggacagccccgaggccactgtgggaaggccgcccctgtcgtcctccgaccccgaggtcgtcggcacagaagacgagtgcaccctgcgaggccgcttggacaaagagcgccccagggatgtggcccctagcgaagaggatcggccgcaccgaaaggtgcagcggcccgtctactttgttagtgaggccctccgagacgccaagacccgataccctcaggcccagaagatgctttacgctattctaatggcttcgaggaaactgcgccattatttccaggcgcatcgggtcacggtggttacgtcttaccccctcggccaaatcttgcataatcgagagggtactggacgggtggtgaaatgggcaatcgaactttctgagtttgatttgcactttgaaccacgccacgctatcaagagccaggccctcgccgattttgtggcagagtggaccccagctcccgagcccgtctcagtccccaaggccagctcgggcccctcgcagctgcctcacaccgcccactgggtgatgcagttcgacggctccctgtcttttcagggcgccggtgcgggggtcacgttgacctcgccgagcggagacgtcctcagatatttggttcgccttgactttcgggcgaccaataatatggcagagtacgagggactccttgcgggactcagggtgacagctggactgaggatccgccgcctcctggtgttagcagactcccagctggtcgttacccaggtctgtaaggagaaccggtgctctgacccgcagatgaacgcttacgtgcgccaagtacggcgtatggagcgccattttgacgggatagagcttcggcacgtgcccagacgggataacacggttgccgacgaactctcacggctcgcttcctcgtgagcccaaaccccaccgggcgcctttgaagaaaggcttgcccagctgtcggcgcgacccgaccccttaggggagacggacgcacctgacaggccccagatgcccgtcggagtccaggcctcgggacccgaggggagcgctcccagctcccttagattgattgcttggatcgctgagatccaagcatacctcacagataagactctacccgaggaccgcgaagggagtgaacgcgtccagcgcatctccaaacgttacgtgctggtagaagggaccctctatcggcgcacggctaacggaatcctcctgaagtgcattcctcgggaacaaggcgtcgagcttcttgccgatatccatgaaggcgaatgcggagcccactccgcctcgcgcaccttggttggcaaagcctttcgacaaggtttctattggccgacagctctcaatgatgcggtcgacctggtccggcgatgcagagcgtgtcaattccacgccaagcaaatccatcagccggcccaggccctgcagatcataccactttcatggccatttgctgtctgggggctcgatatcctgggaccgtttaggcgggccccgggcggttttgagtatctgtatgtcgcgatcgacaagttcactaagtggcccgaggcttatccggtcgtcaagatcgataagcactccgcacttaaattcattaagggcatcacagcccggtttggagtgcctaaccgtattattacggataacggcacccaattcactagtgaacttttcggcgattactgcgaagacatgggcatcaagctctgcttcgcctcacctgcccaccccagaagcaacggccaagtggagcgcgccaatgcggaaatcctcagaggccttaaaaccaagaccttcaacatcctcaagaagcacggcgattcgtggatcgaggagttgccagcggtgctctgggcgaaccgaaccacgccaagccgagcaaccggggaaacgcctttctttctcgtctacggcgcggaagcggttctcccatccgagttcaccctgaggtcccctcgggccaccatgtactgcgaggctgatcaagatcagcttcgcagagatgacctcgactacttggaagagcgaaggcggcgcgcggccctccgagccgcgcgctaccagcagagcctgcggcgctaccatcagcgccacgtccgggcccgatcactctgcgtcgacgacctcgtcctacgccgcgtccaaacgcgtgctggattgagcaagctctcaccaatgtgggagggtccgtatcgagtgatcggcgtcccccggccgggctccgttcggctggccacgggcgatggcacagagctgcctaacccgtggaacatcgaacaccttcgtcgcttctacccctaaagcggatcgggtgtcaggtttcgggctcgggccaaccccgcacccccctcgggcgtgcagggttggccgggggctaccacatatgcatattcttatttctcttatatctgtctcaataaaagcattttcgatttcctaaaggctgtatctgtgctgttgtttccttttgaaggatcttgacttgaaataggtcactcgtgttcaatcctgccctcgggggctcgggtcggctaaaatcgccaaacgaggcccagaaccgagccgtgccccggggcgtggtgaactccgggggggaatcggcaaaaacccacaatcgggtcacccataaccctcggtcaccacgctcccggcctggccagtctcgacatgtggatctccccaggcactagccccgacccaaccatttgaggactaggacctgggcacgagcccttgttcaagccaagacacaaaaggaccgcggcacaggcatcctcgtctcatacacacaacaaatataattgacacaaaaaatttcctctttatttgattgcagattaaattagtctatacaagaagggggcccgaaggcctcggaagaagaaaagaagaaactatttaaagattggcggaggcctgggggctcactccgatgcacccgggtcgccagcctcgtcgccacagtcgcccacaccaccgtcatcgccctcctcgtcggagttgagggcgaacgcgagccgaggggccgaaccctcgaagctgtggacgatatggtcggcggcatcccggacctgcgcgcgcgcgccgtcctcggtcccgggagggaactcgtccagcgccgtccatggggagaagtcggggtccctggccaggtaactcgccagtacgagctccaccgctcctcgggcaaggtccctcgaggatgacttaatcgtcccctcgagctcctcggggagccgctggagagtcccggccatctccgagaggcgctaggcgaggcccccctggttggcggcgtacttcacagtccgctcgccccagagacccgcctgctgccggcgcggtctaaacgggacacggtgtcgcgaagcatgctgggccctatctcgcctgccaggcgaagggcctcgacctccccggtgtacgaatccagcgcgccctgcagatccgcgatggtgtgttcggcagctgcgaggcgggcagctaagtcgctgtcgcctgtggccgccccgccgctacgcgcccttgcatccagttcccttgcctgcgcctcgagttcagcggcccgctggttcagtgcggtcctctcggcgcgggcactttccagattgcgacgcgcttgttcctcttgtgcagcctcgcggagggacaggctgtccgccagcggttgcgccgcggcctcggcctcctcgagagctcgctcccgctcggtgagcgcgtcctcgcggaggcggagcgcggactcttcttcagcacaggcggcttcgtgcaccgccagtgtgacctcccgaatagcaacggcggcctcgcgatccgccaggtccctctccacggcgcaggcacgctcttccagcgccatggcacgggcctcaagggcttcttcgcgccgccgggatgccacctcggtctccgccgcccgctgttctcgggcagcggcagcgtcaaggaccccccgggcggcgtcgagctttttccctagctccgcctcccagctcccgtattgaaggcggagggtgtcctgcgcctcgttcatcacggtggtggcgatgagggcagacccccgctcttcctccacctccttggcgatctcccccagcaccttccgacgggcttcgagctctgagacgtgccggcggtgtgccttgcggcccacctccaccatggcctccaccgagcgtcgcccctcttcgacacgcgcccatgcggcgtcaagctccgcccgctctgcttgcagggcctccacctgggcacttaacccgtccaacaccgtggtgtttgcgacggccaaggcctgcagaaggggttctgcgctcagtggagcaacagaaggcgtggggaagagccgcctcggtgaggatgccgcgcggctcggcccgccgatggacgtgccggactcagggatgtcccccggacctggcttgtcctgagcgtcgctcgagggagtgggcccaagcgatgcgcccgcggcctcgtcgcgagctacctcggaagtcgtcgccgcctcggcctggcgaagtctggcctcctcccgagcggcttcttcagcttggcgagctcggacggccacctgggcggcctcctcggcttcccgtaggcgattcgcggcttctcgccggtcagattcctgcctccgagcctctgtggtcgccgggtccttggcctcagactggccggacttggaatggcgggagggacgcgacgggatct

SEQ ID NO: 29416 - DNA, 849 bp, Oryza sativa
cttgaggatctccaccttggactcacgaacactattcgtgccttcatgcaagttccgaagcatgtcccaaatcactttggcactctcaatgccatccacacggttgaactcacttccactcaaggcgctaagtattgcattagcggcttgagcgttcttgtgcttgttctcgtcgtcctccttggtgggatcttcgggattctgcaacacatagcctttttcgactattctccaaataaatgggttaatagacttcaaatgcatattcatcttatgcttccaagcggcatagtccgtaccattgaagtacggagctttgccgctataggtactcacataagatgtagatataggtggatagtcataaggaaatatagctcccttatcaccatctttgccttcccccgtttggcccgacatgatctctttaagcggttaagcctaattaggagattaggctctgataccaattgaaagtgtcaattaggcctagaggggggtgaataggctaattcaaaaatccaattaaaagcggaagcagtaattttcggatatttccgaaatttttggatatatctgaaaattttcggagtcagcacaagtagcaaagtaaatcctagatctagttgcctacaacaagaatatgctagcacaaacagcaactatacctatagcggctcaagaaagctaagctagtggagagggaggaagtaaagtcaccaaagatgaagctcacaaagatgttcccgaagttttttggacatgtccgaaaattccagctcagcaccaacagcaaagtcaacgagagatttttcggacattccgaaaacttttcggacaagtccgaaa

SEQ ID NO: 29417 - DNA, 1937 bp, Oryza sativa
  unsure (1)..(1937): unsure at all n locations
caagctttcatgacaaggcatttccaaagccgacacaggtttaccatatgccgacgagaggggtcccagaccaacaacaggttaggtcccagaccatactgtgccaggaagcccaggggtcctccccgacaccaccccggcgaatccacatgtctctcggcatcaaggctcccctgataagctagttactcagccaggggtgtcccattccacccatgtggtcgtacttgtcttatgttcggatgaaattccaaggaaacggtccttaggtgcaagagcgggaaaccgtacacccggtacgttccccggtccgcgattttggaaattcatttagttcgcaagcaccgacccaggtgtcgggttttccaagtcttttgtaaaacccaagttttacccaagatgtttttttcagattttaagtttgaaggcggccgtcgatactcgtgcagagtgcacgatttccgaggcgcaactgggtggttacaagggaacatggtataacaattaacaaaggaaggatcaaatgcaacaaattaggtaggtccgtcaatctgccttgcagacgggacaagcagattaagtgcgatcctatcaatgcataataatctttcaagcaacataattaagttcaaatataggctcaagatattcaaaggtggcttgccttgctcgagatctggagcttgatcctcgaaatcctcgcactgcgggtcttcgggctccgaaactatacgcaaaacgggacaactcaacaaacggcgaaaataaagccctattaatgacctctaagcgtgccattagatagatctcgagatttgaggaattttggaagttgaacggagtcaaacggacttacggttgggaagatattgaatttataagattattggatttttggtctaaaggaaaaggatttacttaaatcctttttttgaaaaagaaaagaaaagaaaagaaggagggggaaaattagacttccctcgggaggctagggcgcggcccgagagaaaaggggcggctcggccgagctaaatgggccggccggcccaacaaggcggcccaaagcgcgcgcgcggcgggggagaaaagagggagccggtggaccgggctcacctcgcgtggtcccgagtgggacccgcttgttggtgacacggttcaccgtgcggaacgcgcacgcggcgcccgctagggtttgggggaggnacccggtgcacgcgcgcggttcgcggaggacgcggatgcggcgggcccacgcgcagcctcacggctcgcggtggaccgcgcccgcgagtggggccgaggggagcggctgaccggggtcggctcgacccggtcttggccgagctggcgccgacgtggctgccacacgggccggcgggaggtagacgacgacgccggccggaacggacggcggacgacagcggcgagcggcggagcgaaccacggcgatacaggcgaaaacgagcacaccgggtggttgcacgggacgagagaagtcgagccaacggctcggattcgccgaagggagctcgacggcggcggattgcggcggcggcaaccggcggagagaaaagggtaaaacgtcgacgaggtcacgaggggccgattcctggcggcgagagcttctacgcggctacgggaatccgtcccttgcgccggattaggaggaaacgcatcgagggaggccggcgacgagaggcgcttccgagcttgggcggcgacggcggcgagcacacggcgagcggcggcaacggtcggggcggcgccggctagctacggggaggctactcgtgctactacccgagtctaaggggaggaggtggaacgaggaggaagaacggagggaggcactaccgtgcgggtgggcgcagtgacgagagccgacggcacgaaacgtgatcgtttcggcctctggccgaggaagaggagggggaggg

SEQ ID NO: 29418 - DNA, 1430 bp, Oryza sativa
  unsure (1)..(1430): unsure at all n locations
caaaataatttcccaaggtcaatcaaagggtcttttttggtgcttntgtcacatgcctggcaggatttatatcaagccagggaagaanatnttcccattaaactgcaggccctatttgttcacatgtatgatggtcatcnccatgtaacaaagagccatctgaaggctgcagctgaactcatccaatcagtctctgtttatgggcaactagtattaatttgcacaataatcttgtgaacgatgctaaacaattaattagtaaattaatttggatcggatagggcgcaaatatgttccccatttcaaagtacactactgtcgagtattaggagcttagtgtgacgcccccacactcttccgaggcctcctacatctggcagctttcataggatatagactattcctcacagaccaacactagtcttttctgcacactttgtcctcactcgtgcgcacccgaaaagaatttcccgatcggtcacccatcccgacattgctctagggcaagcacgcttaaccttagagttttttcgagatcggctttcggaaaagaagttgcaacttgttgatagcttaaccttagagttttttcgagatcggctttcggaaaagaagttgcaacttgttgatagcttaacgcttccggaaaagaagttgcaacttgccgatatgagtattttattaatcatattaggatatcacattctcaccccccttaagataccgacgtcctcgtcggtcaacccaggccaggaacgtcccctattagcaccacgtatatacaagacaattttcggcgcacatacgtcatgccatacgaccacttcgtggatcatcccgtatgcaccgtatgcccgcgtacatgttcatatatatacgtatagctgcaagggtcgcgtacatgttcatatatacgtatagctgcaagggtcggctctgataccaacactagtcttttctgcacactttttcctcactcgtgcgcacctgtgaagaatttcccaatcggtcacccatcccgaaattgctccagggcaagcacgcttaaccttagagttcgagatcggcttccgaaaaagaagttacaacttgttgatatgagtattctattaattctattaagccctgagccaggatatcacacttagctagtataaactcatcgacaacagacaatgttctatatatatatataactaattaattaacaggatcatgttagagctcataataatactagtaatcaaagcaaaggactaactaatcaatcatatactccatccataggcacaaccacccttaacaacctaaagatcaagaaataattattactagttaatgacatgcatgtatgcacgccttatattataaataacttaaaaattagttgtgcctagtatgttatggaatggagagagtataagcatgag

SEQ ID NO: 29419 - DNA, 1433 bp, Oryza sativa
agtcaatagatcgcgggtaaaatacattcactcaggacatacctccagctggggaccaagatgtcaatcccgtaaatataagatgtgctccacatgactcgcatgcaattttgtccatttcaatgttcacccagcctcttcgagcacaagccagtgaactagcagcctgtaaaaattaagctattagtttcttctaaaacaaactggatttgtcattttcagtagcatttttttcctctttgcaatacgagacatcaaaatggccgaaaataactttatctaggtaccataaggtacatgctaagctggacatttcagaaagtgatgtactggttcaaaaattatcaaacatatgcctgatctggatttcagctgggcatttgggcaaacatgtcatttgccctatacattgtaattcttcatttagacatggatatgtaagcagctaggtataaagaacacatctaagttacaagatgtctcctgagcattaccaatatgcaaaaaaggactaaagagaaaatatatgagacaaaacttagtgttgtatgtggcatatggataaaaattatactccctccatttttatttacatgacattggttatttctattttgaactaagcgtcaaataaaaaaaacagaggtagtatatctttagcttcagacttccattaccaaccttatcatgtttctcagcattcacttatatacatcctctgagcgaaaaatgttattcttaattctaaactggtataaatgcaaaagggtaagattgagcggcttgccaattacaaattacaatcacagaaaataacaaaaaaggaccaactagagaagagaaatgacctttggcttagaagcccatgttgaagacttgaatgtggccagtcgccgaagcaagtctcctcgttcccatggtctacaagatggttgagagaaatccacggcagctccagcagcattagtactaagagaaggccgaggagcatgtggagcaatctgggatgatgattccactttggatattggctcaccacctaaccaatctatgctagctgcatttgtttgtgcaggtggtgatgatgcaccagccgaactgtaaataagagaggaatgagcttcagcatgcacatacaccagaatctatgtggagagcatacactgaaaacgctatactgttctgaaacaaatcctatcaatatatatcattggaacattttaattacaacccaaccatagtaaccaaataacgataaaaaatgatagtacaacagtttattctatctaaaaatggtaagcattccaaatttggcaaatatccaactagttgggctcaagatgagactacgtaagtaaatgaccacaaaaacatgtattttgacaccagtaaaaagaacatgtcatcagtgtgaagaaccacaacaggtgcaa

SEQ ID NO: 29420 - DNA, 699 bp, Oryza sativa
ctgattgttaattttgtttcgctgccctcgcaaaaaaaaaaaaaatttgtttcgctgcttttgctgctggaaagaagcagtagggccttcttttttgacttcacgggtggagtgaccggtttaccctttgaagccgtgtccttggcgatggagagtgatcgaggttgacaggtggtgaaaatacggggagtgtttgggatgtattaaaaaatggtgttcaatttatggaaagattaaagtatttatcaagtgtattaagtgtgacaagtaagaaaaacacgcaataagttatttagataaatagtacaaactacatgtttaagtatgaactccctccatctcaaaataaaagaaactggatgaggcattttctagtagtacgaatatggatagcttattttttaatcctagattcttatattttgggatggaaaagtatagggttaagaaaatttaagtatgtatccgtttaaattaatacacatttataattataaatgatgaccgaagtgtaaactttttttttgaagcggggagaagatgaatttcactaaatatgtactactatatattacatttatgtagaaccattcgacatcgtgatattaaactttattaaaaaaaaataaaagggggagggggacgaacttcagtaacatgtactaatagtttattacattcgtatagaacaattcaaca

SEQ ID NO: 29421 - DNA, 1878 bp, Oryza sativa
  unsure (1)..(1878): unsure at all n locations
ccgccgcccaccgtgccatcgnctatacatacccaccccccacccacctccttgtaagttgcaacctcccgcctcacccgccgccattgacgaccaccgcgctcgtcccatcccatgcctgcggccgtgaccgcgaggttgtgaggagaagagagtcccaagagaggaggatcgatgcggcagcggcaggccggcgagcaggaggcggagctgttcgtccagtggaggccctgcgacaagaagcggtcctagtcgcccgccgccgctcgcccactcggcggcgtcgtcgatctgagagggacaggggaagaggaagaagcagaggaggaggaggatgagcgtgtcgggcgggaggacgcgggtggggaggtacgagctcgggaggacgctcggcgagggcaccttcgccaaggtcaagttcgcccgcaacgcggactccggcgagaatgtcgccatcaagatcctcgacaaggacaaggtcctcaagcacaagatgatcgcccaggtcagctcacccatactattttctatccccccaatcgattctcgatttggagaggtctccatggatttcttcccatgatgatagtactggtcgaatttctcgccttcttgtttttttttaatcatatcatacgctgttcttgagtgaatttcgtggacaatttcaattcctatacgtacgagtcccaaatcatgaacagtttgtactactgctgttttgtttcctctcacgacaagacgtgatgattttgttttaaccagaaacagtaaacattactaattactactagcgttcttgctgcaaaaaaaaaaaggtttggtatcgttccaaaattgcgttcttactttcaaaattgcaacagcctagactttgacgtgaggttagcacgggcgcctcgtgcagtgttcgttggaacttgtgctgagttagttattattaatgtgcatcaactttggcttagcttctgactttttgtgggggagttctgactttgatgtgtgtttgtggtttgtgtggtggtgtttgcagataaagcgcgagatctccaccatgaagctcatcaggcaccccaacgtcatccggatgcatgaggtttactaatctccaatcattaatctcagctcatcttgcccatggaaaaattttgtaactgatgataagtccaccaatgaaatcgactaatcataagcagagctcgtgattttggttcgaaattttcgaaatttcgggtctaccagtgggtcctggttggatgtgattcccagtcttgaattgtggattttttttttaattttgtaaaatttgttcgaattcagctagagcctgttcaaaattcattttttttctggtttgaaacttctgaaaaattttggtcccccccagattttttttttctaggccgagattgtgaaccctgctaattaagttaagatatggttctcaaggctttgagcaatctgaaattatgaaaaaccagggtaaattaaattggtcaaggatgacataatgaacaagttgttccttcacatgaaaagttgcaattagagatcgttctggaaggaaattcctgtgacactaaactatgtgttatctgaaactttcctagctcttgctttctgatattttccttttgttgtcttggctttatgtcgatctccacttagtggttttgttttcttctctgaaggtgatggccagcaagaccaaaatatacatagtgatggagcttgtcacccgtggtgaacttttcgacaagattgtgagtgcttggccttttctatcgacatctgaattactccttatgctatgcacacatgttcaattngccataaatcctcgtataggctttcgcgtgggaaggctgaaagaggatt

SEQ ID NO: 29422 - DNA, 2443 bp, Oryza sativa
aaaaccagtgattgaatccacaaattcatttccagccgaaaattttcgtgctggaaggaagtgccactcccaaagtaccattttttggatgagggccctgtccaacaggtaaaagtaagtattttgcctctcccaattaatccttaaataacctttggagaagagtttcctttattcaaaagtaataaaaagccgagagttgttagtcgtaaaaaaataagcatttcaattgctttctgtagattccatttgttttctacatcttttcacatggtaatacagatagtttcagatccatctgaataaagttcttacattagtgctgcatatctttctgtttactctgcaggaggatggtctgttgcacactacctgtggaactcctaattatgttgctcccgaggtaccttcttacactcatacattaaactagtatatagttattatcatcgttggattgaatatttgttttcatgttacttatctaaaaaaatatttgttctcatgtttcaataatattgtctgtgcaggttatcaacaacaaaggatatgatggagccaaggctgatctgtggtcatgtggagtgattctctttgtcctcatggcaggctaccttccatttgaagactcaaacctcatgtcactttacaagaaggttggtccctcttaaccatgtcaaaggattgttggtttatgaaccctaaacaaagtttttgtttggaagattaatgtgattattgctcatccagatcttcaaagcagacttcagttgcccgtcttggttctctacaagtgcgaagaagctcatcaagaaaatactagatcctaatcctagcaccggtatgttttgcagcattttacccttcatttctttgaagcattcttatacataagtagcttatcccatcgttatctccttgtgcagaggattaccatcgcagagcttatcaacaatgagtggttcaagaagggatatcagcctccaaggtttgagacagcagatgttaacctggatgatatcaactctatttttaatgaatctggggtaagctctcacaccattcagctcatagcattacattcttcataatgcactggatgggcttggtaacatctattctaactaacgcaggaccaaacacagcttgttgtcgagaggcgagaagagaggccatcagtgatgaatgcttttgagttgatctctacatctcagggtctcaatcttggcacactctttgaaaagcaatcggtacgatcacattcttaaattggtcattctgaagtctgaactaaacatgttcaagtacacttacagtcatgagttataatctaaaatgctaaaccaattttctttctacttttagcagggttctgtgaagcgagaaacaagatttgcatcaaggctgcctgcaaacgagatattgtcgaaaattgaagcagctgctggacccatgggctttaatgtacagaagcgcaactacaaggtaactaatccaaaattccacaacttgtttctaccatttttatctgaaacaattaacattctgatgacacttttatggattggaatcagctgaagttgcaaggagagaatccaggaaggaaaggtcagcttgcaattgcaacagaggtacaccaatgatacaacatcactatttactatgttctgtcattctatatgctgtgcagcttgtgctactactctttcctgggtttatagactgaaatcagttcatccatttctaaaggtttttgaagtcacgccctcgctgtacatggttgagctccgcaaatctaacggcgacactcttgaattccataaggtacacataacagtaaaattactgcaggacctcacagttcatacttcagactgggattcggctaactcatggtgtaattttttacgcgtttcgcagttctaccacaacatctccaatggcctgaaagatgtgatgtggaagccggagagtagcataatcgcaggcgatgagatccagcatcggaggtcaccgtgattggcagtttggcaccaaaagttcagtgatagtataaagtagataaccagccaggaaaacctactaaggaatggcctgtggctgtttttttttttttggttctttttaccttttaagttgagttactatctaatctagacatggttgtaaacaaagtttgtatggagatggaatgtgaatgaagaatgtgcatagttttgcttccttgacttattttaaaagcagtaacctgtgaaatccgatgaatgaaattgaaatctgcagcaggatgcctgacgatcgtagaagacttgcagcagatatgagattacatatatcctctttatttcagttttgatgcaattcgtaaatcgcaaggctcccatcggatggcctattcagccaaagaaaaagccaaaatttaaattttcaaacttaattttga

SEQ ID NO: 29423 - DNA, 1350 bp, Oryza sativa
  unsure (1)..(1350): unsure at all n locations
agggtacaggcttgcaccnctgtatggataacaaaaagtacgtatcttagcactgtcgaaaggtgtgtacatgggtcatcatcgattcctgcaagcaanacacccaagtacggaagaaaggcaagcactttgaacatacggcggaccaccgtacgaagccaaaacatcgcagcggtaaaacagtgtttgctatggtgaaagatcttaaagtggtgtttggaaaggggcctggcagccagcctatagaacctttgtaagtttttaaagtatacgaacacgtagactaataataaaacaaattacaattacagattccacgttgtaaactgcgagatgaatttattaagcctaattaatctgtcattagtaaatgtttactagagcatcatattatcaaatcatggtgtgattaggcttaaaagattcgtctctcaatttacacatacaaactgtgcaattagttttttttttccacatttaataccctatgcatgtgtccaaacatttgatgtgacgtttttgcctaaaattttttaagatctaaagaagggatacactcaacttctaccctcacctcacttttatacctcccacgttagttttaaacaaaacggtacatttttctttcaacaaaatatttacataaaatttgattttaaaaaaatcacaccaacctatttttaagttttctttacagataatacttcttccatccaaattcaaatggaacttatcctaataggttttaacattttggaacggaaagaatactaaattaattatgcgccaacgagccacccagttttgtgggtgtggctcctaaattcacccttggtatttttacaaacatggatacatctatatatataataataaaaataaatattttttttaaagaaaatagtactaacagaaagaagaaaaagattaaggtttgaaatataaagcaggaattcgatcgatacgacaatagcacatcttccctccgtcccgtcccaaaaatatatcaagtgtattagtttacgtacgatctttgtttgttgtactttgaccaatttctcaccttccattaattatacttataacattaatataacatcacttgaaggtattctctaatatatgaatttaatgtccttacttactcgtgtgtcactacacacttgcctcaaggagtcaagggctcctttagaaccaacaaaaagaataggaattatgaatgcgctagaaaatattccagaatggctcattggaacaaaggaagactaggataacctatgaaatggcttattccaatgaaattttggagggcaactaacatggctcctttagatcgatctcatgtttttt

SEQ ID NO: 29424 - DNA, 704 bp, Oryza sativa
  unsure (1)..(704): unsure at all n locations
cttgcctcttgaagcctatgtgaaagctcatgtaattttgcagttgcaaaaatgtacaactttcaggtgacaaaaaatggcatagggatgtacaaaataaacattaagaggaaaaggtttcgtgtttagaactttaaaaccaagcaatcaaaaacattttcttcctcgaagatccaacaacaaagctctgcatcaagaaacattccattggttgacagaaacaaaattaagctagataagcactgattccacgcacaatttacatgatcattacatcgtccatcacacaggcactcatgcatcgattacacataggagtattgattcgtgtgactagcttaatgaatttgattagccgatgatctggtccaggacgccgatgttcttgaggccgaggacgacgccgacgcccatgatgtggccgacggcgccgcaagccagcgtgtcggcgagcgtgaacccggcggggcataactgcgataaaaagtataagctccagggacctgggcagaattctcaaaaaaatttggaccatttctcgattgtgcgtgtcatccttgtttcatatggcttangatggaggtattgtgtgcgtatgggatgccgagtcgcatttggaaggagttcaaatttggtggaatttgttttgtaaatttgtttcttgtcgagaaggttnctagggtgataggacttctagatgaggt

SEQ ID NO: 29425 - DNA, 601 bp, Oryza sativa
ccagatcttatctctatacctggtatgaacatttgaaatctacattttttttaaatgatatactatttaccacttttaaagcctaatgggcacaagatgatgcccacttatttttgcttcaatactcggtacttatattcttatattgcaattaacttcttgtgccggcgaaattggaagaacatatgaagccaatgttgatgatgtaggttatagacttgttatcatttatacaccctgtgagagaggatggagttgagggacaacctatctctgcttcaacggagccaattgcagttggtatagtccattcacctatcttgtcgcctactaacatttattattatcatcatctcagttttttatccttttggtgatccggcagcggttagctaaacagtttcttctagcctcagtttactttctgcgatagttatattgattcactattaagtttaatcttcagagcattacttaaggttgtcagcctggtctattaactgcttggttttttcttatgcagagcctgcaatttacaacgaggtgaagcagaaacttgatgatggttctgccacgttgaggtaatactcgtttcaagtcg

SEQ ID NO: 29426 - DNA, 1252 bp, Oryza sativa
aaagatccccccctttataaaagccttcttcctccctccagcccgagagcaaggcttcaaaatttctcaaaaaaagaggggaaggtcatgcaaaaatatgttgtgaaattctttttagtgattatatacaaatcggaggtgtctaaaaggttagtaacttcatcatccaagatttttttttgttgttatataacttttggagctatgtttcacacattttttttctccaaaactttgttgtaagttgatgagagagaaaatttgtgtggggaagaagaatatatagaaattttattctcatagtttaaaatatgatgaaaattacttaaaaaatagaaaacaaactaaattgaaaattaagagaagtacaacattaatattagtttagaacttcaaaaattgttaataagaattgcttgtcgaaagagtttttaattattttatcattactgtttgactgtcattattgtacgaaaatttatttatgtacaattttttttcatttcatgtagatggatcggcaatggatgtacgttgaccggcggtccaaagagtttatcgagggcgtgcattattttttgagagtggccgaagctaacaagcgtaacggttttatttgttgtccatgcaataagtgtaagaaccagaaggaatattctgcatccaggactattcatttccacttgtttgagttggggttcatgccaagctataattgttggacatcccacagtgagcaagaggttgaaatggaagaaggtgaagcggaggacgagaacattcccgactgggctcagtacgctggatttgaagaaaatcaaacggacgaggtggacagggatgctggcgataatgacgctgcagatgatcttggtcagatgttgcaggacgcaaaggaggactgtgaaagtgaaaaggggtcccataaattggagcggatgttagaggaccacagaacgtcgttgtacccaggttgcgagcaggggcacaaaaagttggataccactctgaagttcttacaatagaaggcaaaagatggtgttagtgacaaggcatttggcgatttattgaaactcgtcaagaacattcttccggaggaaaacaaattacccgggacaacgtacgaggctaagaagatagtctgccctctaggactggaagttcagaagattcacgcatgtccgaatgattgtatcctatatcgcggtgaggagtacgagagcctagaagcatgccctatttgtaaagcact

SEQ ID NO: 29427 - DNA, 780 bp, Oryza sativa
  unsure (1)..(780): unsure at all n locations
atgatgccatgagaggcncgtttatttggccacctttccggccagagccacactcggcctgctgtttgttgccccagaggaggacaacatggagacgatcgtcgcgcaggatgcgcttgtaatcacgtggaactcgtcgccagacaccgcagatcttgcccgtggcattctgatagacactgagagtgcccgccaaggtggtctccagttgatgctcctccaggattacacccgcatcatcaacgaattgaatggcacgcggacgaccgattcgcgatgaggtgtagaaggagtagtatagattcttcttgtggaacaggaaacgggcggtggccaccacattctgcggattgtaggtggtgtacatggacttcatttcctcacccttgaagaaataggaggtgcggcccgttagcaacgcagcgtaatctataaatagggatcaaatgaaaggtggagataatccaggtgttagataaatacaatagttctcttgttaattaaatgtaggagctggtgaatgggattacaatttcccgcaggatttggcggattctattgggatctgggtgggtgtccggtacttttgtacttacggttcatgttgcgctcttcctcttcattgggcacgggcacatccaaggctacatccgtatctgaaagatggagggaatccaaatagagaataagatgatgctgggcgataaggtacgaccttaaatggaatttagatagcaacaaatgcttcaaagcaaccgaacccgccgccagccatttacc

SEQ ID NO: 29428 - DNA, 6198 bp, Oryza sativa
cattgcactcgctcccgctttcccatggcccctctactccctggagcccctcctctcccctatgttcccttcctcttgagcgttcaaggaaaacaaaaaacttatgtccgtgaacacgttttgatgtactcacccggctgtgttcaccacaagagatcgtcgttgccgtttctctctctatgggaccatgccgttgctggtcgtgttcccgttgttctggttttcttcgttgccgatcaccatctatggataagtcacattgtgggacatgtctagctaccttactcaccgccgtttgattactggagcaccgtcgcccaccttccctcctcatatgttttttttgtttcgggtagggaagacaataaactatgttagtcgttgtttctctctctttcgttcttcctgcgtgttcaaggaaaaaggaatcccctcatccggtaacgcgttttgatgtatactcctccggtcatgttcatcaacagtgcttgccattgtcatttctctctctatcgggacacgttgttgcaggcctattcttgatgttctggttttcttcgttgccaacctctaccatctatggacaagtcacatcgtaggacacgtatcaccttcctcaccgccgtttggacgacagagcaccggcacacatcttccctcttttttattatggatcaaagtagctgacgcggtctataattttcagtggacacactataaatatgggctaactgtattatatatcagccgcgatgtgtgccaaactagagtaatatatagttggccataaggcccgaggcccgaaggcccggcccacggcacgcctttttggcccggcccaagcacggcacggcccgacttgggtcgggcccgtgctggcccggcccgaccgtcgggccgtgcctgggcctccccaccggcacgctgggctggcccagcacggtcgggccggcccggcacgatgggccggcaggccaggcccggtacataaagtatggggactaaaaatagacatataaacgtaactgtctaaagaatagggaccttaaatagacttattttagctatttatataccccagcccaaagaagagggaggtaaaatagactttttgtagctgtacatatgtcacagcccaataggagggaggaaatttagacttattctgaggaaaagcacgacggcccatcgtgccttcgggccggcccggcacggcccgaggcgtgttgggccgtgcctgggccgtgagggcggcacgtgggctggcacggcacggcccggtgcgtcggtcgggccgtgccggcccgacaagcctcggcccaggcacggccgggcctgggccgtgccgtgccgggcggcccacatggccaactatagagtaatatagtgtgtcggtcactgtgcaatggccattttgaccgttctaccgctggtcttggtgatgctgctgcttccgttggctgcaattgcatccggcgacccaccatggcagcactactgcggaagcagcggcaactacacggccgggagcaaataccaggccaacctgcaggccctcgccgcgaccctcccgtcgaccgcgtcgtcttcctcccccgcactcttcgccaaggacgccgccggcggcggcgacgccgagcccgacagggtgttcgccctgaccctctgcagaggcgacaccgcctccgccaacgcctcgtcgtcgtcgtgcgccgactgcgcctcccgcgccttccgcgacgcgcagagcgtgtgcccctacagcaaggaggtggccgtctactacgacccctgcctcctctacttctccggcgacgacttcctctcctctccggccaacccggcccaggtgaggctctacgacgtcgatcgctccacccggcgtggcggcggcggcgccgacttcgtcaccctcgtgagggcgctcctgagctacacgatgcagtgggccgtgccgtacaattccacgggcggcggggccgccgccgtgaggtggtacaccacggtgcggatggacgtcgtcacgccgccgctgttctcgctgatgcagtgcacgccggacatgtccggcggcgactgccggcagtgcctgcaggacctcgtcggcaacaccaccttcaacggctcggtctccggcgtgcgcaacatcggcgcccgttgcggttacaggtacgacacgtacaagttctacggcggggagcccaagctgaagatcgggtcactgtcggagatcaactcaacggcgccatcgagcccaccgccgcctccgccggtgacggagacacgttccggtatgtttggacagtcaccttttatatatactatatatactaggtgaaactatagttggtcccggtcttgcccgggccaagatttgccgggccggcccatgtgctccacctgtggaccaggcacggcccaataagggtcgggccgtgccggaccagcccgaaggcacggatagtccattgtgctttctttgaaataagtttgtttcccctccctcctctttaggttgtgacatatatataactaaaacaagtctatttaatgtccctacactttgggccgtgccaaataatacgtctatttatcctccctattctttgtgccttgtcttataggtggtttaaaataagtttatttcacctccctaaagtttgtgccgtgccagtccggcccaccgtgccaaggcataggcccaggcatggcccaacaaccgggccgtgccggcacgggcccgacagcgatcaggccatgccgtgcctgggccgggctgtcgggccttatggccaactataggtgaaaccccgtgcgttgctgtagaagtatactacgataacgataagtaaaagtaacatgtgttataggtgctagttttagataatctatagatgccggtttaaaaaaatcagacagccacgagccgagccgaaccaagccaacgccccaccacacgataaaaattacgccgctgcccgtatccactcccctcgctcacaaccaaatggggtattgaagttatttcatcatgtgtaatgagaatataaaataaaattatgagcaatgtataattatttttggagatgagatttccttgcagggagaaagaaggtgttgacagttgctttgcttgtgccactgatagcactttgccctgtcgtcatattctgttttgcatggataaggagattaagaaaccgtgagttatagaaatcaacttatcaaatctttaaattgtaatataattattgtttctgagttctgacagactactcttgtgttattagccttttaataacgtatttgttgctttagacaaatcaatgttgcgaaaaaaggatacaatggccagagaagaagtattaaagctttggagactagaagaaagcgattcagagtttatgctatttgatttctctcagatagaagatgctactagcaacttctcggaagataagaaacttggagaaggaggttttggctccgtatacaaggtaaaataaattagatatatacacacacataaaaatcttcaatacatgtttacttgaagtatgaactacttgaactttgtttgaaaaaaaatgcagggccaattgcccaatgggcttgaggtagcagttaagcgacttgctgcacattcaagtcaaggcctggttgagttcaaaaatgaaattcaacttattgcaaagctacaacataccaatttagtaaaccttcgaggatgttgcattcaaggagaagagaacttactaatatatgaatacatgccaaacaagagtttagacttcttcatctttggtatgcttatacattgtttttcaaaaaatgtggttattttctatatatatagcatcaaataaatagtaacatatatccttatacttcactatgcagatctgaaaagagcagcattgctcaactggaaaacacgcctgaacataatagaaggaataacacaagggcttttgtatctccacaaacactcccggttatgcatcatacatagagacttaaaagcaagcaatattctactagaccgtgacatgaatcctaaaatctctgactttgggttagctaagatatttgactcaaatgatgtccaaagaaatacaaaaagggtggtgggcacttagtaagagttaattcacctttcaaatttgttatttagctagtccaagtgatttagggataagctcattttactccctcaactatctggtttgtcttaaaaaacactacttaactctaccaaaccgaacacatacacccctcaacgtacaacctaagggcaatataacccagttctaatggtggtttccatgattttgaaatccaaattcttttttttacttgtattttttaataatggaataacattctggcctttgctcaaaaagctacagctaattattacaattttttttacttatgtctcctagtttggatgatatgtgaatagtatttgaatgtgagtgaaaaaaaaacatatatttttcgatatcaaaatcatgaaaaccattattaaaaccaagctgtgtgttgaacccacatggtattttggttggttttgatagtatgtcgaggggtgtaaaatatccggttacatagttaaggggtgtcttttaagacaattccaacgtttgagggttgtactacagacttatctcttattatgattttggtggatccagactgaggtgttttaacatgtgcatgcattttgttttgatttcagtgggtatatggctcctgagtatgcatctgagggttgcttctcgctgaaatcggatgtctttagctttggagttctggttcttgagattattagtgggaaaagaaacgctgggtttcaccaatatggggacttcttcaacctccttggctatgtaagtttttttaaaaatttagtataagagactaatatattcattttaaagatacacaataatcgagcacactgctgggaatatgtatgaactacacggtttgtgcatgcatgagtgcaataatagttaaaattttatgatagtcggtcttcattttgaaaaattatagcatatgctttatgaaacccgccttaacttggctcatggctcaaaattctcattcactgaaattgcacacaatagctcatcacatcaaacttgttgcaggcatggcagctatggaaggatggaagttggcatgaacttgtagatccatcattagtaagtgaaggtcaaatgatggaaataaagaaatgtatgaaagttgcacttttatgtgttcaagagaatgcggttgatcgtcccaccatgtccgcagttgttaagatgctttcaagcgagttgaaaattctacctgagcccaaacaaccagcattctttaatgtaagggtgaaacatggagagctgtctaatactgcacctagtagcataaacgatgtaaccataacaattgtgaacggcaggtaatgccaatatatatagggactttaattaaaatggtaaaaacccacaggactatataccttgtacagaatgtaattattaaactgcagttatgttacgtagttctgtaacattattggaacggcagatatatatagttgaattacttttgacgaagtgtacaattcaaattaaataatacagtttttccttgtcctaacctttgccaaaattcaaaattatctttggctgtgcatgactttcaattcgctctgccgaaagataaaaggccaaactttactgcattcaagaacaaagaaactgaagcaaactcatcacataaaagatcagttcgttggtattaggacatagatttatgtggaaagctgattgagccaattaatgatttttcatatggacagtgccatcatccataaatatttgacaataagctactctctccgttttaggttatactccctccatctacttttgataggcatatttctaaatctaaaaaatttatttttgatagtcatatttcaatccaacaacctatcctcttaatgacttaattagatttaatgcgtgactctccattcttccatacaagattggctacatgagtatcgagaaatgtaaatattaatgaatcgcttgtttacgacgaataactagtagcatatttaaatgaatgataaatataattacttatccttggtctgtgtgccaagataaaatatgactatcaaaagtagatgga

SEQ ID NO: 29429 - DNA, 24068 bp, Oryza sativa
ctctatctcccaaccccagagttcgagtatgcgtcaaatggtgtctactcggaggagtagacttcgtccgtgccgtcgagaatgcctgtggagtggtgttgcccgctgctatccaagtaagacttagtttcagtcatccctttaatttccgatgtatttatgtaaaactttttgtttgtaagacgtggatctgtatgtcaatattgtcgtttgtgtaccctggtctggcctgtcctggacaggggttttaatgcacattctggttggaattctattcgggaatttctgggcgtgacaataccctatctatatacacaaagacatgatattactagctagcactaaaaatctctaattaaaagatcttgtccactatgtcaaataggatactcttatgaatcaccggaatatttcaacgggaaatgttctaaagtttcactatcacaagccttagggaattcaaaccgaatacaatgtcttagagtaaagattccgatgaatcgcaacactgtcaacgcaaaaggctattaagtatcattattacacgcgtatagttcaacgcgataacgtctcaaagtatcactattacatgtcttaaggaattgaaatttcggtaacaacttccattgcactactgggtgcaccaagggtacttgcccttccttgccgcttccgaccccgcatcctttgcacgctgcgccctagccaactttcttgcctgatattcggcgcgttcttccttcttgtgtcttgccaacacccttagctccaactcttctctcctctccctctcagtcttctccattgcccatgctggcattggcgtttctcacgttcttcattccactcgcgccattgccaaatcatactcgtatggaactcatccatctccttgtcaatccactccacaaagtcacaaagaggaggagggatttaggtgcatatacattacatcacaaattatatcttcacgacaaagttgcatatattcaagatgaaacaatagaaaattaacaaatttaccttcactgccatctttgtctttccctcctttcccttaggcacatgcttaggtttctctgggctatatgcatagttgcggcacattcagtacctctggccataggtatcctagtcatgactatgctgaaaacaacactcatccccacaccaacacatagggcgctttacacctggtgctggcagctgctcaggggaatagctaacaacacccttccttaatatcctaaaattgcaaaaatgtttatcgctatatcaattgcaattaaccaacaactatacctacaaatttaacataagtcggttttttcatcaaaccatctattcaactccaaactacaaataagcattatcacatatatactagaacatatcctagaactaatctatcatgcaaccgaattggtctctcctccatataatatataggtacatattatatactcctcgattgataatacatcccgagccatattccccaaatcacggttagaaccaaatcaaccaaaatacaaagtaaaacattagggaaattagggtttttgaaggaggtcaaccttataactaaattctcaacaccgtatatgaatcgtccataccaacatgaagattgaactacaatattacattcttacccacattccttaattcacaccgcatctcgagccaaatttatcaatccatggtttcaaccaaaatacacaagagaaatgaaagcccggttgagcaaatttgggtttttcgagggggtttaccttacaaattgatgcccaatgcaatgcccacgaaatcttggggtggatttgggaatatttggggaagggaggagagaggacgaccgtgtggggatgaaccctagacaaggagagaggagaggaagagagtggatagcataggcttctgagtgttcagtcaaaaaaaggaaagacaagaccaagcaattctaacagccatcttacaatctttaagattaagaattggagtgtcttctggcaaataaccacatttatagagtgtcttaccccaaaagtgccttcctgcgatgtcttgtaacaaaaattgcctttttttaccctctcgcacgctatcatataaatctctgctacttaggcgttgtttagttcccaaaataaaaacttttcacccatcacatctaatgttttgacatatgcatggagtattaaatgtggaataaaaaaaccaattatacagtttgcgtgtaaattgcgagatgaatcttttaagcctaattacaccatgatttgacaatttggtcctatagtaaacatttgctaatgatggattaattaggcttactaaattcgtctcgcggtttcatggcagaatctgtaatttgttttgttattagactacatttaatacttcaaatgtgtgtctgtatatccgatgtgataaccaaacctaaaatttttccccaactaaacaagtccttaaaaaaatcagtaatggtgctcttgttttctggcacaacaaacgtatatgacaggcacgcgtaatatccaacggactggaccacaaacccatcgcgtaatgcacccatcaccatctccacagagatcgcgcattgcgcggacggtttcatcctccgtaaatgactcctccgcctagggccggtccggagatttgggaggccctaggcgaacttgacactataggcccataaggagttctataaaacgcatataccatatagtgacacaaataaatatttctaacatggtaaacaataaatcaagcagtttgatatagcaatttattctcgataaataatatcgatggtataattgacaacaaaaataacaccatagaaacaaagtagtatgaatagcttaataggagaccacagatatcctatatcccttataaaaagagtttcttcgcgcatttctcgaagcgaaatcattaatgaaagtttggagatcaatgctctctaagatattcttctcaatgctgcacatagccaagccgttctgagcacccgaaaataaaattttaacattgtaacaccagaaatagtaaaattgcaaagtaaattatacaacaataaccataaaaattatagcctaaataatctaacttttggagtgggaaaatcatgcaatgatgcaaagcaagaaaatcctaagtccataagtaataagttgctaacctaaatttcttagaaaaatcgaagaaataacacaagaacaaaaaacaccttagttttcctaggacttagggctaaaagagaatggagagtggagatgggaagaggcgtgaggcgtcagcgattagaggccggcccgacgtgccggcagccagccggccaggcgcccgccgcctgacaactcggtgaggcggcgaagtgcttgtgcctccccggtctgctctgcgcggagggaatatcagagaggagtagacgtgtcgtgtcgcggttaggttgtgcagtcaggagtcgcgcaagactcacgaaaaaaaaggagaaacaaagcggaggagacgcgcgtcgcggcctggcagcgccctcactcctggcctagcaacgcaaccgcgcctccctccttcctaggctgcgcttgctcactgggctaggctgcccgcagggggaggggggaaggggtggtaatcacgccctgtcagccttaaccctaggcggtcgcacaaccgacctaggcccagggctggccctacctccgcccactcgtcgccgccacccgcaaccaccaccatcgtcccccgccgcgcactccactctagatccccccactgagccgattcctactactcctcaccaccgacatctactccttcacccacccgccacgcgcattgcccacttgcaaactcaactccaccgcccctcccgcatccccccatcccaccacctcctccgccgtgctaccgacggcccctccacagcgccgctgacggctccaggtcatcctcgtcgtcgtcacacggtcccggccagctcctccaccacgccgccgttggcccatccacaagatacggagataccagctcggcaaccaagccattatggcccagccaccagagccagcctgcccaaccgaccaagcaggtcaggccgtctttcccccaatttcccgccagcccaccaaaccgagccgcccaagcctacagccttttgcgttttacctgctcgacctcgtgtcgcgcgcacctgcccggcgacctagctcacgagccccggccaccgtcgcgtccgctccatcaccagctagctaaggctgtgctcggaagagcctcttcccaacttccctctcgcattttccacactcactctttttaaactgttaaacagtgtgccgcgcactgtacttcgctgcacctgagattgagccaagcccagagtggaaacacgagtacaccggaagcgcagccgctcggtcgaacaaatccactgccaacctaggaggggcaccaagatcccacaaggccaccaacctgttcgctgcgccggtgcgcatcgacaattactctatgtgtgccataacgtaagtcacttcgactttttttaattatttttttaagtttaattaagtttatagtaaaaacacaatagtatttcacccaaaaaaacacaatagtatttacaacacaaaataaatatattatcaacatatattcaatgttggatttaatataactaatttgacgttagagatgttgctaattttttttataaacttgacaacttaaatatgtttaaaaaaaatcaaaacaacttataatataaaacagatgaaatggagagagtattatagaagaaacatgtttcattttaggggtcatccttttttctcgttttagataaaaccaaatagatcaaaagttgtcaagggggtaacttatattgaaatcaaataatgaggctggaaaacgtttgttgaagttgagtttaattgaacagggttgaaagcggttctttattgggttaattggatccatgccattacaattgtgtcaaattagagaaatgccattacaaatcgcctatttcgaagcgtgccatccatatacgcgcagaatagtctccatgccatgccgtacgacgtaggctcgctttgactcattttgaccggtgtgtagttccgtatggtcgcaaatgcccctgcatacatggttacatcggcgacttggttgggctcgaccacgagaaaccactcctccgctgtccccaaaccattctatcgacggcggcataaaccctagccagcggtggcggcggcggcgacggtgagtccctcggcatctctgggcgaccgtgggagtgactgcgatggacgcccaatcgagaaccctttctcggtcgagcaggtgtagagaggagcggtcccgggcagcagcgtgcgacatccccgagctgaagtgtgcttgcgggtggccggcagcttcaggcacatcgacgactgtcaggaatcctggccggcgatggctgcaatgcggcggagaggtgaatctttggccacgacaaattttgagttgcatttctttgatttctttcccaatcccctttccttccctttcaagcagcagggtgcacgatgctatttatggatctgggaggatctcctcagggagtatgtcgaggagatagtggcatactgccacgccggcgagtttgatagcctatgggagacatgtgacgagttgcggtggcagttgttagatgtgcagggtcgcaacatcgagttgtgtagtatcttggaagcaaaagaggcgcaattgcagctctatagagatgagttgaatcagtcaaagagggaggttgcagagatgaagcacaagatggaatcagagaaggccatgctccaatgggttctgtatatgctaatgtttatctgtgttctttgtgtgtcagtagttgtagggaagaactatcttggatagttaattactgtgaatgtgcaatatgtaattgtaaatgacttgtgtaatgaatcctagtttcagtttgagcaaatgtgagtaattgtgcatttgtaattggcccgtgcatttgtagttgtagatttttagcaaatgtgagcaaagctgataaaatgggacttatgagacatgattttcatacatgattttcagcagcatatgtgagcaaacatgattttcatgtccaaatttcagttcaactaaaaactatcaaaacttggcaatgtgagaatgttagcagtaaaacaacaaatttgctggtattttctgggttttccagtagagaaacacaaatttatctaatttccagcagaccaacacaaatcacatatgtcgagcaagttcatgaatataaggtcatatatggaccaacacaaatttatctaatggcacatgtaaggagcaatttcattcattacatatctggtatttcaagcgaatcgacacaaatctgagaatgtcacatatatggagcaaattcattcatcattgcagccaacttcacattcatcattgcagccaaactcagaatacataataagcaggtcttagtgccatttcagtactacatcacaaaataaacaggtctgccagtcatcacaacataggtgtgtcttaggcattacatcacataatatattacaaaagggaacccacttctgtgatgctaacttacacaggcattcacatcacaaataccagcagttcttgggacatcatatattacaaaagaaatcccagtaatcagctaggtgaacatcaagctgggttggttggttgagacccttcaaaccaatctgatagccttctaggagcagttcttggtggagcactggaagaagcaagaactctcctcttttgtggtgttcgcttcttctttggagtttcatgtttcttcttatttggtgctgatgagctagcttcagcattcacattagatggcctcctcctgcaagtgaaaagaagaaacatgattcaacaatagttaaaagtactgaagtcatggatcaaatcagagatcaaaatggaagggttcagtacataccttttcctgggtgtttcttcagtagccatgtcatcttcacatagtggttcagccagtttgcatgttttctcaaagtgctcaaactggttgcatctcttgcatttcaccttctttctcccaggctcaagacagccccttatcctttgcactctaggcctgccagctcctcttcttagtcttggaggatgcactttgaactcaagatcaactgaaggccattgtgacctatcagtcatgggttgaatcctccctgcataagctgctctaaagtactggacactgtaatatggatgcacaaagtcctgaatcttgcccctgttgctgcatatccaagccaatgcatgcttgcaaggttttccagtgacctgccataccctacaagaacaattttggttgtccaagtccacaatgtgcctctgggtgctgttatcactctcaaccattgtgacttcagcaaacccatggtcacttctggccaccttaaccaccttcaaattactagttgcagtgtttagctccttcatgacacttggcaggatttcatcatccatcttgctggcacaatctcttctaagtgcaaatttctccatgatcatttctctgatggaatcaaccaactcatgtaagagcaaaccttttaagcccttgatctggttgttgaaactctctgaaacattatttgtcaggtaatcacacttgctaagttctgaaaatccacatctataccaaatccttgagtggtgtttctctaggaactctattgcatcaggcctgacatcccatatatgcttcaaatgccactgaaacttatcctcagtatagcatctagcagctggatacagatgatcagtgaacactggcccttggtacttcttcatgaaattagcatagagatgcctcatgcattctctatgctctaccttcttgaaagccttacatgctttgtctaaacccttacatgcatctgtagaaataactaaaccctctgtgtctcctatggccttatttagttgttgcataaaccaaagccaattatcatctgtttctgagtcaaacacagcatatgctacataatacaaccagttatgtccatctacagcagtggctgaagctagctgtccagtgtatttaccagttaatctagttgcatctacacctatgtaaggtctacatccagccaaaaatccatctatgcaaggtttcaatgcaacaaaaattctcttaaagcacatcttcttgcctactttctgcaactcaatctctacaattgtacctggtgacttgttctgcagtgcagcctttcagttgaaaagaagcttgaagctttcttcatatgtaccatggatctggtcaattgccttcttcataccagaccatgctttggagtatttcagcttgatctcgtatttttcttcaagcttcttcctacaatcagttggtcccttgccaggattggtcttgagccaatcatgtagcctgtttgcacaccagccttgagtagccatcttcccttcatgtagctttgtagaagaacaagtgtgctcaaatggaagaaccttaatctgcatgacaagtagtgcaacacataagtaaacatcatctgaacaagaaaacaaaggaaatttgtgaagaattcacctttgcagtcttcttatcctcaatcagagatgcatgtatatatgccaagggcaaccatcagctgcacattttgcaataaaccttgtaggatctggcttcaccgaacctttagcaaattcaaaacctttcacgatggcataatgccttacagcttttctgagagctatcatgtcagggaacaaagcatctttgacaatgtttggattctcagggtcatgaatgatgttataaatctgaggatcatgatctgtaatctgtgcctcaggagctgccatagcactagcactagcaccattctctccactctgagcagtagctgcagccccctgaggttcagatccaggttgaccttgctgtttagatgcaggaacatatatgtgctcatcatcaacaccaatatactcctcttcattgtcaaagatatctgcctctctaacttctgcttcctctgttgtaggatggtcagaacctccaacagtagggatgtcagcagggatttcatgagggatgtcagcagggaattgaggagggatttcaggatggatttcagcagggatttcaggaggcaccacacatataggatttaaagcatttatagcaaatggcacaccctttgcagcatccaggatggatacaataagctcaaagtggctctcttctacatacatttcaaacaactctggaatctggccatcctccaacagtctcacatcctcaccaattaacttatgaaaataccatatggcaggagactaatttgggcaacaagttaactcaacacttaggctactcaacacaaactcaatgttaaagctatctgattccacaacccattgatgagttgacccttttgtgtaaattttcctaccagcagcatctattgtcacatagccttgaaccctaacgtctaccgaaaaccagttcctaccaaacaaatcaccacacatgaagaataatgcaagccaaagatgcatgatgcagaaaaaagatgctttgcctcccaacattacagctttcaattgatttagggttagggatactcacggcctcgaacagattgttggattggatttgcctacatccatctcctcgccatctcgcccaggggtccgcgggggggtggttgtcgccatcacacttcctctgccaaggcctactagcggcgcatctctcccgcttgaatcctcgccttcaccgccgccacaaatgccgccgccagccagatctggagcgcgaatagggaggaatggagtggggaatggatggggctagggtttcgactgggaatagagtgagcaagccaacgggtcgagctgaaacaggccagatttagagcgtgtctgaaaggggcatttctgtccatacggatatacgtatccgatactacgcgtccaaacacgggagacgaccaaattatggcatggatcaagattcacatcaatacggatggcacgcttcgaaataggtgatttgtaatggaatttctctaatttgacacaattgtaatggcatggatccaattaacccttctttatttgccattaatcatatatagggttaaaccggttaatccaggaacttggcacgacgacaagcggaaaggcagttgcaggaatgaaggatgaagggtagctagcagcctaggaaaaagaattgcgaatatacttattatttttaataactttacgtatatacttgcacggtaagactttgcataaatatatctatcccacagggtgaaaacacgagaccgaatgtatgccgcaacgcaaaatcgcggaaccaacggtctcgcgggatggtcgcgcggcaccggccgtggcatgcgtagggtgggcatatataatgctgtttgacactgtttagcacaatagagacaccgactttgctactgttcacagagctggttccgtgcaatggaattgcgggaccgtgttggtgtcacgtttttgagccacgggaccgtctcggtgccgtgcgctaccgttggccaccacggtggcgcgtttttgagccgggggaccgccgcggtgtcgcgcgacaattctacagtaccgcgtgaccatcccgtgtgatcgtcggtcccgtgttttttgctgcaactaacatttagtctctcgtccttaccccgtgggacgggtatatttatgaaaattcttcccgtgcaggtatataaacataaattattaaaaaataagtatattcataatttttttagaagcctagcacccattgaagacagttggaaatgatttacattctcatcagttcataattcgcaaagtataacacgaacaacttgttttttcctggttttcttgctaagacgattgtgagctcaaacgagtcgagttggcccattatcgacgatacaacaagtgagggatgaaaatgggacaaaaggaaaattgaggtgaaacgcaaacaatgaaagaattgaatttgtaaattttgttagagaaaagagggaactatgaccaattgactgcacacggtggcatgtcagtgccacaacaacaatactatagttgggaaagtgtttttctttaaaatatcatcactcggagattgaatagctcgagttaagcttgtatgaactgtccatcatgctgattgctgagctccttgatgaacccgacgagccgctcgaactccgccgccgacgagccgccatcggcgacgtcctgcctcacctcgcgcgccagcgcctgcgccgacgccctgatctcgccggactccatcgcctccctcaccatcctctccacgacggcggcgtcgcacacgtccttcatgtccagccccgtcccccacacggcgccgacgaaccggctgttgatctgctggtcggcgaagaacggccagcacaccgtcggcacgccctcgccggcggcctccagcgtcgagttccacccggcgtgcgtcaggaagcaccccacggcgcggtggcgcagcacgtcccgctgcggcgcccaccccacgacgcgcgccttgttgttcttctccgccgccgcgacggcttcgcggagggcgccggcgctctgactcgccccgaccatgtccggccggagcacccagaggaatgggtagccggcggcgacgagcccgtggaggaactccgtgaactgctccagcgagatgacggcgaagctgcctaggctcacgtacacgactgatcggtccggctgcccgtcgagccacgccacgcagccgtcgtccgcgcgccacaggctgcccgcggccgccggcaccgggaacatggcgtggagagggccgatggcgaagacgtcgcgcatgcgcggcgcgacgtgcgcgagcgctggcccctccatggacgcggccgtgttgagcacgaccgcccgcgccccgcggctgtgcgcggtgacctcgatgagcatctgcacgatggggtcgttctggtcctcggtgcagttccggaagttgccaggaagatctcgccggcgcaggaagctctccatgcccggaacgccgcgcaccggctcgtcgaggtcgccgtcggccgggaacaggacgacctcaccgagctcgaacagcctgtcgactgacaagtaggccagtacgctgcacgcgctggccgtgcggaagaccagcgacgggacgccgatctcctcggcgacgtcggcggcgaacggcatgctgccgtcggcgacgacgcaggtcaccggagggaagccgccggaggaggcgccgtcgtcccctgcgcgtacgagcgaagcgagcaaggagcggtacgggacgctgccgttggtccgcagcgactcgaggagctccacgatgtcgccgacggcgcgcgggtggtcgtcggggaggccgtcggggatggacatgaaccggagccgcggcgagtcggcgccgccggcggccgcggcgccaccgaggcggcggaggctgtggtcggtgtggaggaaggtgacgtgaagaccggcgccgacgaggccggtggcgaagtgcatcatgcagttgatgtggccctgcccgggcgccgggaagacgagcacgtgcgccgccgccgctgccgccgccatgttcgtccgctcgcgcggcgggcgtctcactcacggcactgcgctctcgtccaacctgacccgtcgtttccttgtaggcgcctaggcgatctcatctatggccatttggccaatggttggttctacggacaagttgctgaaaaaaaatggtattagtagaaaattttggacgagtctctagacagcaaatttcactgggcgtattaaaaacgaaattgctatgcttccaacttggattgggattcggtgacattgctccggtgacattcccgtgacattgagtcactaacgtgtgggactcctgtcaccgagaatgtcacgggggaatgtcactaaatctgcgtcggtccaactcatactataacttatatccggttagtgtatatataggcataaatactacttgtttgggtccagatgacaagaaacaagctcagtgagtcgaatggctcggtcatacgtatagcaagattctattaaaaactgccgtaacctttctgagtgattcaaagtctagaagtttaatttattgtgtgatctagagaaggtgttggtactatttataactgactttaatttgtttattttatttctccctacgtagatcgagttcagacttcagattctgtggcaggtgctcacaatacaaatgtaacttgcggttgctgccatttgccaactggcggcaataggtccatctcgccttcccttaccctctcttcttcccacactctcaatttcacatcaagacggtgatcccgagactgtgaaggacagtaagggtattcttatcttttttatgtctattgtgtatatttatatgggattcggatcaggtgcagtcactactgtgactgtaactttagcagtatccatcatccaaccatccagcacacaagggatggtttagattcgttgtttaatttccccccagctattcaactactctctgactcgagcagatgtgttttggagggaaaagtctgagagggaagtaagaattggcgccaattctaccatgggaagcatactttacctcctactgccgcacatcacacgcaattaatttggatattatctttttttccctagggttctattaatgttgaagatgtcatcttatcttaaaagttcatttgaagaggtcaatagaacttagaaggcatcgtgctgattttggaagcagacgatgatctacttttggatcatgaaaatttttgtaactgggttaatctagcagtagcatagctagttgattttgaaagcttttgtgtcagtggatgcatgacacccaatttaagcgaaaatagttagggtgtgtttagttcacgaaaagaaaatttttgagtgtcacatcggacatttgaccatatatcggaaggggttttcggacacgaatgaaaaaattaatttcataactcacctgaaaaccgtgagacgaatttattaagcctaattaattcgtgattagcacatatgggttactgtagctgtcggtgacatgggatcaggagtatcatgactagaggtttgaggcagacgcaatcgcccacgtggcctggcaccctcgggggacgtcgggcccgagggtgatgtgttcgacctcctcttagtccccccgagggggtcggaccgcacccgcctcggccccgagggccgaggcgccccgacccctcgtgggttttttctccgcgtgtatgggttaggtgagcacagcggggctcacctaaccacatttattgcggtttggctgagcgtgtcacgccgcatgtaacgcagtgcagtgcactcgtttatccggtctgtgaccagtcacagaccggtcagatcgcgggttaggtggcgacaggcgatctgacgcacgcctcgccccatcccgtcaggacgagggcttctaggcgctcgtccccagctggagctagcgtgttacctcccagagatggcacgttagtcctggttagatatatgccaggcttcatcctaaccattacaggcaagatgttgtgtgaagaagggccaacatgtagattgctaaactgacacgtggtggacaagaatgagcgatttgtgaccagtctgacactggtcatgtcgtcagcagacagccataatcccacgtcgcacctgcttccggcggaagtggaggtaggtatgggccgtcttatcagaaggtcattcggacggcaactatacaaatctccgtccatttatgaaaagggagggtaagtccccacagaaaagagggagatggtgcatgtggtatccccttaagatataaaaggaggaccttgcccacttagaggggggactggactggactggactggactttccgggattcggaacccagaacaagggagaggctggctcatactttgtagctccttcagacacagatccaccaaaaacacaggagtagggtattacgcttctcagcggcccgaacctgtatacatcgcccgtgtcttgtgctctttcgattgtcgcaatccttccacacatcaagagcttagaatttcacccagagtccccggccgaaccggcaaaggggggcctgcgcggtctcccggtgaggagccacaagctccgtcatctggcgcgccaggtagggggctcagcgtgtgtcttctgagctctcgcactcttccgtgtgcgccaagcttttcctgttcagcctgatggccgagcaagcaaaggcgcatgacctctctccgagtgtgagtggcgacgacggggagccgaacccacgccgtcgagctcgtactccaccgccccctccacgccaaagtcctaagcggggggaggcgcttgagagggtcgaaagatccgcgacttcaccgatcgcgggcgatggagaagaacggcgagatggggagcgtcgcctcctcgtctacggcgacggcagcacgccccagggcgcgctccaagctgcgggcgcgctcttacgtcacccgcctgtcgtcctgacccggagtctccagcccaacgatggctggacgacgtggccaaattagtcatgacggcacggcagcgcctagatgctggtgggcggtcctccgccaccaaggcctctggtgctgctaccaccggctccgcgtcgtcaagacggagggcacgacgagcggcagccgctgttcgccattcggccgccactccttcgtcgactccttcgatccgggaagatctgcgtggggggccggacgcccgcaccagcatcgagcgccggcgtaatgaccgaagtgctgcccacgcaacggagggcgcttcctcgtccagagtgtcacctcaacacggacgcgggaatcagccctccgtgcccccggttggtggtgtcggctgtagagcctttgtggcgagtcttcggaatgtccgttggcccccaaggttccggcccaccatcgccgaaaaatatgatggcagcgtcaaccccgccgagtttctccaggtctacacgaccgggattgaggccgccgggggtgacgacagggtcatggcgaatttctttcccatggccctgaaggggcaggcgcggggttggctaatgaacttgccacccgcgtcagtccactcctgggaggatttgtgccaacagttcaccatgaactttcagggcacatatccgcgcccaggtgaagaagcggacttacacgcagtacagcgaagggatgatgagtcacttcgctcgtacattcagcggttctgtcaaatccgcaacaccataccatgcatccctgcacacgcggtaatctacgcgttcagggggggcgtgcggcacaaccgcatgctcgaaaagatcgcctccaaggagccccagactaccgcggagctttttcagctcgcggaccgagtggctcgcaaggaggaggcctggacttggaacccctccggttccggtgtggcagcttcggccgcccccggatccgccgctcagacagggcggcgtgacaggaggaggaagaagaggtcagtccatttcgacgacgagggtcatgtcctcgccgtcgagggcgcttcgcgggccacccaaaaggacaggcctgcgagcgacaaaaagaaaaaggccggcgctcccagcagggagcgcccagccggcaagtggtgcaccgtccacaacacctccctccacgacctcgtggactgtcgcgcagtcaaaagtttggcagagcgaacgaggaagtgggaggaggagaggaggcaggagcgccgtgagggcaggtccccggcggttccctccggtaatcggcgaagtgaggccaagcagaaggcccccgccgaggacatcgatgatggcgatgaggacctaggtttccaagagcctggggccaccattgccaccgtcgatgggggagcgtgtgctcacgtttctcgccggagcttcaaggctatgaagcgagagcttctggccgcggcccctactcatgaggcgacgcgtcgggcgcggtggtcggaggttgccctcaccttcgaccagaccgaccacccaccgtgcgttgcccggggagggcagattgcgatggtggtttcccccaccgtttgcaacgtgaagttggggcgtgtcctcattgatgggggagcggccctcaacatcctttcccccgcggcctatgacgccatcaaggccccggggatggtgctccggccgtctcaaccgattatcggtgtgatgccggggcacacatggccgttaggtcacatcgacctgccggtcaccttcggtggatccgccaatttccgcacggagcgggtgaacttcgatgtggcggacctcagtctgccctacaacgcggtcctggggaggcctgcgttggtgaagttcatggcggcggtccactacgcctacctacagatgaagatgccgggccccggttgccccatctctgtccatggtgacctcaaagtcgcgcttgcttgcatggagcagcgcgcagaccatctcgccgccgcgtccaagcccgagggtggcgatgagaggcttggcgcctccgcccccgccaccccgaggcagcagatgatcacatgcgatgaggtcccggtcaaggaggtcgccctgggcgacggcccgtccaagaccacacggatcggtggtcttctggacggcaaataggaagacgcgctcgtctccttcctgcgggcaaatgctgacgtcttcgcatggagaccggcggatatgcccggggtccccagggaggtgattgagcaccgtctcgccatgcggtcgggcgcaaggccggtccggcagaaagtgcgacggcaggccccggaacgtcaagccttcatccgcgaggaggtggcgcgacttctggaggccggattcatccgtgaggtcatccatccggagtggctggcgaacccggtggtcgttcccaaggcgaacggcaagcttcggatgtgcatcgactacaccgaccttaacaaggcatgtcctaaggatccttaccccctgcctcgcatagatcagattgtcgactccactgcggggtgcgaccttttgtgttttctagatgcatactctggttaccatcagattcgcatggctagggaggatgaggaaaaaactgcgttcattacccccataggaacctattgttatacaacaatgcccttcgggttaaagaatgcaggtcctacttttcaacgtactactcgaatttctttgggtagccaattaggacgtaatgttgaggcttatgtcgatgacttggttgtaaagacgcacaaccaggaaacgttactcacagatctagcggaaacttttgagagtctccgctccgcccgcataaaactaaaccccgataagtgtgtgttcggtgtacctgcgggcaagcttctcgggttcttggtctctgcccgaggcattgaggccaaccccgagaagatacgggctatagagcggatgcgcccccccagcaaacttagggatgtgcaatgcgtcaccggttgcatggccgccctaagtcggttcatatcgaggctgggagagaaggcgttacccttatttaagcttctcaaacgctccggaccgtttacctggacggaggaagctgaaaatgccctcacccagttgaaggcgtatctaagctctcccccagttctggtcgccccggagccagacgagcccttgctactctacttagcggcgaccccgcaagtagttagtgtggcattggttgtggagcgcgatgaggacaattctcatttcgcgcttccccaccctgtgccgacttggcccgggagagagcagggaggagaggcccccgagccgaacggtggcccaaggcccccgacgattggagttggccctctgcccgcttgtcagaccgtgctaggagcccccgacccccaggaaggccctgaggccactgtgggaaggccgcacctatcgccctttgaccccgaggctaaccctgtgctgactcgacccgggaaagagaagggagaagaggcccccgagccgaacggaggcctaaggccccagacgaccggagttggccctttgcccgcttgtctgacgacgccaggagcccccgacccccaggacggccccaaagccactgtgggaaggccgcccctgttatcctccgaccccgaggtcatcagcacagaagacaagtgcgccccgcgaggctgcttggacgaagagtgccccagggatgcggcccctagcgaagaggatcggccccaccgaaaggtgcagcggcccgtctactttgttagtgaggccctccgggacgccaaaacccgataccctcaggcccagaagatgctttacgctattctgatggcctcgaggaaactgcgccattatttccaggcgcatcgggtcactgtggttacgtcttaccccctcggtcaaatcttgcataatcgagagggtacaggacgggtggtgaaatgggcaatcgaactttctgagttcgatttgcactttgaaccacgccatgctatcaagagccaggccctcgtcgattttgtggcagagtggaccccggctcccaagcccgtctcaatccccgaggccagcacggacccctcgcagctgcctcacaccgcccacttggtaatgcagttcgacggctccctgtctcttcagggcgccggtgcgggggtcacgttgacctctccgagcggagacgtcctcagatatttggtccgcctcgactttcgagcgaccaataatatggcagagtatgagggactccttgccggactcagagtggcagctggactggggatcagccgcctcctggtgttaggcgactcccagctggtcgttaaccaagtctgtaaggagtaccggtgctctgacccacagatggacgcctacgtgcgccaagtacggcgtatggagcgccattttgacgggattgagcttcggcatgtgcccagatgggataacatgattgccgacgaactctcacggctcgcgtccacgcgagcccagaccccaccgggcgcctttgaagaaaggcttgcccatgtttgattttgaaatctcaatgacaataaactaaaaagggtaggcagcgggctagccgtagaagagtacagcagcaaagccgctaacggtttggcgggacttctagaaagtaaaaatgaacctaaacaataattatttttgatttttgaaattccaatgacaataaagagaggagccaccagacgagccatcccaatgacaataaagagaggaggcagtagacggaggcagcagacgggccgtagagtatagtggtagcgcttgacgagacttttaaaaatattataaaaatgaatcacaacgagatattaaactctaaacactacaaaggtctaatttttaaaggttcgggaattaaaaaaatataaaaaataaacccaatgataataatgttcgattttaaaatcacaatgacaataaagaggggagacagtggcgagctgtagaagagtattgtggaaaagccgctaactgtttggcaggactaatagaaagtaaaaaaaatgaaccacaacaacaattatgttcgatttttcaaatcccaacgacaataaagagataaggcagcgatcgagtcatagaggagtacagtggcagcgtttgatgagacttctaaaaactataaaaacgaaacccaatgagacaataaactctaaaagctataagatctaatttttaaagattccatagagaatgaatataaatagtggtagatcgagcaagcaaataaataagaggtaacttttgaaaacaataaagttaaacacagggatgataatatttgatctttcaaagtcttaagatatcgagataactatttaataaatttaagtaaaatcatatgaaaaatagataattttatatggatgatagctgtgaaattgtgcgggccacccagctagttcataaataaagaagggagcaaaatcgcgtccacgttgctctccccggggtgacacatatggcacttagcaccagctgccgccaccttcctcccttctcttccccgcgcctatcgttgcctgagtggccgtcagcaaagccggctgcctgctaggatggcagcggcggggtttcttcccccctcggtgccgctgcacggctagggaccaagacgcgctttggaggtggagagtcgccacgccgtattgatccgagcctgcatggctggatccggacagggagagactggcaagcgtccgtggaggtgctagcggggtggctagcggcggtggaggtgtggacagatgatggcggtgacagaagtagaggaaaggcggtggcaagagaggacgatggtacgtgggacagcaggcggcggccctcggcagatctagcgctccggcgctccactggcctgatccggtgccctcttccatctccggcaagggatgtcggatcccctcggtgatgacgtcaaaggaagctttggcagcggggaagagtgcgaggaggcaagcgacgggcaagaccagcgggcggaggtgccaacgctgaggaggacagcggcaagcccgtggcgatggcggcccaatgaaggcacgatagctgtggccggtagcggagatggccaccgtcgagccggacagcggcagagctcatggctacgacaatggcagcgtcgaggtcagcgacggcactgccgaggcagagaacggcacgcgaggaagtgcggggcggcggcggaggccggtgtggtgtgtgcgagaaggcgcgggtgcccatccgccggcggaggttagacggcggttggagcattggtgcgttagcgatggataagcaggctgcgaacggcaggtaaaaacctagcccggccttagccaggccggcaacgatggctttcagagcatcactcctttttttgggcattgtcgtgccatcccatgccctttagtgaggctgccgggtgaaaaaccagtctcggttctctttgagaccttgacagacagcggcggcggtgctttcgtcatttatctccttggaggcgttgtctaggcagcccccttgccgaaacctctgaaacaaccggtgcaagcttactctagattcttgaccccttgtgtcggtgcctagcttacgctactaggccacgttgcatgacctagggggaaagcggttccactcttctttatcaccttctctccctcaatcccaaagacatagatagagtagggttctgtgtcggttgtaagggttgggttttgggagatcccggctatacgtcctttgttggcctagcgccggccggcctggtgctagccttctccggggtctgtgttggtgttgtcggtgtgtgggtagtggtaatgttttctttgttctcctgattacgacattccacacttgtaatcatgtattttttttcctgatttatcaatgtgaactttgcattgtctggtgcgagttgttaaaaaaatattcataattaaaagcttgcatgtgcttagatttttaaaaatgggcctatagaatgatccaatgagaattggaaaccgtgcagctcgtatgctccacgtccgaagtattcgtccgagaagcacgcttattagctttttttattacacatgtgccctttcctagttcatattgctaccgattgttaaaaaaatagaagatgtttctgttataattttggtacgttatccgtgtttgaatcggttttaattttatgtttttgtcaaatcctttccttttttttcttacaccagagtgtccctcttatccgagacgcgtgcaaattaattgggcccgcaccttttcacacgcctcttgttgcatgcagcaatcgggcccgcccctgagcttgttttccacacatgcctttgtgcgccgctgcgattgggcccgcaacgccctcgtgcatgcaatttttcacatgcctgattgggtcacgacacccttgcgcatgcgatttgcccttgccgcatgcctgattgggactgcgtcgccctcgtctgcgatttaaaaattaaagatggttttgtcaatactatggtatactatctgtatccaattcccatcacgcataacattcattgcgaagttacgactcacgagtgaactacgatagagagtctgtgtgatgtggataccaagcgaatgaaactcgcagagtccatgtggatatgatgtacattgttgcccagatcatctgattctatttgtattacacgacacaattcctgggacatgttagcatgatttcaagttagtctttacacatgctcgtacatactaccagtgataccgctacaataatccataagaatcagttttactttcgaaaagaacatacaaccgaaataaaggatgctcaaaatcgttgattccatccgtcttcaatttctatccgacttgagataaagctggaggacaaatcgagctcatgtttgaaggcctcatttttttggcttatgttattcctataagccaaaatttaaattttagaacttaattttgaattcgtttttttgattttttttatcatactttattttacaacatttgcttttaggtcgctaagaacatgtatataaaatatttacacaaaaatagtcttttattcagaaataagtaattcggataagcatatgaataaacgaaacaatgggctatgattatttatccaccgacacatatgtacaaattaaattggctctatccattgcaacctacgggcattttttctagtaaataataaattaaagatgtctctgaattgtgacgaagaaaatatcgatcaatgtttcattcatatttccaatcagtgcctatgaataattttgcattcagtgggaaggcatcatatagataaaaatatttggtttttgattgatgattacatactggtaaattttaacttaattttatagttattctgaaccatgcaatt

SEQ ID NO: 29430 - DNA, 19077 bp, Oryza sativa
  unsure (1)..(19077): unsure at all n locations
gtctaccactgattctattcatttttcttataacctttaaaaattgaacatcgtagtttttgagtttattttgtcattgggtttcgttttcattatttctagaagtctcgccaaatgctgtcactatactcctctacagcccatccgcttccttctctttgttatcattgggattttaagaatcaaacataataataatttgggttcattttttatttttctagaaatctcgccaaaccgtcagcgtctttgccactttactcttttacgacttacctgcctcccctctttattgccattgagattttaaaaatcaaacatgatatttgttggggtttattttttacatttcagaagtcccgcaatcgccatgactgtactgcttaacgacatatctgccgtctctccttttaatcattattggaattctatttgaggttttgctaataattttcagataacccattaaccgccaccactctactcctctacaggcatgatgcttctctcctctttattgtcatttgtcatcgttgtgttccagatgattattttttgaaaattccatatttttattccaatatttttatttataaattatattattttttttcttgaactcttatatttatttttctattttggaatttattttatttcttattttaaattttaattaatctcatcatgggttctagattgtctttttttgacaatctttatttttattacaaaatttagttatttataaattatatttctagttgaacttttataatcatttttctaatggattttattttattttttattttaaattttaattaatctcgtattgggttcttatatggtttcttctttaaatattgcttatttttatttctgatattcaattatttttaaattatatttctacttaaactcttcttctatttttctttttctccaattaatgtgggaatttctaacacccactgcgagcgtgttgcttctcccctctttattgtgatttgtcatcgttgtgttctagatgaacttgttttcttaaaatttcatattctcattccaatattttttatttaaaaataatattcccacttgaactcttatattatttttatatttttggaaactattttattcgttattcccaattttaataatctcgtcatgtgttacagatggtatcttctctttattacgaatgtcagtatttataaactgtatttctattttccttttttaattattttttttcaaattttaattaatcttgtattgtgctgtatatggagtattctttcaaaattcctaattttttatttttcaatttcagttgtttcaaaactatattcttacttgaactctcttagtttttaatttcagatcttattttattttttattttgaattttaattaatattgtattgggttcttatatggactctttatttgataattacatatttttaatttcgaatttcagttatttttaaattttattcctacttaaaatcttctatttttttttatctccaattaatgtgggaatttgtagccccaataactatcgtgatacctacttttataattttcttaatagtatactacatagagataatagtatcaacaagcatgagtgtcgtcatctggagtagtgtttaaggcaaaatatcttttgaacaaacatagtacgggtctagggcaaaatatctaactgaaatcagtattcataataaaactctagtgaaaaccatcgtcgtcctccactcctccccagtccacactatatatagaacagtcatacatatatatatcacaaatttggcttctacctttcgtttggtcgatatgcaggtcatccaagtagatccaagcggtgtttggacagggtctgagctgtttaattgtcatcctaacagatcgatcatcagctgtttaatcaacgcctcagctgctatctgatcgattaatttgtatatttttgtcgtcatacagatcgacggcttgcatggggtgcagctgttgccgatcgagctagctctgctgcatgcggtccgcccacgcctagaattaatgtgcagcgagaagttagctctactcttcctttttttttttaagaacaagttctagtagtgatatgcatctccatccgtctcatagaaaactaattaatatcagatgtaacacatacttctatatgtacagattcgtaatactaaaatatgtcacatccaatcttagatttgtttttatgagacggggggagttacttcgtagcgtactcctacatgaacatccaattctagcctaacctccgcaatatggtcaactccctccgtcccaaaataagtacagttttatatcgataatgtccaacatttgaccgtttgtcttatttaaaaattttttatgattaatatttttattgctactagataataaaatatgaataatactttgtgtgactaattattttaaattttttcataaatttttcaaataatacagatagtcaaacgttggatacggataccaacggctgtacttattttggaattggaggtagtaagtcatttccagctaagctagctagggccaacgaaagtaggagatcttacttaccctacacgtgaccaaattagtgaactggatggcctcttggagtgtatccgatatactcttaccctacacgtgaccaaattaagctagctagctactttctccgttcttttgaaacgctagattgtcaaaaacagaaataagaaaaaatgtagaaataaaatgtaatgttcaatgcattcttatgggatttaaaaacatatgaaaggtccccaactaccatttaatatttacgcggtaaaaatgaggaattcaagacacatgaagaagaagatatgaggtaagacgtcgtactaattttcctccaaaattccataggaatcttgaattgataagaatcaatattttgtttccaagggtcttatagtattattttccataggatataaatccattggaaatactatgttttttctttgtttcaaagcgcgccatatttttaggctcctctcatttatccaaaataaatttattttaaaataattatggtatcggagtttgtgaaagtaaagaataattgtatcagaagaagataaagtaaaaaatagttgtattacgatttgataaaatagtggtatttcagacttgtattggtttcgtattgtcacgtgtgagagtagtgcatgaaaagtaaacttgacggacggagtactgacttgtccgtcgctcgctttgacgggccgacgtatctcgagtctcgacctgcataatccttctggaatgtttaatacaagtcggcacagcgaatgtttattttgaattttaattaattttattttagattttgatatggactctttctttcaatattgcttatttttaatttcgggtttcagttatttttaaattatatttctacttaaaatctttttttatctttaattaatgtgagaattattaacccaactatcctaataatataatagatatatagataatagtatcaataagcatgagagtcgccatccagtttctaaggcaaaatgtcatttgaacaaacatagtacgggtctaggacaaaatatctcctgcaaattaaatatctaacggaaatcagtattcataataaaactctagtgaaaaccatcttcgtcctccccagtccacactatatataggacggtcatacatacaaatttgacttctacctttcgtttggtcgatatgcaggtcatccaagtagatccaaccggtgtttcgacagggtctgagctgtttaattttcatcctaacagatcgatgttcaaaaaaaaaaaaaacagatcgatcatcagctgttatatctgatcgattttgtatatttttgtcgtcatacagatcgacggcttggatggggtgcagctgttgccgatcgatcgagctagctctgctgcatgcggtccgcccacgcctagaattagggcctgattagggaggtttagattctgagaaacagctatttagtagctagcttttaagaatttggaaaagctttgaaatccagcttctccagcttctgacttcttagttcatttttcagaatctataactacagattctcagaaactatggactgtttggggcattttctagcagaagcagctttagaaaaaagctgcagctaggacaagttctcccaaacagggccttagtgtgcagcgagaagttagttctattgcaaaagtagcgatatgcatatacttactattccgtcttaaaaaaacgaatttttaaccatatatctaaatttataggtagaattatctttttttttaaaacagaaggtatacttgtggacttttaaaatactcctacatcaacattgtttaatcctaaaaccttcgcaatatattgtctaacatttccagctaaactaacttgggccaacgaaagtaggagatctcttgtgaagtggatgttctcttggaagtgtattaccctacacgtgaccaaattaattaagctagctagctacttcctccgtccctttcaaatatacgattatcaaaacatgggaatagaagaaatataagaatagaatgccatattcattagattcatatacgggattcgaaaacacgggaaagtttcaaaactaccgtttgcatatagtcacacaaggaaaatataggaattcaagacataggaagaagaaaatatgaggtaagacctcactgcagtagaagcagcccctagagacggtttttatgtgatgtagagacggccatgtctaggatttattttttctctcagtcaacttcaaaatttaccaaatagattaatgtgatcgtagagacggtctattatcctgtctctaattagtgtatctacgtaagaggcaatgtaggagatgggctttaatagggacgacttgcttaaccgtctcttacgggatgtctctacatgtcctttttgtagtagtgcctcatgctaattttcctccaaaattcctctacaataatccattccataggaattccaaataaattggtatgaatcaatacttcgtttcaaaaggtcacgcaggattatatcccataggatataaaatcctttggaattcctatgtttttttctttgttttgaatggggccatatttttaggctcctctcatttatcctaaataatttttttaaagataattattgtatcggagtttgtaaaagtaaataataataataataatagaagtagataaagtgagaaatagttgtattatgatttgataaaatagtagtattgcagtattttattggtttcgtattattgttacgtgtgagattagtgcatgaaaagtaaacttgacggagggagtactgacttgttcgtcgcttgctttgatggaccgacgtatctcgacctgcataatccctctggaatgtttcataaaaggcggcactgcgaatgtggcagcgacgtgtcattctaggggtgtatatatgttgattggtaccgataatggtttagaattgatttattgtaatttatttactactagcaattatacctgtgcgttttaattatttttcttttttttttctgtgtcgaggcctcgttaggctgaacagtgcaacagacagcttgtggctgtgggcagtttgtggaggcctcattagtcagttttatattttagggtatcgatccgtggaattatcgggccacggcccatcaagagttcacggactatattttcagttgtgttctgtcatgtacctttagggattaagcatttttgctcttggcaatacatgcgtgctcaagtgtctaatatataccttaaatctttttatatatctgatacacaacttttcagtagttggcacaatacaatttaaaaggtggcaaaagtaaagctttacgtatggttgttaagacgatgtttgctttttataaagcaattgattgatgttagtttatcattgctttcggccacttatgtgtgcatttttctaaaaaaccaatattatggttgtagtctaataatatatcttggtcattttcaggcagttggtaaattcatttcttagtgttattttacttggattttacactacaaatgccatatatttttggctgggggcaatgttgtgtgtcttatagggacataaacatatttgtcctggcaatatgcgcacaatgtgaacaaccatagaaaattcctttactcactgcataaaggctttttattaaatcatttactatgtgacttttaaagatgcagttggcttttggctatgcacattatactttttaataagtagtaggtatatcactcggatcatgttgtttgaggattcataccgcctatgctatatattagtattaagtcacttggttgactataattatcaaaaaccacttgtttggttagattatttattccttgactatatacttagtttgtccaactaaccatatagtcggagggctacacctaataaggtgtatctagtcgatgtatctgagtatatattctttattatctcataaaattttttcagcctttcacagccttatgatttggtaaaagcacttgggagaatgtggtgaagatgatcgaagcactcggctttcccaagactagtcttgatttctctatatttgggaaaaaaaacaccacttggtaaatatactggtcctcttgtcttctactcagcaatcgacccatcaaccactgagttgatcaaatttgacaatgtggtgaccaagattccagattggttgatgagagcatggtgcacagctaaatcaagacgatcctataaagtcatcaactgttttttattattatcatcttctttctgctctcctttggcaccagatgctccttctccttctaacttcggcatttggcacttgtacttttgaataactttcccttgccgagtcatagaaaaagaattaatatatgccttcttcagttcttgcatcttctgctccatctctgccttttgctcttcagacagatcttcaaccttagcaggtataacattttctttaccaatgtcagacagtgacgacatggttgaataacaaaactttgtcccactagatgtgccaaaagcttgttgatgtgaaaacacggcggcctaggagatctgcttaactccagtgcaggtccaaggttagccttgagtgtgtctagggcataccagctgatttgatcctgcaatcagcaagaaaggacaaaagcagaatcagtcgatcgatagccgatcgatcgataggccgatagcatatcgttgatggtctcagtcgatggagttagaccaaatcggtatggactggatatatcaaagaataataaaccctaaacatgaccaatcggctgtctatagaatttaacaaattgatttaagacagtattatcaaagtagccgatgcgaccgtattttcgagtgtgaagggctcatgggctactgtggagattacgggtatcatatacccatacgattagtttatcgactgattatatgagatagtttatatctctagaatatgtaaaggattaagccttgagtattacgtttccctgagtattaagggatacggcctatagctctgactccggaatattgtcaaatagataccaggtttagttaggttttatctataatcttgcccccgacctacataaggcaggtaggaggcccctcaagggcataatcatacccaagatcattatatcaaccagttcataccccatgcgttgcagtgggcacactataaaattttctatgtgcataaaattgatgtaaattggtcactgaatcagcatacgaagaaaaggagatttacaatgttgagatagagatgcgcctaaatgttcgtttaaacaagtacaattcaatcaggaaacccaattcaaggtacatggtattctagcgtaccgagctggtcgatttgcttgattgctgtgaagatatgttaggtgtaaaaaacaggattagcctatgattaactgagtaagttcaaaactttataaaaacatcatttgtcatattagcctcttggcaatatgattaacttttttccaagaatttaaggagcgtgtgcagggtgggctggcccaacggaaaaaaaatgatgggaagttggcccaagatatcaacatcgttcatctggaaacatgcagtccaatccaacggctgaaaataaatgatgatgtggcgcaacgtggtgcaaactttatagtaataacttctctagtgggtaccaactatataggaagaagagatacagcacctcatatatacaaatcccttaacatcatgagtatgatattacctctcgataaggtcgtaaacttgtataaatcttttgtcatccaactcacgtactttagttctcatgcgctacacccttttcatattgcggattcctagcatcgacagtaatgttgatccatcacaaaatgacctgctgtgcattactgaatatgtagtattctgtggacccccgtttttataactggaatcaatcgtgtaaacagtaccatttccctggatcacgtagtctggtacacacgaattcatagctgaaataccaagtgcacatacacgagtgtctaatacgaattattacatcataagcccgcaggcgtagtcttaaatcatcggaccgagcggtccggaatacatcccaaaagcagaaatagataaggcagcggaattcaagcagcggcatgccattgccaccggcaacgaccgtactaagacctactgagcgccatcgtcttcatctccctcctggtagtaggcatagggatcctccgaggcttcatctcccgcttctgattaattttatatttgcaagggtgagtaccaaccgtactcagcaagccaccacagcaatgatgcacatgacagaggaattcaaaggatggctatggttcttttgcgcaaagcaagttttgtaattcttttctcaagcctaagacctagcatagactgttcaagttttaataccagtgttcatattaaacaatgacggttctatccaccatccattgtgatcccaaggatagcttcccgccattgaatcgtcatggttttctgaggatgtccaccttccctcctctcgggaagtgactccctcagcataaaattcatcatgcaatatcccatcccccacaagttaagaatttagagtctagccaagtgtaatacatgtcccggtgctcaataaccgcgagcacggctattcgaatagatttggtttactcacactgcagtggatgtacactttacccgcactccgcgactgcccaacacatgagtctcgtcccaacacatgagacgcgtcaccgcaaagcttttcgataacctcgcattggtagtacccgctccatgaacttaaatcctcatgcactctaggcgtccatgtttctaacagtgagaggagttctggcgctcccgggaaagagaagtctcacacacatattaaattatggttcaagttaagttctctctctcacacactcatggcagtcctaccaatggcgacaccgatgtagggcacgcctctcggccctacctcaacggctgtcccaccatagcgcacctgcctcactcaggggtgaaccatctatgcagggatactgcctccgttcggctatctaatccgctaggtctatacccatatgagaagtgcggttgtacgggggtcgtttcatgcttaactttatggctcggtccttaattgaccggggacggtactagcctttcccagataccacccaaatcctccgtccgccccagtcgaaaacaattgtttaattttatttctcctttcacaaatcatgtcatcaacatcatggcaatgtggcgctcatgtctccacatgccgcatctcaattaccttccaggtaattgaccaagcatatagcatttgataaatatgagtatgcatgattctagaatggcatttctaagcaattgtcataattgactagggactcatacgtaattatggttacaaggattttaagggtaaacaataatcaaggcatggcataatcattgcatgcaattttatttgtaaacaaaacaattttgcaattgggatcaacatgttcaaggaatagtgatgacttgccttgctcaaagtcttgcgggtcttggccttcgcttggatccgcaactccctcgggctctatggttacgtgcaaaaattgatttgaattcggttagaattcaaataaaaatccaaataaatccaaatgaaagtcaaatgcgaaagtcgattcctttttattaactttactatctgtcaactacggcaaacccaatttcgatttaaactattttgcgggtataattattttgttgtcataagttttaatttactcttcccgagcattatatccatataataggttagaaatttctattacgagctaaatatcggacgaaatcctagaaatattatacaatttaattcagtctatgactaaacgattaaatataatacacggctaagattcctagtaattaaatccgaatttctaccgtgaaccgatgacttatagagattaccaaaaataatctataataatctataagaattcatctaattgtttagttattaattatatctaaattactaccaattttaatctaatctgtttaagaaacatatttttataattaactcggaatttcgaccgaaatactattacgctcgaggaatttccgaaaataatctatgattaaccccgaccatttttatttcctaaatcctcctaatttctcccccaatttcccttctattttctccttttcttcttttctattttccctctttttctctcctccctttctttttctctcttttctctccctctctttctttttctctcctttttctctcctctctttctcttttctgccggcctctcttttctttttcttttttccttctcttttctcctcccggctcctttctttcttcccttctcttcctctattctctttcggctccttctcctcctctctctcgtgctgcctaccgcgaccggctgaggaaaggaaaaaggcggcggcggcacggcttaccagcggcgacggcaatggcggcggcgcacggtggctgcgacggcggcggcgcacggcgactgcgacggcggcggggaatgcggcacggccaaggcgcggcgcggcgcggtggcgtcgtggcggcggcgcggcagctctatgcgacgacgcggcggcgtcgaggcggcggcgtggtggagtgggtagaggagaggaggtgaggatggaggggaagagtgggagtagggggaggattatataagggaagggggggaagagataatggggaagagggaagaggggcggccgcctcatggcatcagcggggtggcgcggcgcggggctcgactcggcgatgtgacgacgacgcggcgcggcagggcgcggggcgcgaggagcggcagcggcgacgcgacggccgaacggcgacggcgcgaggcgatggaacgggcggcgcggcgcggtagcagcggcggcagcggcgatgggacgcgcgcggcgacgggacatcgatggcgacggcgacagcggtggcgcgcggctcggggcgggatgcgatgggcggcgacacgacggcacggcgtgacagcaacgatgggacggcgcggcgcgggctcgcggcgcggcagcggcagcggcacggctcgaggcggtgatggaacgcgcacgcggcgacgggatggcgacagagagagggggaaaaaagaaggagctgggttaggggaccccgtcgaacaccttaggtgcaatgaacagtgccgatttctaattaacccgattttagtgtattttccatataaatttgattccacgattcctaattttgcatatatgcattttactcaatatttgtgttatcttaactaatgaattcaccctagattaatattactcatattttatttttatataatttatttgagttttaattagggttaattcttattccatcgtatttaaatttaattgatccaaatatggttgcgataatattttatttatttctatccccacctaatctttattttaatttgtatttattttaccaatttgtttttaaggtttattcctaattaactattctttactcacgattaataatcttcgagatcaaatccagataaaatagacgaataagatcagcatgatgcaattagtttaaaaagtttttgaaaatccgtatttttatagttttgattttgtcggtcaaattttcagggtgttacaaacctaccccccttaaataaatctcgtcccgagatttcttaccagttttcgaatagatgcgggtactccgtcctcaagaattcttcggtttcccaggtggcttcatcctcagtgtgattgctccattgtaccttgtacatacgccacactttgctcttagtcctcttttcggcttcatccaatatccggatcgggtgttctggatatgtgagatccttgctaatgtgactcttccagcggagcttgctcttccggcactcgtaaacatttctttagcttagacacatggaagactgggtgcacatccgcgatattctctggtaactgtagctgatatgcaacttctcctcgcctggcgatgatctggaatggtcccacatatcttggtgccagttttcctttgaccttaaacctttttgttcccctcatcggagaaacctttagataaacgtaatctccctccttaaattccaggtttcttctttgggtgtcggcgtaactcttttatcatgattgtgctacttttagacggtcacggatcaagcgaaccttttcttcggcttcttgaataatgtcaggtccaaataccgcctgttctccagtctcggaccacattagcagggtacgacatcgtcgaccaaacaatgcctcattgggtgacatctttaggcttgcttgaaagctgttgttgtaggagaattcggcgtagggcaaacatctctcccagtccttgctaaaatccagagcacaagccctcagcatttcctccaggacctggttggttctctctgtctggccatctgtctgtggatgataagctgtgctaaatgcgaggtaacttcctagggcttcatggactttctcccagaaatgtgaggtaaactgtgtgccccgatcagatgtaattttcttaggtacaccatgaagacatactatcctggtcatgtataactcggctagcttagcactgctataatttgtcttaacgggaatgaatctcgccgtcnnnnnnnnnnnnnnnnnnnnnnnnnaaatggaatcatatcctgttgcggttttgggcaatccaacaataaaatccatacctatctcatcccatttccattcgggaatcctaaggggttgcagcaagcctaccggtcgctgatgctcagccttcaccttttggcacacgtcacagagtgctatgtattccgccacatctctcttcatgttgggccaccagtatccttccttcagatcttggtacatcttggtacttccggggtgcaatgaatatgccgattcgtgagcttcctttaaaattaatcccctcagtccaccctgttcgggtacgtaaattctctttttataccatagaacatctttttcgtcggttgaaaattcctttgcacgtcctgtagctaagcgttccttcacctctcggacttcctcgttgtccttctgggcttcttctatttgggttctcaaaagaggttgaatgtccagggtgtttatctgtccacgaggtactatatgtaggttcagctgagctatctcctccctaagctcagggatcatcccttccattctcagatgattgcaatggctcttacgactcagagcgtcggccacaacgtttgctttgcctgggtgatagtgaacttctagatcatagtccttgattaattctaaccatcgcctttgcctcaagttgagatctgactgggtgaagatatactttagactcttgtggtcagtgtagatatcgcaatggtttccaatcagataatgtctccaaatctttagcgcatgaaccacagctgcgagttctaggtcacgggtagggtagttttcctcatgtggttgcaattgtcgcgacgcataggccacaacttttccgtcctgcatcagtactcctcatagtccttgccttgacgcatcacaatatataacgaagtctttcctgatgtcgggaagaactaaaataggcgccgaggtcagcttttctttgagctgctcaaagctttcctgacactgttctgaccacacaaacttcttttccttcttgagtagttgtgtcattggtcgggctatcttagagaacccttcaatgaaccgtcggtagtatccagccaagcctagaaaactccgaatttcagtcacagatttgggtgctttccattctgtgacagcctccactttagcaggatccactgctactccaccggccgagattacgtggcctagaaaagcgacttcttttaaccagaactcacacttgctgaattttgcatataacttatgcttccgaagtttctcgagtaccaatcgcaagtgttccgcatgttcttcctcatctttggagtagattagaatatcatcgatgaataccaccacaaatttgtccaagtagtccatgaacactttgttcataagattcataaagtatgccggagcgttggttaaaccaaacgacattacggtgaactcatataatccatagcgtgttgagaacgcagttttgggtatgtccccggttctaattttcaattggtggtatcctgaccgatggtcaatcttagagaacaccttagctcctttgagttgatcaaaaagatcatcaatccgtggtagtggatacttgtttttgatagttacttcgttcagtgagcggtagtccacacacattctcatgctaccatctttcttcttgacgaatagcactggggctccccaaggtgacgaactggggcgtacaaatcccttttcttgcaactccctaatttgctttttaagttcatccaactcattgaccggcatccgatatggtctcttggatatgggggcagttccgggtatcaggtcaataatgaactctgtgtctcgatctggtggcattccaggtaaatcttctgggaacacatcaggaaatcgctgcactacgggcattccctttaggggtagcatggtaaatatacctccggcacgttcggttagcctaggatcttgatccatggttgctctcatatccgatccccagggtgtggtcagggtaacttctctacgtctacagtcaattatccctctatgctttgctaaccaatccatacccagaatgacatcaagagtttggggtattagcaccataagattggagggaaataccacatcccgaaggcggatgggtacgtcaatgcaagctgtatccactgctatctcacccccaggtgaatgtactaacattggttgtcttagtttaactctgattaaattgtgttgttgacttgctttcaaagatataaatgaatgcgatgctcctgaatcgaagagaactttaactggagtggagttgagtcaaaacatacccatcagtacgccttggtcttcctgggcctcttcagctcgaacgtggttcacttgcccgcgtccaaattcggtagcggtcctgttagtctgcggagtcctgaatagacctcgtccagcagcaggggtagcagtcccgtgaatagccgttgcattagctccggtgcgaatgggtgtcttgttcggatgaggacatttattggcgaaatgcccatactctccacagttgaaacaacttcctggccttactgatccagtggcggcctgattcggtgcaggagcgcggttctgaatggtaaccggcctgtggaaattactggaggcggcaggtcgactggttgtcaccactgttggtctccatgccgaggaggttgtccctttaggacgctggggtgcggtctgaggcgggcggttcatggcaagcctccttttacgattgtgctccacgacctttcggtcgttctccaacctaacgaccttattgattaaactctggaaactatcgtggtcttgtccaatcatgggcccgcgtaactcgtcattcaagccttcaatgaatttgtcgatcttttcctcctcgttggcaagatctctagtcgcgtagcgcgccagctgagtgaaatggttcaggtactcttgtactgtggtattcccttgccgtagtctcctgaactcattcttcttcatccgcatcactgcggcaggcacgaagttgtcacggaaggctgtggtaaattcctcccagtttggttctccagcatcttcttctcgggattctttgtacgtgtcccaccagtctccggctggtccttccaattggtttgccgcaaagatcactttatcggcctcacgtactcgaataagagttagcttcttctcaatgatccttaaccaatcttcagcatccataggttcttcagctgtggcgaatgtgggtggcttggtcctcataaactctccaaagcttggccctccgcggttgccttggttgttcgcgatagcttgcagaagttgagtttgggtggccataactccggccagagtggctaagtcgggtgtctgagtttcgtcattgctggttgttgcccgacgtcggcttgccatctgtgcaggttgattgattgagtaagtatcctaattctctagctatcttttacggctttatcccattaggggagattgttttgatgtgaactttgttttgcaagcatggtggaataaactcatttataacacagcaacaatagatatcataaataacatcacagagtttcacaaatggcacataaatcatgatgcaatcgactgcatacatacgcagtccaaataaggttcatccaaaagatacatcaaactaatcatcaatctactcgtcaatctaggtaagggaggggggtgtctcgcatactatccaaaaaccatctgatacgagatcgaagctgcaaggagtccgtcagtctagtcctccagccatccgcaggatcctggggcaggtagagggtggtcgctggcacgcgcaaaccggagtccccacggctcagaagtagtggcctctggatctggcttgggcctcttgcccggaggtcgtgtgctcttgcgagtagtgctgagggtgcgaggacctccaaggaaggtgatgcggggaacaggggtctcatcctctgaaggatcagtgatgtctggcttgatctctggctcggtgtcggtcccctctgtctcggagtcgacctagatcggagtctccaaactggaacccagctgcggagaaggtgtagggatcagtggagtgtgcaccatctccgggacaggtggctgtgctgctgtcgggtccactatgtaaggtgctgactcggtagctagcatactagcctctcccagaagagcgtggaacgccggtgggtacggcggggtgaggaagaagtagcggtcacggcctactgctgtggaagtagaagcccctgtggtgctgatcttggctactcgaagctgctcctccagctggctgacgtgctcctgactctctctcagctgctcctcaagagtatccatcatcccgcggcgatcgttgtactggtcagataactgctggaactggtcgccgtggacctggagctgtgccttcagtaagtctatctcactgccccaagcctggtgctcctcctccaactgaagctgctgcactgagaggtcagtcaactcagtctccagctctcccatacgtctctggtggtcgtcaatctccaacagagcctcctcgtagtagtcatctactgcctcagcccatcgtgacaaccgagtcaccatcgggttgtagcagcagggcgtgtcctgaactgtgcaaactgagttgctctcctcccggaacgggtgatgagcaaactcggtactcactaactcagctcggtggatagagctgagtcggaggaaggcctcccgggctgcatcctgcatcgcggtatctggcaggtctcggtggtgacgtgtctgaaagctgtagtccaactcggaagggactcgggggtgaacctcgacccgagcctcccaaagtgagccacactgtctcactcggtatgacgggaacccagagtatcgcagacgcctcaacatacgatgcagctcaatgacatacccctctgattgaggtaagctcaactctcaggtagcgggtgaatccgaatctgccatctaattttaagaaaaacccaaagtcaattgagagtaaaacttgttttgtgaagaaaatagttaagagtaagatgaaaattgtaccgagttttgtaaatatagcgtttttatttttgaaagtattactaaatgggaatttctcccttggccaacttagaaaaggggtggggcgccttttggtcttttcctacagtcatatggctctgataccagctctgtggacccccgtttttataacaggaatcaatcgtgtaaacagtaccatttccctggatcacgtagtctggtacacacgaattcatagctgaaataccaagtgcacatacacgagtgtctaatacgaattattacatcataagcccgcaggcgtagtcttaaatcatcggaccgagcggtccggaatacatcccaaaagcagaaatagataaggcagcggaattcaggcagcggcatgccattgccacaggcaacgaccgtactaagacctactgagcgccatcgtcttcatctccctcctggtagtaggcatagggatcctccgaggcttcatctcctgcttctgattaattttatatttgcaagggtgagtaccaaccgtactcagcaagccaccacagcaatgatgcacatgacagaggaattcaaaggatggctatggttcttttgcgcaaagcaagttttgt

SEQ ID NO: 29431 - DNA, 623 bp, Oryza sativa
agccttgttgagtttcctgtaatcgatacacatcctccatccggttacggttcgttgcgaaattagttcattttgagcatttgcaatgaccgtcattcctcccttctttggcacaacctggactgggctaacccactcactgtatggtacgggatagataatcctggcatgcaggagtttcaagacttctgtctttacaacctatcgcattgcattattgagccgtcgttgaggttccatagagggagtaccctcggggtcaataggaacacgatgggtgcaaagcgcgggattaatccccctaaggtcctgaagcgagtagccaagaacagaacgatgcttctctaacacggtgagaagacgttgagtctcgtcttcagagagcttatcactgatgatgacaggggcttctctgtcattgtgtaggaaggcatatcgtaggcctagaggtagaggtttaagctcaagcggaggtcgaggtggcggttccatgattggcaggtcgagagtctcaccgggatctgcttcttccttgatgaattccgggacctcatcttccagaagggccctcgggagactcatgaggaaaaaatgcagtaacctctttcactgactcaatttct

SEQ ID NO: 29432 - DNA, 4413 bp, Oryza sativa
  unsure (1)..(4413): unsure at all n locations
aaaagaaaaagaaaaaggaaaaaggattttccctggaattaaaatattgcttgctcaattttaattggttaaaattatttctagggctctgaaaattccactaaaaatcctgttagtgaatttcgacatgtagaactcaagaaaaattccacatgccaaatccgattattatttgcattactttcttagggttttctcttgattgcacctgcattttcttggggttgtttataaattaaatttaggcttgggaggagaacttcggggtgtgacagctatacttcaagtcaggcagttacctattcccgcttgtggcaagcactgtgtgtcttcaagggtttcaagcgaaccggtccttaattgccatgggtgcgactagcaaaaccatgcacccacaacccaccattcagtcgcattttagttggataattacgaccatgaaatatggccagatgtctcgagcacgcagctcgtcaagatactgaaaggtctaatactgcaattatcccatcaaatgagctagtggtaattaagcatggctaagcatatagttctagctaggtcacataagtaacatgagctagtcgatttattacccaaggttgacaaaggatagatatcaagtaaacatggcaaaagcgagcagataggtaaaccctgatcacatgcaattagtaagacatgcaatttttatttgcaaacgataaaacatttataaattaggatgaaaatgctcaaggagaatgtgtgacttgccttgcttcttcactttgatcttctgaactattttcctcacaaccgcgatctttcaaaacgacggaaactactcgctggcacgcaaaacgaggaaaaaactctaataaaaaccaagtaaacagtacataaaaagtaaacaaacatgtagagctcaattttagatgaattttgcaagttgaatggtttaatttggagtttgtatgaattagatatggattttagaagtttcgagccatttaaatgaatttctagaattattattgatttattgcgcaattattatatatttttcttaaaggaaaacaaaagttattggctcagcagtggggcgggcgtggaccgagtccaccaaaggtgggccccacacgtcagccaaaaggggaggggcggcgcaccatggaccaagaccacggggtggtccacaggctaccaacacgagcggcatggcaagggtgcgggttggctcgccgaccaactcgaggcggcggcgcgtggccaaatggcgaccgccggcgacgacactagcaccgagcggcggcacgggaaacggggaaggaggggaataaatggagaggaggaggagggagggcggttcaccgaaaggcgcggcgacggagggagtcggccaacggagctcagggcagagggaggcggcggcgcttcagtgactaactgcgacggcggagggacggccgaggggcagtggggcgcggtggagatgatggtggtggaggcgctacgtggcaacggctatggcggcggtggtgtgctaccggagtcgtcaaagcggtggtagagctcgggttcacagtgaaatggtggttccggcgaggatacagggaaatggagtaaaggccggtgtccgcgaggggtggcggagctagtggtgccggtggtgcaaagcggcagcgattggagcggcggtagcggccaggactagcatacgattgaaattttaatgttatggttaatgagattattccatgtatgccacagactaacgactggtattactctctttggttcatattataattcgatttaattatttttccagttaaattgttttatgtttaattaagtttttaataaatatagtagtattttaaaaaaacgaatatgttgttaaaatatattcaaagcaattataatatggagtaaaaggagtactaatttagaaaaaaacgaaggacagaaaagaaaggaaaggaaaagtaaaagcaaacgacgattcagacagacaggctcccttccatgcctccccattgctcctactctcccttgaggccttgacccacccccaggaaaagcaagggaagcatgcccagcaaaatcgaacccacaaaacctcaggaattaccatcgcctagcaaggaatcaacaatccgtggtcaatccatggcagatcaggatgtggccgagccatggggcttgtcggcatggccccccttgacctccctcctcctccgagccatgaggaagcggcgcacctgggcggccctcttcctcgccgtgtacgcctctctgctctgctcgtcgtggcgcctggtggagtccgtgcgcgcctggtactactccgcggccggcggggctggcgccgtcgcggcgtggccggcggctttctacgcgtccgtgatgtacggtgccgtcttcgggctcctgtcgatgggagccgcgttagccgtggcggcgccggccatgctcatcacatggatcaccgtgttggtgctactcgcgttcgccggaaacccgcggaggtcgctggtcgcagaggggcggcgcgccacggccgatatcgcgcggctcgcgctccgcgtcttgctgcgcgagggcaacgcagtcgctgcgctctgcgccgccgccagcttcgcggccctcctcctcggccgccgcgacgacgacccggcggaggggagcggcagctgatgtgacgcttcctgcaaaattgttcaattccatgtttttttctttcagttaatatccgttttggggtttcagtgtttcaccaaccacccctccctcaccatccttttttttttctgtagaggtaaattatggagaaaaaacagattaattaacagtactacataattgctaaattgcaatcacagtgttgatgccgtcttttctttgctttgctttgtgtggagattatgggtaccccatacccacacggcatgattatccgactagttataggggataacttatatatatgaaatatgtaacagatcatgacttgggtattacgtttccctgtatattatggaacggcctaaagtcctggtttgataagattgtaaagtagatttaggaaaccgataccgtattggttaaggtttctatcttgtaaccctgccccccaacctatataaggagggcagggagccccctctaggggcatgagacaacctgatcgtcagatcaatacacactcggcggattcaaatccccaaacaggagtagggtattacctctcatcgagagggcctgaacctgtctaaatcctttgtgtctgcatccatccactttaggtctcgtacgcaacccccttttattattgccgaattcatgtttcgacagttggcgcgccaggtaggggttgcgtcgtattacccgtcgagaagtgcgatggaattaacttcaaaagaaacgttgagatcaatttcaacgtgttcaatggctcgtcaaatctttgatcttcatccgggtttgccgctccaatttattttattattagattaatttctaacaacagattgatcgatgatttgttttgcgagatgacatgctcaacagcgcacgtgggcacaccatcgctatcgcatcgattttgtgcatggcgaactgttccatctacatggcgccgcgagagttgccgccgggtgcactgcatcacgtcaggagtccagccggccgctgtgtgctcgccctggccctggtcaaagactattggttctttacagggttgacttgcatgcacgttcagcacctgcaagaggatggataaacccatgttgcatatttgcatgcatgcatcgatcaacatatatacttattgagttgtttctgtagttgctactaatttgatcaatctgggtttttttggctggctggccgattcttctggctgcttctactgctgcagggaggcctcaccatctcagtgtcgattgcttgattagtcctagtgacacagtgcaacaccaacgaccaattttctccgtctcggagtgagtccggtcgaggaaatcaatctcggcgagttgaatgatttaatcttcgactttgctaggtgatctatgctggtcatggactcgagacgtcccagctattcggtcaattggccgcgagtccactccgccggcttgcctttgccaccgccgctgatagcaacaacgtcttcaccgaccggcctgcctccgtcgccgccgactggtgtcctcgcctatacggttggttggtcacaccaccgttcatgggcgttcacgtcttcaccaaccggcttgcctttggcaccgncgctgatagcaacaacggntttaccgaccggcctgccttcgtcggccggcgactggtgttctcgcctatacggttgggtggtcacaccaccggtcatgggcggtcacgtcttcaccaaccggctttgctttgccg

SEQ ID NO: 29433 - DNA, 9302 bp, Oryza sativa
tcatcattattccttgattatatgtttggtttgttcaattaaccacatagtcgggggttacacctattaggtgcatctagtcgatgcatctgactttattttttcagccctccacagtcttctgatttggaaaaagtactcgggagatcatggcgaagatgattgaagcactcggctttggagtaatctagttcgagagaagattatctttccgactgtgaaggtctcaggggctactgtggagattatgggtaccccatacccacacggcatgattatccgactagttataggggataacttatatatatgaaatatgtaacagatcatgacttgggtattacgtttccctgtatattatggaacggcctaaagtcctggtttgataagattgtaaagtagatttaggaaaccgataccgtattggttaaggtttctatcttgtaaccctgccccccaacctatataaggagggcagggagccccctctaggggcatgagacaacctgatcgtcagatcaatacacactcggcggattcaaatccccaaacaggagtagggtattacctctcatcgagagggcctgaacctgtctaaatcccttgtctccgcatccatccacttttagatctcgtgcgctacccccttttattattgccgaattcatgtttcgacactcggcgagttgaatgatttaatcttcgactttgctaggtgatctatgctggtcatggactcgagacgtcccagctattcggtcaattggccgcgagtccactccgccggcttgcctttgccaccgccgctgatagcaacaacgtcttcaccgaccggcctgcctccgtcgccgccgattggtgtcctcgcctatacggttggttggtcacaccaccgttcatgggcgtccacgtcttcaccaaccggcttgcctttgccaccgccgctgatagcaacaacgtcttcaccgaccggcctgcctccgtcgccgccgactggtgtcctcgcctatacggttggttggtcacaccaccgttcatgggcgtccacgtcttcaccaaccggcttgcctttgccgccgccgactggtgtctctgccgacacggctagcctattatgtcgtcgttggtgggcatcttcgctttcaccgtcgaccgccttcgtcgccgccgactggtgtcctcattgttattgatggactgtttcgttcccacatcggctacttctgctgccaccgagggaatacgacaaagctaagtcatcatttattttattctttatatgatatttttccttttcctctgcctcactacaccaattggtcttccattgagtagtgagtcgggggctacagatgttatatcatattttttataatatttatcttgattgcttgagatgtaatctgagtacaaaagtacctatcgagttatggagttctatcttcctatgctttccgtttggtttgccaatggatggttgcctttgggccgattcctagcacccgggggctcgttggatggaccgagtaacgcaaggtgctaagtattattcggaataaatcaaaagcatagagatgagataaatttattttctgctcttaataattgcaaaagtacctaagtagtaaattctgatccgtgaaactttgttccattaatgacgaactcatgtcactcatatgcatgtttgggaaatgcctaggccgactcccgatgcttgggggctatgactagtcggacagagtgtttaaacgtacagagtcatctgctcggggaaatcaaaattgacaagaggagaaatacatatttatcaatattttaaaatacttgattttttctcgagtattatatttatatcagatactactcatcctatatgtttgttctgcaggatccagatccagacatgcataaaagggattcatggctttaagcttatctcttacgctccaggaatggatcagtcagaacatcaccaaccggcccgcctcgtctgccgccgactggtgcttccgcctgcacggctgacttattatgccgccgttgttgggcgtctacgtcttcaccgaccggcttgccttcgccgccgccgactggtgcttccgcctgcacggctgacttattatgccgccgttgttgggcgtctacgtcttcaccgaccggcttgccttcgccgctgccgactggtgtttccgcctgcacggctggcctttatgccgccgttgttgggcgtctacgtcttcaccgaccggcttgccttgtccgctgccgactggtgcttccgcctgcacggctggcctattatgctgccgttgttgggcgtctacgtcttcaccgaccggcttgccttcgccgccgccgactggtgtttccgcctgcacggctggcctttatgctgccgttgtttggcgtctacgtcttcaccgaccggccgccgcatccgccgctgactggtgtcaccgcctgcacggctggcctgttataacgccaactgatgctatcttcttcacggctggctacatcgctgtcactactaataggcatcagtatcttcaacacaagctgcctacgtttgccatggctgccgactggtttcttcacttccatggctgcatgattctgccagtgttgattggccttaccatcttcatcgccggtcgtctcgtctgctgctgactagtgccctcgcctctacatttggtttatacagctaccactactgatggacatcatcatcttctgtcgccgactgattatgccgccgccgactggtgcttttatcttcacaactgcgcatcttcactaccagtttgcttctgttgccgccgactcgtattcacttcatcacggcaatgcaactttgtcatcatgcctcgacatctcggcatgcgatgccatgttgttttactacaacaagaggctctccaatattcaggatttctacttggacatcttcaacacatatcttcaatcaagcaatgactactcgacgacaagaagctataattctcgactctatgttcagttgtttcccaactaaccaaagagtcgggggctacacaaatataaggctcaaaatttgccaaattttatgtcaagctgaagaaatcaattcatcaaccaacgagtcaactccaggagtcattatcttcatctttgattcggagcagacattctacttcaacaacttcaaatatttcggtttggacgagttagacaacaacatcaactctcctccaagtgaagcatctacaacagccataacattaatttgatggattattgtcactgacatcatcaccagcacctctgcttcatcggccctgacatctccgctgttgctaatggatgattatgttttcgccgacttattatttcaccttcacggttgacctactatgcaaatgctgatgagcgtctttgtcattatcattggttgcgacactgctattgactggatcgccgacatcatcatcttcatcatgtcggttgcgtttgtcgtcgtcaactattttcttcatcttcattgttagttgatctgtctgccgccgactggtttcttcgcctccacggctgtgcaacttcatcacttttgattggtatcactatcttcactaccaccaatatttttgccacctctgttgggcaatattatctctatattggtcgtcttgtctctatgccaactgcgtcagctaccatcgatgaacaattgtgactacgtgctcaggggcttactagctcaaatacaagtattatatcttcaatttggacttgctccggatacatgcaacatgaattcatgatcatgggtctattttatatgctcaaagactggactatttattattccccgtaagggttatcaactgaatacttgcgccagtcgggattcaattgttacatctattttggagtatcccataagggataatcactcagatcagaagctattcatatgagctacgcttggtctatattacccggaagatttattactcgggagcatgttatatgcgtcatcctttaaagggtgtcgaaggcatattttttggcctaggcctaatatgtctgcagcccatattttcaggtgtggcctgtcacgttcttttagggacttaggcactttttgcttaggccaaagtgcgcgtgatcaagtgcccaataccttaaaatccttttataccgcagttactcaactttttaggagttggtacaatgcatcttaaaaggtgtcaaacagtaaagctttatatagctggcccgctgacttttttatatagtcatggtgctgtttgggtttttaagcaattgattggatacaatatcattgcttttcgccacgtaagtgtgcatttttattgaccaatattatggcttaggctgattatatattgtggtcatttttcaggcggttggtgaatcctttatgagtttatttactcggattttataccacatatgccatatatttccaggtgtggtggaaccatgtgtcttctagggacttaagcacatctgttaaagcagtgtgcgcatggcgtatgcccaatactatggaaatttctttattcacaacatacaagcttctttatagctgttttgctatgtgaattttcaatgatgtagccaactttaggttacactcatcatattttacaaagcagtcggtatatcacttggatcatattattcagggattcacaccgcatatgctacatattaatattaagtcgcttggttgactacaattatcgaaaccactcggttggttagattatttattccttgattatatgtttggtttgttcaattaaccacatagtcgggggttacacctattaggtgcatctagtcgatgcatctgactttattttttcagccctccacagtcttctgatttggaaaaagtactcgggagatcatggcgaagatgattgaagcactcggctttggagtaatctagttcgagagaagattatctttccgactgtgaaggtctcaggggctactgtggagattatgggtaccccatacccacacggcatgattatccgactagttataggggataacttatatatatgaaatatgtaacagatcatgacttgggtattacgtttccctgtatattatggaacggcctaaagtcctggtttgataagattgtaaagtagatttaggaaaccgataccgtattggttaaggtttctatcttgtaaccctgccccccaacctatataaggagggcagggagccccctctaggggcatgagacaacctgatcgtcagatcaatacacactcggcggattcaaatccccaaacaggagtagggtattacctctcatcgagagggcctgaacctgtctaaatcctttgtctctgcatccatccactttaggtctcgtacgcaacccccttttattattgccgaattcatgtttcgacactttgctttcctggtaggtatggcatctgttgcaagacttcacccttccgacagctagaagaaagccgtgcagactgcagaacagaggatccaaatgggagatctcggcctggaaggtactaggcgtagaagaaacaccggttgagtccgttaggacatccctgatggaagccacgtgtagtagactagtagtagactcatgtaagccaatataatctaggattaagggccctttgaatcaaacaaattatggaggaaatttcataagattgaaatcctaccggaaattttcttatgtagctctttgatgaaaaggattgaaatcctacaaaattcctatggaatggcttgttgcatataggttttggagaggtccaatctcttggtaaaaatcctttgagtttatctctctcatccgattcctatgttttttctgtggtctaatcaaacgatcattcctgtgttttttctgtgttttgcaatcatttgttttacactagcattcctgtcagaatcctatatttttcctatttctccgtttttttattcctacgattcaaaggggccctaattagattcataccattataaatttgctcgttataaaatataccattataatttataaaattggaaccacaatttagtaagtatcgaagatgtgccaatacttacccctttcaatacaatttctgaacaaattaccgtcgtcttcttcctccatcctcctcctgttccttccccgttctttccctcctctcagcttcgagttccgatggaacaagaggcaggaatggccgtcgttggcttcattgtacaacgtgcagcatgcatcatcactcccaccactgtagtgatatgccctagaggcaatcatacagatgattgtatcacatactatgtttatatatttatccaactttgttctttgaaatagataactcattattggttaatgaatatgtggttctttcattagactctttatgttgtttgttactatttcttaaggatccatgatcaaatatcatatgtggaacaaatatgtttaaatgatcagcacaagtattaattgatgatcatgtctcatggatcatagtacagagataccaaattaataatgtgaacacatgttggggaacatgttgttggatagacccaacatgatacagtgcaagagccatctgtgttgtgtcatcagtgatctcatttagtgttggtgttgaatccttagacctgagattatcatggttcccaacatgtgtcgtagcttacttagggactgctaaacgctactccgtaattgggaaattataaaagtagtttttgggtatgctgtgaaacatgtagtggaatatgaataatcaagatgggattggcccctcctatggagagatatctctgggcccctcgatgttatagattatggaagtgcatggccatgccaaaagtgattgaggagtcaatcacaagttatataatctatctatcacagattcgagtgaatgattgagctattagaggatggcacatatcttttcttgagcttaatcgatatcgtgaggcaaaggggttcatacaagtatacgctagaggttcagctgatatgatctttatgtatgctcggtgggtcaatacgttctgctaggggccgctgttgacacgtggagcgaaaaggagttttcgggttacagccgagtgtacatgaacctacagggtcgcatgcttaatgggccggaataaggggattggatggagatccaatatgagcttaattcagatagggatccgaataggagtcctacgggccttggaggcccgagtgatggattctatatattcgtgagaggtgtgaccagcggagggatcgcatcacgtgagaaaccctagccgtcactcccctcccggagcaaaaccctagccgcacgcgggtgctagcacatctgcgcgtggcgttccgtccttgtacgtgtggataccagtagaggtgccgctgatttgcggtgctgatcggaatgggagtacggcgagaagagtacacgaggaggagaaggtcgagccggtgccatcgactacttcctctacatcgacgcgcactacttcgcgagaattccttcgacttcttagcgccttcttccgctgcgcagcgcgtcgagtgataacgatctatgatctaatacttgcatgggtcctagtttacgcggtagaaaagttttgatttatgttatcgtagcctacgcatatcccaacaaccatctcctccaggtcaatgggctctagaaaactccataggtgtccttcctgggagctgtacaaactacaaaacacagatatacacatactgacataactaaagcagtctaattgggggaagaatacaactatgtgaggatggggccgggccccagcaactcacttctggagaattccgccagaacaacaacaggaagacgatcttgtaggcgtcgccgacatcatcgtctccgggagcagcatcatttaggtcgttgctgcacattacggtggcggagtctctgagacataggtcatcacctagccatcctgcgaagttgctgacctctactcagtcttgccatgtggtggcaaggtccggcggtggcgacgttgtaggacagcctcaaaacgagggcaacccccggatcttgttctatcgagcttgaagctgagagaagagagaaagggaatgaagaggatgaacaagaagacaagggtaatttggtcagaaagaagtaaaatttgtattgaaatggtaagcaatggcacatctttatggtaaattgtaatggtatggttccaatttcatgaattataatggtatatttcaaaacaagcaaatataatggcatgaatcaaattaaccctataatctacgataatacatgagacgctacacttccattaaaagatattcttaaaaggaataagttcacgtgacatccctcaattgtacgccgagtctgtctaaggtcccctaaccgcaataccagaaatgtgtacccctcaactatataaaaccatccaaaaaaggtcccgaggtagtatggatgcccggtttcgctaacatgtgatgaggatatcaacaccatcgatacatccacgtccccacaagtacaacttcatggtcctattacccgcgctcgtgcacgtcaactgaacaattaggtgagttctttcttgagttcattttcctcttctttataccccgaagacgcgtgcactcttgttttactcaggaacgatggagaggatccaaaggggagaggatttccgccggttggattcagattacaggacagcaccaacatcggacggtcttcacaatttcatgcgatttcggcgtgcaagtacttcatggaaagcttatcaagtctactttcaaatggatccagccacatgttcatatctgttctggagcggccgcaatcgtcgttttagtcccaactgctttctgtccatggtgctgcgtcacctcctttggcccaatgggttgtgtatcaagttgggcccattaggggtgcgtcctagggttggagcacgaccctgtggttgttcttcccctcttcttatacctctaatcgccgccaagaacacttgggttttgatgatagagttagctacttgctaccggctcgcagcgtgcatgttggctaaaccgcctgtctgcatgtaatcagaaccccaccatattgtgtttttgattgtgaaaactttcatcgtcatctagcaattcagtgcttgttctacttgttcttgcttgttctttgattgtttgcaagatgagtgccctcgtggcagggttgacgcgcaccacaagttcgcggtgaccattg

SEQ ID NO: 29434 - DNA, 2308 bp, Oryza sativa
actcagcatgaaaatgagctgcaagtctgtagaaatcttgtgcaatgatatgctagcatttttccatgaaataaccattgaaaccatctgggccaggggccttgtcaactgggattatagagatgagattatcaatttcttgtgtgtagaacatgtcaatcaagcactccaaatctattctaggaacaaaaagctcgttcaaattgaaatctatagttggggagcaagagatacccatcctattcttgaaactttgatagaacaagtttgccttttgatcatgcaagttaactatctgaccactttgattcaaaacttgagaaattgtgttcattctgtacctttctgtggcaatagattgaaacaaattggtgttttcttctcccagcatcatccatctattagtacaatgttttttcaatatattttcctgtattccagaagttttaagatatgatgcttaactgcctccctgaaattccactaaataaagagaggcttttgtcttcttccagaagatcatgaaaatcgatcactttattgcagttattcaagagaagcatgattctggacagattcttactccagagcttaagctttttccccaaaattttcaacttgaaggagatacattttggaggatcatcaaaaccaggatctagcatccaatcttgctgaaccacatcaaagaaaccctcagcttcaacccaaaagttttcaaatctgaaaaatggagacttggggatttttgtatcaatctttaccacacatggaacatggtcagagatattcctggtcaaagggagaactgttgtattggggaaggttaaagtccatgaagcagaggtgaaagcccaatcaagcctttccagcaaaggattttgttgcatattgctccaagtgaaccttctcccttttaaggggatttcaagcaatcctagggtgctaataatctcattgaaaataaaaatgtcattcatatcagctcccactttatttctgtaaatagatctgtagaaattaaagtcccctaggaaaagccagttctgatgagcatcaatctggatatttttcaaccaggtcacaaaatctgatctttaaggcccattacatggcccatacacacaagtcaaggaccagacttgggaggtaaatctagaagttaattccactgtcacagataaagggttaacttctttgggtgtcccactgaagactcttgaaggccagacaattaaaattccccctgatgcacccatggagggggcaaaagcaaaagagtcaaagcgcttgggggcaaatttcttgatgtcagaaagatcaaagttctcctttttcgtttcttgaagacacaagacctggcaactactctcttcaattttctgtcttaaagacagaagcttattttcaacattcattcctctgatgttccagcacaagacattccaaggtttaaaattactattcattatcacaccattgagagaggggcaaaagaaccaagcctagcacagctaaccgaaaatgaaccaaaagacaatcacaccagtcttgacatatgatgagggatgttaggtcaagatcttccgataggtattgataaacaacgatttgggcggagtcgcgacacaactcgatccggcttctgaacgaacacgctactgagccccgcaatcgtagcaccacgtctcctctggttatcaaccgtgcctaaacccggttgacctcgccgagaaggctaatccctgcatgtgaatcgaagaacacaagcaagaacaagatagattgcaaccaaattgcatatgaatgattaagcactcgaatttggggttccacaaaccgatctagcggcgaaactgttcttgacaggataatccaagcaaaacccaactctaaatgatgacgtctactgaattaatatgattagggatgtcctagggttgccctagggcgcacaccgccttgggctaagcccacgacacaattacaaggcccaaaactcgtgtcagattcggactggatgagatacatggcttgttttgcagattcccggtagctcggtaggaattttgacatgggactaaaaccatctgaaagtagactccataagctttccaacaagtactcatgagcctcgaaattccttatagatcagtggctaggtccgtttgaagttgatgctgtcaggaggcccgaatccgaatccaaaacgtgtagaactttatctcttttcttctatggaccaaaaatgacgtgatgagatggaagtggacttggagaaggtcttgatatggtccccaatcaactt

SEQ ID NO: 29435 - DNA, 7747 bp, Oryza sativa
gcgctcaatggtgtcaaggattttcactggcctctccacgtaggtcaagtcttcgcgaacttcaatctgctctgagtcggcctgctcggacggcactcgaaggcatttcttgagttgcgacacatggaacacatcatgcacgttgcccaaggaggcggccagctccaactggtaagcgacttctccgcgccgagcaatgatacggaaaggacccacgaaccgaggtgcgagcttccctttcgtctgaaacctgtgtacaccccgcaatggcatgacccgaaggtacacaaaatcgtccactgcgaattcctgattacggcgttggttatctgcataacttttctgccgggactgtgccacctttagattatcccgaatgattctgactttagcttcagcttctctcaggatatcagtcccgaacacttggctttccccaacttggtcccacaatagcggtgtccggcatttgcgcccatacaacgcttcataaggtgccatttgtatgctggcttggtagctgttattgtaggagaactcggcataggggagactcttatcccaggtcttcccgaaatctaggacacatgcgcgaagcatatcttttaggatctgatttagactctcggtctgtccatctgtctgcaggtgatacgtggtgctgaaatttaatcgggtacccagctcttcttggagcttcttccaaaagtgagaggtgaattggcttcccctatcagatacaattttcttgggaacgccatggagactcacgatcctagcgaagtagagctcggctagtttgttccctccataggtggtcttcacaggaataaatcgagctaccttggttaatcgatccacaactacccatatagaatcatatccaccttgggtttttggaagtccggtgatgaagtccatcccaatttcatcccatttccattctggtacttggagaggttggagaagtccggccggtcgttggtgctctgccttgacacgctggcacacatcacacagggccacaaactctgcaatttcccgcttcatactaacccactagtatttctccttcaagtctaagtacatcttcgtactgccagggtggatggaataaggactttcgtgagctacctgaagtatcagctgtttaagttctctgttatctggaacgcatacccgctttccgttccatagggttccgtgttcatcctctgtgaaaccagcagctttatcctgtttcatattcttgaggagtccatgcatgtccggatcattcttctgagcctcgcggatttgatcgagcaaggtaggcttggcttccaacgcagccaagaatccacgaccaactatgcttaggttcaaggcttccatctgttgactaagttcgggtggaatgccacggacgttaagagtgttgcaatggctctttcgacttagagcgtcggcaaccacgttggccttaccaggatgatagtgaattcccacatcatagtctttgatgagttctaaccatctcctttgccgaagattcagatccgactgggtgaagatgtatttcaaactcttatggtcggtatatatttcacagcgattcccaatgagatagtgccgccagatttttagagcatgaaccactgcggctaattccaagtcatgggtagggtagttgccttcatgcggtcgaagctgacgggaggcataggctaccacatgaccatcctgcatgagcacgcaccccaatccttggcgcgaagcatcacaatacaccatgaagtccttgcgagtatccggcaagattaacaccggcgaggaaactagcttttccttgagagtttggaacgccttctcgcattacgggctccacacaaatttctcttctttcttcaacaactgtgtcatgggtcgagcgattttggagaagttctcgatgaacctccagtagtatcctgccaaacctaagaaactgcgaatttgagtgactgtcttgggttgcttccaatcggtgacggcagtcactgtttcggggtccacagcaactcctttagcagatatcacgtgccctaagattttgacttcggacaaccagaactcacacttgctaagtttggcatacaattgatgttcccgcaacttccccaacaccagacggagatggtgctgatggtcttcctctgattgtgagtataccagaatgtcatcaatgaaaaccacaacaaacttatccaagtattccatgaacactttgttcattaagttcatgaagaaggcaggagcattggtttaaccgaacgacatcaccgtgaattcatacagtccgtatcgcgtggtgaatgcggtcttcggaatatcttcttcacggatgcgtaattggtgatatccggaacggagatcaatcttggagaatacagtggcacctttgagctgatcgaacagatcatcgatccggggaagagggtacttgttttttatggtgacttcattgagagctctgtagtcgacgcacatcctcttcgtcttgtctttcttctctacaaaaatcacaggagcaccccatggggaagtactcggacgtatgtaccccttttctttcaactcttccagctgtttctttacttcggccagttcatttgctgccatacggtagggtcgcttgtacagaggagtggttcctggagcaagatctattcggaactcaatctctcgcttgggcggcataccaggtagttcttccggaaacacatctccgaactccctgacgatgggaatttctgacaatcctatctgatgaagttctgaacttctgacagaggttgggggtgcaaagaaaacaaccggttgttctggccctcggtacagagtgacagtgcgtctcgcgcaatccactactccttggaattgagccaaccaattcattccaagaatcacatccaagttcttggtgtctagcagaatcagatccgagggaaaaggaattccctgaatttctatagggacggcagggctataatactttgctgtcataacccctccaggggtggtgatgagcagagggttcctaagcctttctacccccaattgatttctccccacgaatggcatagatataaacgagtgggaagctccagagtcgaacaaaatggtagcagggatggaatgaatgaggaacgtaccaacgatgacgtctggagttgtcagcacgtcctcggccgtcacgtggttcacacgaccccgaatgacatccttaccaccgttgttggagcggggaggcgcttggccttgctggcgcctcggctttgggcatttatccgcaaagtgcccaggctcgaagcagttgaagcacagacactgcggaccttgaacgtccctgcggccttgaccaggctgcacggctggcgtaggaggacggggcgcacgggtcccttgctgactctgctgttgttgcggctgtgggacgcgcaccacgaattgaggtcggggcgcggagcgaggttgctgctgctgttgctgctgctgtgaggaggatccccctggatagggattggtgtagcggaccctttggttagccccctgttggttgcggaaactcgccaagcgacgcttgtgcgactctagttccttgtgcttggcttccaagcggatgctcttgtccaccagacgttggaaatccggatagtccccggagactagacggacggacagctcagggtccattcctgccaagaacttctcttgcttctcctcatcttcacgaacatcctccggggcgtaccgggccaggttgttaaactcatgcaaatactccatcacggagcggttgctttgcttcaactctcggaattcccttttcttaagggccatgactccggcgggcacatgggttcttcggaaagcggcggtgaagcgggcccaagtaataggttgcccctctggctgcgtagccttgaaatggtcccaccatagagatgcgggcccctgcagttggtgggcggcgaagatgactttctcctcatcgctgcactgcacggtgtctaactttttccccacggcatgcaaccaatccaacgcatccacggggttattggagctagagaaggtaggtggacggatgcggaggaactcggcgagtttagagtgttgtgggggtggtggtggagcattatgttgtggcggattttggatgtggtggaggaaagcagccatcatgttggcctgctgggcgaggatttgggtgagaatggcgttggtgtctggtggtggtggtggaggcggtggaggaggtgaaggtgggttgccctggtggttgtggttgctgccttcggggtgactgccatcaccggtagcagcatttttcctggtcgtcaccatctaaaaaccccacacagaaccagcaaacagagagagctgacaattaaaactaaccacccacgactaccataaatcttgaatttattactgctattaaattggttcattaaagttcaagttgcttaagcaaataaaataaagacaggctccgacatatttataccacacaccggcataaccatgccccatacgactctagcagaaaaacaaacaagaaaaacacacgcgcaagcctactaactgcttgtctacagctgcgataggccaggacggaaggtgagcatcagtgctgccaacgccggaggctccatcctcctgaggaaccacgggcgcgggctcggcacgaggggtctcgacgaaacaggtccacgccagggactgacgaacaagctcgggcctggaggtactcttgtgagcggtgatcttctggctgcggcagacgcggcgacgcttggggcgacagacctctccctgggcgatcttgagctgacgcagctgcgcctccactgcgtctaggtccttcttcagctgcagattctcctgacgcagctccaggatcttcatgttgttctcgaccaacccgcgacgcaccatctgatggaagtcgatacgagccgcgtcgtacgcctccaccatgcgcgctagatgcatgatggtagcgtcatcctccgagctagcatcccggaaggtggcgtagtcgcgggctcctccgcgacgagggtggtaacggtagggcgagtgctgcaactcgtccgggtagcgctggtgaagagtaccgatggtgaggagtgcggcgttctggcaagcggcggagaaggaatctccacccgcggtgactgccaacgaagtcctctcgggtgagccagtgaggatcactgcagtaacctcccaagcagcgtggggctctgcatcgtcaccctcctgctccgagagctgcttgccctggtagtccactccatgcggataccccaggacaacgcacatgccccgcagctccaaaacgaagccagtcaggtccagaccaccacggttgatgctgccggccatctacaaacaaaaacaaaaagaaaagcaacattttaaaggtcagattttgacgataaatgaagcagcaggacagagagagactagaggattttcacaaataagacaggatttttattttgaaaatattgctaaggcttgggatctacggctcgtcctagggtcaagggggctctgataccaacttgtcacgaccggaattaacccaacgggcgttccttacgtgcgtgtattattccttgtcccaggaggcaaggtacaccaagagttgatacatttcagagtttatcaagcggaagcgtaaatagttaatttattacatgggcagcgaaggcccagcacacacaaagacaaacgagaaacaacggaagactagggcgacgaccacaggcgcttgacggcaggcacgagctagacaccaaagccttcatcttccaggggctcctcttctgggtttgggaaaaattgagcaagactgagtacaaccaccgtactcaacaagacacacccacaagggcagaataaatgcaagggagtactagggagttataatataaagggttagggtttgcagtaaacagcattaaaagacacttagttgctcaaagctattttgtaaatacggtcctagagctatacaatattattaaacaaggccgtgaacccacacgagcctgccttaacccaaggcctacgatgattcagaccgaactggcaacccgaccctgggtcccagctcgtcccaagccaacccagggcaaccattccacattttagttgttaaacaggttttaagaattaaaacactaacttgggtacattgctcggcttgcccataaccgagggcgcggctattcgaatagattatactctgatcagaggtgtacatctttacccacaagacacatcttcctcacatgtaaccacgtgccacataccaccacggtatacggacagaagacgtgacatagtctccaacccatcctagccatagacaagagtaccgacccaatcccacctacggccggaacccccgggacaggtaggcaagactgagcccctagcagcaggacaccggccctgtgccatgacatctcgactaccgggccgcagctcgtgtagccttcatttgtcctagagatgtccatcgacccccgacttcgtccatctccatccgtgtacttttgtttataaccagactgagccacaaactaagccttacccactagacatgtggaagtacggtagtgctttttgcaacagaggcccgaagaccggtccttatatggccgaggtgctactatcaaaaccatgcaccccgagcccagcctaaaaccattttggggattttgaatagagggggcggtgtgaatccaattccacattaatcaaaccattccatagtgtccaggtgatgagaaaattcccaaagtctagagttgtaaaactacctaatgttgcctaattaaccagcgaagcatctacctaaaatcatactagtggtaccatgagtagagtgtccactagttggggttttgtttattctagggtgaacaaggaaataataataataacaataataaggtcataacaaaggtaaataggcatggctagataaaacagtgataacgcgggaatttaaataaagcgataatgcaataatttaaatcaaaataattttataaactgggattcaatatgttcaaggatgatgtgacttgccttgctcgctttcccaaacgtcggcttcaaccacgacgaagagcggatcttccgaagctgcagcgtctacacgaccaacggaaaagaaaagacttttactctaataaactccatataacaagcaggaacaaagcacaaaaatgggttcttgacttcttaaggaaaaattagagacttgaacggtcaaattccgagttcaaatggccaagttatggctatttgaagtttatatgctctttaaatgaatatttgcgaatttcttcatttaaatttaattaaaaaaaggtttattgcgtcagccgaggggagggggcgcgcggaccgggtccacgggagtggggcccacgcggcagccccacggtccacggtggaccgggcgcacccgggctcacaccggccggcgccgtgggtcccacgcgtcagccgcacccgagggcgcgtgtcacatcctgattttttgtttcaggatttataaattatttaataaattattaatagattttatattaaatgatctttaatttacaagtgaagttaaatgtgggaaataaaatttcctaaaaataaagcatggatggatttaatttttattaaattctccatgattaagtca

SEQ ID NO: 29436 - DNA, 6380 bp, Oryza sativa
aattgttgtttaaaagggattattagaaatgattttaaaagcttcgaagagaagatctaattttaatttgttaaatctcaatataaaattgggctagataaaattttgttaaatactttgcttaattctataattcctagatttttctgggatttatttgagctaaggaagtatttttaataaatggaatttcatttcatgaataatttaaattgaaaaatgtttttaaaagtccgttttggctttgggccgaaagccggcccaaaacctctcttctctctctccctcggcccaagtcggcccagttcgcaatcagtccgagccgccgctctcctctctctctcgctgccgctgacaggtggggcccgcctgtcggagccgtcttcctccttcggccgccgccgcccgaaaccctagcgcaagccgccgccatctccttccaaattcggccgcgtctttccttctccggtgaaatctttagaggggaaatgatcttctcgatttcctcttccttttctcttatggaatcaacggctaatttcgtttggaaattcgtggattcgaggtcgattcggatcggtctctccctcccgaaccctaatctttccttctcgtcgccggccgccgtgggcctttgccgccgcctcctagcccctttaaaaggatccccggtgtctcctctacccgccgccacccttgctttcgcctctcgccgtcggaagagccctagcgccgtgagacttcgcgccgccgtcgtcgccgtcgctccagccgtgcgccgccgccgtttcagtcgtcaccgtcgctcgggaaggccgccatcgtggtcgccaagtcgtcgccgtcctcgtccgccccttcgccgccgccgaagaccgccggagaaccgtcgccgccgtcgacccgatctccgccgccgcttctttctcgtcgccggcgctgtctgttgcttttccgccgccgttttggtcaccggtgagttcgccgcgccgcgctctacgtcctggtgccctccgttctcgtcatcgcgccgtcgttcgccggcgagcttgcgctcccgagccgccgccggtgatgacgtcaccgctgacgtcatcgtcgccgttcccgtgagccggtcgtggaccgattgatctcggccgtccgttttggataggatcgatctcggccgtccgttcccgtgaaccgctgccgtgcacccggtccaccgcaaaccctagccgctgacgcaataatccttcttttccttttcaaaaataaatcattattgcgtcataattcaattaaaatctatataagtgttttaatccgatttaatctttcaaaattcataactaattcatcttagctcagtttaatgtggttcaagttgcaaaaattgtgtaaaataaagatctacatattaaaattgtccataaattgaattaaatttatttaattctttttaaatgggctttaattagatttaatcttgtaaaattcataataaattcatatgaagtcagaatgaggccgttcaagtctcataattcatctaaaattatgatctacatgtttgtttactttttatgtattgtttatttggtttttattagtctttttctttgttttgcgtgttagcttgtcgtttccgtcgttgcgaaggttcgcgagtgcgctggaagtattcaagaagattaattgaagaccgattattgcaatgcaagtcacacagatcctaaacacaatcctttgagcatgttgatcctatatttaaattctctatttatttcaactgtgcatttattttcaaatgtcattgggtggaattaacctattctttgttatggcccttttgttcttgattactttattccttgataccttgggtgattataattggactagttgaactttatatatattggttcaactagatatcagatataattgcttagccatgcttagaaacattagcacactattgggataacttatgactcattattatttaatgatggcttaatgatagttcacgatggtcaatcgtgattggttaattaattacttgccaactaaaacttgataatggtgggttgtgagcacatggttttgagagtcgtgctcatgacaattaaggaccagttcgcgagctactattgtgaaacattaatcgtgccaaccacaagccagcgtgggcaacggctttacctttcgtatagcatggttcattgcagagcaccagactgagaagtggcggagataagcccacaggggtcgctggggagtccatgcctctggttttgagggggtgattatgatccaggaaaggtgcactgtggtgggttgtgttatgcgaggggtaatgtcacagctcctttccgaggtaccgtggtggtactgaggcacatggtggcatgttgtggggctgtgtcttgtgggtacagtggtacacctctggccagagtaaaactattcgaatagccgtgcccgcggttatgggcgggttgagcaatgtttttcgtgattagtctcacacttctcacaataattatggatgttatacctggtaataatttgcttagctcctggtttggagattagatctgtacagccgggtatggttgtttcagaatggttgggcctgagcagcatgggcgtgttgttcagtgttgattaaaatttctgattaattactccactgatttacttctcttaaatgttttgctaaatgctgcttttgcaaatgagactatattatgccatcctttggtatccttgtgcacttgcatatttgctgtgtggcttgctgagtatgtcatatgctcaccttgcaataatcaatcaacctcagttgaagaaaaaggatccagaaggagaagacgtttggcttataccccagttgagctgcctgtgggagtggagccggagcttcgctagattttatttttccgctgcagttttcttcatggtgaggactaagtgcctcttaagtaagtatttagcgttttaattaatttgatgaatctgtatattaaattgtcagtttgtgtacctcgcctgattcctggacgaggattttatgcacaaataagttcagaaatttattagtgaatttccgggcgtgacagcgcgggcggctgacggtcgggcccacgcggcagccactcggtgcgcccggaggcggccacgccggcgcaacggcgggaggcggcgtgcccgcgcccctatggtcgccggcggcggccataggcacggcggagcggcggccgaaagaggggagggaaaggggaaacgaagcggcggtccacggctcaccccgggtcgacggcgacgacggaaacggcaaccggagcggaggaaggcggcggcgcggctcgggtggacggggtcgacggtgctccggcggtcgcgaccgaaacgaagaggtggacgaggtcggcgaggatgcggcgaacccgaaggagccggcgccgaggtggaaggtggtccgggtcgacgacggcggcggacccgagctcggcggtgacggtggaaagagagagcgacggcgcgagctcgattccggtggggagagaggcgggtgagtggcggaaacggtggtggggagctcggggagggtttatatagggttgggagtgaaagagggcggccggaagagggggaacgggcgcgggagacccggccgccattaatggcgtcggcgacgttaggggaggggtttccaaacgaatccgggggagagagagagaaaaatggggggaaaggggagggaatcccggggaataattccccccactttattgcgcgcggggacggcggaaggcggcgggattcgcggcggcggcggcgctagggcgcgggggaggcggcgggaacggcgggagaaaggggatgacgggtgggccccacccgtcagcgagggtggcgggcgggcccgcccgtcagcggcgcgcgcgcggggaggaggccgaatgggccgcggggagaggagagggagggggaaggagatgggccgagccggcccaagggggagaggggcggaaaggactttttttagagcttttctttttataaaaccattttaactttgtttatttcttaatatttattatttgtgctctgaaaattccactaaaatttatttacgcattttagacttttaggaaatatacaaaaatcctccaagccttatttgacttttaactttgcacattttaattgttggaggctttcacacggattttaattattctatgcataatttagaggatgtattttagagtcgttttgggacgtgacatttatagacctttcgagtgtttttcacttgggtttctttatatattttttcttggtatattaaagctaaagcagtcggctggatgttttattaaacgtcacatctgctcagctacataatcactcggattggatgatatttgttgcttgactatatgtttagtttttaactaatcacatagtcgggggctacacctaattaagtgcatctagccgatgcacctgactttttctatttttcagcccttcacagtctttactcgggagatcaatgcagaaggaattgaagagctcggattatcatttcgtcgactgtaaaggtctcaggggctactatgaagattatggataacccatacctacacggcatgtatagtccgactggatatggggtgccatgtatagatagaatatctttaagaagacttgggttaaattctaaacttgtatatcaaggaaatacccaaaatcctagtcggttacgattgtattttatctgtaactatatattctgttagggatatggactgtattttgtaatacggaccccttcccctatataaggaggggtccgggtgcctctagaggcacgatttttctcctagatcatacaatcaataacacactcggcggatcaatccccggacaggagtagggtattacttcttgaataagaaggcctgaacatgtataaaattccttgtctcttaacacatccacttttccaacttgatagccaccccctttagtattgccgaaatcttgtttcgacagtcggtctcttttccttcgcccaagcaagtacctttgcaaacaaaaacattggaaactcattgtgtagcaacgtttgttcaaatatataacatgtaaatctaatgtagaacatatgcacctttggttgattaatacataaggtagtcatggttatatccgagctagttgtgtcctcatcaacatactgacaggacaaatatctggtaaaacaactttgacagtaaacaaattacagacccttggaacatgataaatgtaaaacttaggcctgacaacaatactgaatcttctgtcattaattatcctccatgtttggcctggggatcttctgtcttctttcaccccccaagctggatttagccacctcctcaggagagaggctgcacatgtctacccccatcttctgtatgaccgaaagtgaacaattagagggagaggagtcagagttcatatcactataagaagtttcattgaaatcagactcctacatactgctatcaataaagagttttgcaatacctgcaaattccttaatctttttaacagactttccccttggcttcccaatgcccattcttgggtccatctgcaattctttggttgcattaccctgcagaagtcttgagctttgtcttctgtagggactatagagaatggccttcccatctttcctctttgcaggtgccttggggggaagtagggcaacaggggccacactgattgggctagccacactgattgggctagatgggggcctcacattgattggtagaacatcctcaaccacccttttcggctgagggggtgaaatagactcaaaaggttgcaaaacccattcaggttcatgctggcccactgaaggagaggaatcaaagatggacttccttggcaggagcaatgtggagaaatagttggacattcttaaagcagcaggaataggcttgccctggatcaaagtctgcatgatgccctttgctttacagaggaagtcaatcttgtccaatattcccttcataggataaaagtaggggtgccttggagcttcatttctggcaattctattcagccgagctagaaattcctggacttgggggtctagaacaggatcctggactgatgtcatcctagctgaagggagaggtgtggccatctgctgaggtagaattagttgtcctgggttttcctcaatctgccccattggatggtcttggccccaggcatcttcttgttgttcatttgcagcctgctgttgctgcactgcctcatcccattctcgagccccctggttcccagggttgccaaactgccagacattaccatcatcg

SEQ ID NO: 29437 - DNA, 941 bp, Oryza sativa
taaaggggctaggaggcggcggcgaaggaccacggcgaccggcgacgcgaaggaaacctcggggttcggaggaaagagaccgatccgattcgacctcgaatccacgaacttccaaaacgattaagccgatgattccaaaagagaaaaggtggaggagatcccggagattgttccccctcaaaagatttcaccggagaaggaaaggagcggccggatttggaaggggacggcggcgcggctcggctagggtttcgggcgccgccggccggaggtagacgatgggtccgacaggtgcgccccacctgtcagcgaccgaacgcgcgcgctcggcggttgcggtctgggccgacttgggccggggagagagaaaaagggttttgggccgactttcggcccaaagccaaaagaggattttaaaaaacctttttcaatttaaattattcatgaaatgcaattccatttattaaaaatactttctttgctcaaataaatcccagaaaaatctaggaattatagaattaagcaaagtatttaatgaaattttatctggccccattttatattggaatttattaattaaaattagatcttctcttctaggctttttttaaaatcatttctaaaaattccaattaagcaacaatttatatattttgaattttcagggtgtgacaaacctaccccccttaaacagaatctcgtcctcgagattcggaagaactggcgaacaaatgcggatgagctgacttcaattcatcttctcgttcccaagttgattcttcttccgagtgattactccattggactttgcaaaagcggataactcgatttctggttcttctctcatctatttccaagatacggattggtttctcaacataggtcagatcctcttggacttctatctgttcaagattagcttcttcggtaggtacccttaa

SEQ ID NO: 29438 - DNA, 515 bp, Oryza sativa
gtctacgtcttcaccgaccggcttgccttcgcccccaccgactggtgctttccgcctgcacggctgacttattatgccgccgttgttgggcgtctacgtcttcaccgaccggcttgccttcgccgccgccgactggtgtttccgcctgcacggctggcctttatgccgccgttgttgggcgtctacgtctttaccgaccggcttgccttcgccgctgccgactggtgcttccgcctgcacggctgacttattatgccgccgttgttgggcgtctacgtcttcaccgaccggcttgccttcgccgccgccgactggtgtttccgcctgcacggctggcctttatgccgccgttgttgggcgtctacgtctttaccgaccggcttgccttcgccgctgccgactggtgtttccgcctgcacggctggcctttatgccgccgttgtcgggcgtctacgttttcaccgccggccgcctcgtccgccgccgactggtgcttccgcctgcacggttggcct

SEQ ID NO: 29439 - DNA, 2206 bp, Oryza sativa
acatttcttgatgaccatatgattggatcctaaaatctttgtagtcgaaaaactacaacactccccttcttgcaaaccaacctgtaactcatttaaacaactagaggaactagatagataattacttatattcatgcggtcctctagacaatacatttcatcatgaaaacgaggtatagtcaaattcgaacaaatatatactcgatgcactttatattctcctttactatcataattgccaataatatgaaaaatcacatcagaagggcatggcaattccaatctagcaaatagtttcttctctaaatagttgagtgaacaaagaacatcaaattgaatataaccccaagtatttaaagaagatagcaatttaaactcttcattctctctagcaatgtgaataacatgtttaaactcaacacatagtggttctactatagaattaacatgttcattcactagttggggcatggatataagtgaagcatcacacaactcttctttatcacaagaaatatgaagcaaattattttgtgacaaaggtatttcaacaattgtttccactataggttgctctaacgtagcataagtagtagacataggtggcacatcataactatgcataccttgagtagttgtagcaccattatcattacctttattattctcatcttcataaattataggtgcttttccaattgaacattcttcaagcatgcatggagctatagataggtcttttttctcttcgtctttcttctcttcctcctcattaccttggttgttctcagatgcctgcaaaatattagtatccaaagcaataggcacaacaaaacattcattttgtaataactcacacttagctgaatgcatcgcaatattagtatctttcctgggatctttgaaaatctcatcgattctaattttttgtcctttcaatactatctttgaaattttcctcgattccattttttatcctttcaagattatcttcgaaaatttcagtaaaactcatgggtaccagttttattttccgaccattatgtctaaatgtgtatgtattagcaacaaaattatgcgaaccattattattatatacccatggttgaccaaacaacaaagaacatacttgcatagggacaagatcaaaattggcagtatcatggtaatttccaatcgaaaagtttattctcacaattctatttatcttgaacttaccacgagagttgaaccatttgatgtaatatggatgaggatgcggttgtgtaggcaactcaagtttctcaaccaaatctgaactcaccaagttattgcaactctcagccctacccgtcagcgagggtggcgagcgggcccgcccgtcagcggcgcgcgcgcggggaggaggccgaatgggccgcggggagaggagagggagggggaaggagatgggccgagccggcccaagggggagaggggggaaaaggactttttttagagcttttctttttataaaaccattttaactttgtttatttcttaatatttattatttgggctctgaaaattccactaaaatttatttacgcattttagacttttaggaaatatacaaaaatcctccaagccttatttgacttttaactttgcacattttaattgttggaggctttcacacggattttaattattctaggcataatttcgaggatgtattttagagtcgttttgggacgtgacaaacctaccccccataaacggaatctcgaccccgagattcggaagaactggcgaagagatcgggatgggctgccttcagctcgtcttcacgctcccaagtagcttcttcctcggcgtggttgctccactggaccttgcaaaaacggattacccggttcctggtcctgcgctccatggtgtccaggattttcactggcctctccacgtaggtcaagtcttcgcgaacttcaatttgctctgagtcggcctgctcggatggcactcgaagacatttcttgagttgcgacacatggaacacatcatgcacgttgcccaaggaggcgggcagctccagctggtaagcgacttctccgcgccgggcaatgatacggaaaggacccacgaaccaaggtgcgagcttcccttttgtctgaaacctgtgtacacctcgcaatggcgtgacccgaagatacacaaagtcatccactgcgaattccaggtcacggcg

SEQ ID NO: 29440 - DNA, 12469 bp, Oryza sativa
tttatttcttcttaattattatttgtgctctgaaaattccactaaaatttatttacgcattttaggcttttaggaaatatacaaaaatcctccaagccttatttgacttttaactttgcacattttaattgttggaggctttcacatggaattttaattattctatgcacaaatttcgaggatgtattttagagtcgatttgggacgtgacaaacctaccccccttaaacggaatctcgaccccgagattcggaagaactggcgaagagatcgggatgggctgccttcagctcgtcttcacgctcccaagtagcttcttcttcggcgtggttgctccactggaccttgcaaaaacggattacccggttcctggtcctgcgctccatggtgtccaggattttcactggcctctccacgtaggtcaaatcttcgcgaacttcaatttgctctgagtcggcctgctcggatggcactcggagacacttcttgagttgcgacacatggaacacatcatgcacgttgcccaaggaagcgggcagctccaattggtaagcgacttctccgcgtcgagcaacgatacggaaaggacccacataccgaggtgcgagcttccctttcgtctgaaacctgtgtacacctcgcaatggcgtgacccgaagatacacaaagtcatccactgcgaattccaggtcacggcggcggttatctgcataacttttctgccgggactgtgccacctttagattatcccgaatgattctgactttagcttcagcttctctcaggatatcagtcccgaacacttggctttctcctacttggtcccacaagagtggtgtccggcatttgcgcccgtacaacgcttcataaggtgccatttgtatgctggattgatagctgttattgtaggagaactcggcataggggagactcttatcccaggtcttcccgaaatctagtacacatgcacgaagcatgtcttctaggatctgatttagacgctcggtctgtccatctgtctgcgggtgataggcggtgctgaaattcaatcgagtacccagttcttcttggagcttcttccaaaagtgagaggtgaattggcttcccctatcagatacgattttcttgggaacgccatggagactcacgatcctagcgaagtagagttcggctagtttgttccctccataggtggtcttcacaggaataaaccgagctaccttggttaatcgatccacaactacccatatagaatcatatccaccttgggtttttggaagtccggtgatgaaatccatcccaatttcatcccatttccattctggaacttggagaagtggaaaagtccggccgttcgttggtgctctgccttgacacgctggcacacatcacaaagggccacgaactctgcaatttccctcttcatactaacccaccagtatttctctttcaagtctaagtacatcttcgtactgccagggtggatggaataaggactttcgtgagcttcctgaagtattagctgtttaagttctctgtcgtctggaacgcatacccgattcccgttccatagggttccgtgttcatcctctgtgaaaccagcggctttaccctgtttcatattcttgagtccatgcatatccggatcattctgctgagcctcgcggatttgatcgagcaaggtgggcttggcttccaacgtagccaagaatccgcgaccaactatgcttaggttcagggcttccatctgttgattaagttcgggcgggatgccacggacgttaagagtgttgcaatggctttttcgacttagagcgtcggcgaccacgttggccttaccaggatgatagtgaattcccacatcataatccttgatgagttctaaccatctcctttgccgaagattcagatccgactgggtgaagatgtatttcaaactcttatgatcagtatatatttcacagcgattcccaatgagatagtgccgccagatttttagagcatgcaccaccgcggctaactccaaatcatgggtagggtagttgccttcgtgagtccgtagctgacgtgaggcataggccaccacatgaccgtcctgcatgagcacgcaccccaatccttggcgcgaagcgtcacaatacaccatgaaatccttgcgagtatccggcaagattaacaccggcgaggaaaccagcttttctttgagagtttggaacgccttctcgcattgcgggctccacacaaatttctcttctttcttcaacaactgtgtcatgggtcgagcgattttgaagaagttctcgatgaacctccggtagtatcctgccaaacctaagaaactgcggacttgagtgactgtcttgggttgcttccaatcagtgacagcggtcactgtttcggggtccacagcaactcctttaccagatatcacgtgccctaagaatttgacttcggacaaccagaactcacacttgctaagtttggcatacaattgatgttcccgtagctttcccaacaccagacgaagatggtgctgatggtcttcctctgattgtgagtatatcagaatgtcatcaatgaaaaccacaacaaacttatccaagtattccatgaacactttgttcattaagttcatgaagaaggcaggtgcattggttaaaccgaatgacatcaccgtgaattcatacagcccgtatcgcgtggtgaatgcggtcttcggaatatcttcttcacggatggcaactggtgatatccggaacgaagatcaatcttggagaataccgtggcacctttaagctgatcgaacagatcatcgatccggggaagagggtacttgtttttgatggtgacttcattgagagctctgtagtcaacgcacatcctcttcgtcttgtctttcttctccacaaaaatcacaggagcaccccagggggaagtactcggacgtatataccccttttctttcaactcttccaactgtttcttaacttcggccagttcatttgctgccatacggtagggtcttttgtacaggggagtggttcctggagcaagatctatccggaactcaatctctcgcttgggcggcataccgggtagttcttccggaaacacgtcttcgaactccatgacgatggggatttctgacagtcttatctgatgaagttctgaacttctgacagaggttgggggtgcaaagaaaacaaccggttgttccggccctcggtacagagtgacagtgcgtctcgcgcaatccactactccttggaattgagccaaccaattcatcccaaggatcacatccaagttcttggtgtctagaagaatcagatccgagggaaaaggaatcccctgaatttctatagggacggcagggctataatactttgttgtcataacccctccaggggtggtgatgagcagagggttcctaagcctttctacccccaactgatttctccccacgaatggcatagatataaacgagtgggaagctccagagtcgaacaaaatggtagcagggatggaatgaatgaggaacgtaccaacgatgacgtctggagttgtcagcacgtcctcggccgtcacgtgattcacacgaccccgaatgacatccttcccgccgttgttggagcggggaggagcttggccttgctgacgccttggctttgggcatttatccgcaaagtgcccgggctcgaagcagttgaagcacagacgctgctgaccttgagcgtccctgcggccttgaccaggctgcacagttggcgtaggaggacggggtgcacgagtcccttgttgattctgctgttgctgcggctgtgggacacgcaccacgaattgaggtcgaggcgctgggcgaggttgctgctgctgttgttgctgctgcgaggaggatccccctggatagggattggtgtagcggaccctctggttagcaccctgttgattgcggaaattcgccaagcggcgcttgtgcgactccagttccttgtgcttggcttccaagcggatgctcttgtccaccagtcgttggaaatccggatagtccccagagactaggcggacggacagctcagggtccattcctgccaggaacttctcttgcttctcctcatctccccgcacatcctccggagcgtaacgggccagattgttgaattcatgcaaatactccagcacggagcggttgccttgcttcaactctcggaattcccttttcttaagggccacgactccagcgggcacatgggttctccggaaagcggcggtgaagcgggcccaagtaatcggctgtccctctggctgcgtagcctggaagtggtcccaccagagagatgcgggcccctgcagttggtgggcggcgaagatgactttctcctcatcggtacactgcaccgtgtctagctttttccccacggcatgcaaccaatccaacgcatccacggggttgttggagctagagaaggtaggtgggcggatgcggaggaactcggcgagtttagagtgttggggaggtggtggtggagcattctgttgtggtggattttggaggtggtggaggaaagcattcatcatgttggcttgctgggcgaggatttgggtgagaatggcgttggtgtctggtggtggtggtggaggaggaggtggaggtgaaggtgggttgccctggtggttgtggttgctgccttcaggttggttgccatcaccggtaacagtgtttctcctggtcgtcaccatctggaaaccccacacagaaccagcaaacagggaaagagctaacaattaaaactaaccacccacgactaccattattcttaaatttatcactgctattaaattggttcattaaagttcaagttgcttaggcaaacaaataaagacaggctccgacatagttatgccacacaccggcataaccatgccccacacgactccaaaaagacaaacgagaaagaacacacgcgcaagcctactaactgctcgtctactgctgcgacgggccaggacggaaggtgagcaacagcgcatcctccgtgctaccaacgccggaggcttccccctcctagggaaccacgggcgcaggctcggcacgaggggtctcgacgaagcaggtccacgccagggactgacggactagctcaggcctggaggtgctcttgcgggcggtgatcttctggctgcggcagacgcggcgacgcttggggcggcagatctctccctgggcgatcttgagctgatgcagttgcgcctccactgcgtcgaggtccttcctgagctgcaggttctcttgacgcagctccaggatcttcaggttgttctcgaccatcccacgacgcaccatctgatggaagtcgatacgagccgcgtcgtatgcctccaccatgcgtgccagatgcacgacggtagcgtcatcctccgagctagcatcccggaaggtggcgtagtcgcgggctcctccgcgacgagggtggtagcggtagggcgagtgctgcaactcgtccgggtagcgctggtgaagagtgccgatggcgaggagagcggcgttctggcaagcggcggggaaggagtcgccacccgcggtgactgtcagcgaagtccgctcagaagagccagcgaggatcactgcagtgacctcccaaccagcgtggggctccgcgtcctcaccctcctgctccgggagcggcctggcctggtagcccactccatgtggataccctaagacaacgcacatgccgcgcagctccaagacgaagccagtcatgtccaaaccacgacgggtgacgctgccggccatctaaaaacaaagaaaagaaaagcaacattttcaaaggtcagatttttggcgataaatgaagcagcaagacagagagagactagacagttttcacaaataacaaaggatttttatttttgaaaatattgctaaggcttgggatctacggctcgtcctagggtcaaaggatgctctgataccaacttgtcatgaccggaaataacccaacgggctttcctgacgtgcgtgcattaatccttgtcccaggaggcaaggtacaccaaaagttgatacaaatcagagtttaacaagcggaagcgtaaatagttaacttattacatgggcagcgaaggcccagcacacacagagacaaacgaaaaacagcggaagactagggcgacgaccacaggcgcttgacggcaggcacgagctagacaccaaagccttcatcttcaaggagctcctcttctgggcttgggaaaaattgagcaagactgagtacaaccaccgtactcaacaagacacacccacaaatgcagaataaatgcaagggagtacaagggaattataatataaagggttagggttgcagtaaacagcatttaaagacatttagttgctcaaagctattttgtcaacacgatcctagaactaaacagtattattaatcaaggccgtgaacccacacgaacctgccttaacccaaggcctacgatgattcagaccgaactggcaacccgaccctgggtcccagctcgtcccaagccaacccaggccaaccattccacattttagttgttgagcaaattttaagaattataacactgacttgggtacattgctcggcttgcccataaccgagggcgcggctattcgaataggttttactctgatcagaggtgtacatctttacccacaagacacatcttcctcacgtgtaaccacgtgccacataccaccacggtatacagacggaagacgtgacatagtttccaacccatcctagccatagacaagagtaccgacccaatcccgcctacggccggaacccccgggacaggcaggcaggactgagcccctagcagcagggcaccaaccctctgccgtatgacatctcgactaccgggccgcagctcgtgtagccttcatttgccctggagaatgtccatcgacccccgacttcatccatctccaatccgtgtacttttgtttatgactagcctgagccacaaactaagccttacccactagacatgtggaagtacggtagtgctttgcaacagaggcccgagcttaatccttatagtggccggggtgctacttcccacaactggcatgcacccaaaccccaccgaaaacaggttttaggggttttgaaagaggaagagaggtgtgtgtccaattccaacataagccaaccattccatagtgtccaaatgatatgagaatatcccaaagtctagagttgtaaaaccgcctaatgttacctaattaaattgcgaagcatctacctaaaattaaactagtggtgccatgagtagagtgtccactagttgaggttttgtttgctctagggtgaacaagggaataataataacaatagcaataataaggtcataacaaaggtaaataggcatggctaaataaaacagtgataacgcgggaatttaaataaagcgataatgcaataatttaaatcaacataattttacaaactgggattcaatatgttcaaagatgatgtgacttgccttgctcgctttcccaaccgacggcttcgacttccacgaagagcggatcttccgaagctgcagcgtctacacgaccaacggaaaagaaaaaggcttttactctaataaactccacataacaacagaaacaaagcacaaaaatgggttcttgacttcttaaggaaaaattagagacttgaacggtccaattccgagttcaaatggccaagatatggccatttgaagtttatatgctctttaatggatatttgcggatttcttcatttaaagttttaattaaaaaatctcatttattgcgtcagccgggagagggcgcgcggaccgggtccacgggagtggggcccacgcgtcagcctctcggtccacggtggaccgggcgcacacggctgacggcggccggtgccgtgggtcccacgcatcagccgcacccgcgggcgcgggcggctgacggccgggcccacttggcagccgcgagggcacgcccgaaggcggcctcgccggcacggccgacgggagggggacgcgcccgcgccccgatggtcaccgccggcgaccaccggcgcggcggagcggcacccgagagagaggagggaagggggaagcgaatggagcggtcttcggctcaccccggtcgacggcgacgacgggaacggcggccgaagcggaagaaggcggcggcgcggttcgggacgacgaggatgacggcgctccgtcggtcggcgagcgaaacggaggcgcgaacgaggtcgacgggaacgcggcgaagccgatggaggtgacgccaagtggggaggaagtccggagcgacggcggcggcgaaccggagcttgtcggcgacagcggagagagaggaagatggcgcgagcacgaatgcgacggtgagagcgagcggcgaacggcggaaacggaggagagaggcacgggagacgtttaaatagggccgagaggaggagagagcggccggaggagatggaaaccggcgcggagatctcggccgccattgattgcgccggcgaactttgcgggcacaaaatcggacgaatccgagggagagagagaggggaaagtgggggaatcgggagagggaatcgcggggaatgattcccccctcattatggcgcgcggggacggcgggatgcggcggaatccgcggcggcggcggcgctagggcacgggcgagcggcggacgcggcgggaggaaggcgatgacaggtgggtcccacccgtcagcgagggtggcgggcgggcccgcctgtcagcggcgcgcgcgctgggaggagccgttgggccgcggaggagaggagagagagggagagaagtgggccgagccggcccaagaaaggaagggggggaaagaggacttcttttagggtttttctttttataaaccttttcaactttgtttatttcttctcaattattatttgtgctctgaaaattccactaaaatttatttacgcattttaggcttttaggaaatatacaaaaatcctccaagccttatttgacttttatctttgcacattttaattgttggaggctttcacaggaattttaattattctttgcacaaatttcgaggatgtattttagagtcgatttgggacgtgacaattcacccccacccccagcactaagaggatcaaagaggacaatctttctcggcacagaatcctggtccctgtacttagccataacaaaaacccttcccaacattctgtcagcatcctcccaaaaagtttacttaccaaaagaggtaactgcctggtgcacatgatggcgatcaatgaaatcaagcgggaaatctaggaacatgaaccagccttctctatggtagttagccgccctccaattaggacattggtcatgattaacaaaaataacagagtgaaccccatcatagaactcgggcggggagaggaccagagcatccctattcatggcagacctcatctggaagaaacctactacagacgggtaccagaagctgttacaaacctcatagtgtagctcatcttgaacgaagtttgcaatgagggcccgatgatgatcccagtcctgctccaaggggattggctctacaatggccacatagaagtcttcatggcgccgagcagggcgttgcgggacagtgaggtcaacccgcgggatgcggaagtcacctccagcatgaacaacaagaccatgcattaggaagcgcagcggattagggttgagattggccattggggtggagggaagctttgggtgggaagcactgtgcgtttgggagaagaagggtttcggggggaagaagacgagatttccggagaaatagttttagccttccaaacagcagtagtccgagccgacggtttcggatttttagggtgcggggcttttgtgggcttagtggtcaaacaataacgggctaaatggcccggcaagagacaggctcgacatctaagcggcccagaacaagaagcccgagaatgacccttttccaggcaacggccgcaaggagtgttttccaaatttgaattgggcgacaaattaggatcccgcatacctttggcatgcgtaattaactccattgccggaatgaacgacggcgagacgttagccaccttggaggttgccggagaagtgactgaaaccgttttactctgcttaaaccactcttgattacaaaggttattccagctattgcctcttgttgaccgagagaagatgtagggaagaccatttggattcagcaagacaatgcacggacacatattctaccaaacgacgaagcatttgccctcacggtggcccaagtaggctattgacgagtgttaaatgtcgattctataccgccaacatctgcataaagatcagataataaaacatccaacatagtgataggtgcttaatctcacatattccacaagtgttggtctatatttgtatgcagataataaaccctgaagttgggaggaaaattagactaatgtgaggagaattatgtaatcatacaaggaggggttgtgaacttcatcgaaacattagtgaatcaacccaaaactccgagaaatggacagaggagagcctagggagtccaccgactgaaggctaggccaggaggggccagcccaagttcgaccgaaccacctggttcgaccgaacccccctgatcaccgctgatcctagggtttggcgaggacgctccagatgctctcccaatgacggttgaggggcagttcggacatttccccttcgcgaaccgtcatacctacccctatataaggacatcatctcactcacttcaacacatacttccaagcttgagctaaattataagaggctttattgtactatattgtatactaaaataggaagagcgtagagtaggagtcggaagaattccggagttgtcggtaatcttctcctatttcttttattctatttattactctgaatttaatataatattcttcttgagtaatttagatttatcttgtgagaattatctcttggttagttcctaaatagcatacggaattattgttcactgtaatcaactaaaatatagtgattgctttgctgagttataaacactaaagtagatagtaattgcttagacgtggtgtttaggtaattgttgtccagtaattgctgcgtataccacagtacgttgaggtgggtgtagaggtggtgacaaccctcgagatcactgaagtcctccctgtccgggtacgtagtagagcgacatctgggaacagcgggttgccagttcctgaagtactgcgttaggattaaaattaagctttctctagacactgtttctcactaataaatcctctctatcctagcctatcatttgcttggtgtccttggatgaaccggaggaagctctgatcacacacgttcccttggattcgatacccttggaatacaccgtaggggaagtgttacatcggtatatctgtgcacttacggattttatctgtaaccgtatcaaataccaagaagcatttctagcaccgttgctggggaacagttgctgatcatttccgaacccagttcatcctcggatcttttttcattttttttattctaccttcacccctgttatcctagagaagtattcttgtcaactcttctcgaccatggagcaacctctgtttgagttgtctactcctcggggcgaattctatgagccacctccttcatcggagcccatttgtacaactggctatgaaattcgtcccgagctaattagtatggttagggaaaatcctttttctggttttgatctagaaaatccctaccatcatctgcgagactttgaacaagtccgctcatgccttaagattcgtggcatgagacaagaaactgtgtggtggaaattgttcctgttctctcttcaagagagcaaagcaatggtacacctctaccgttggatgtgtaaatggtagctgggaaaagctgcgagacagattctgttttgccttcttcccagttactcgtatcactgcccttcgaatagaaattctcagtttcaagcagatcgaaaacaaatcaatcggtgcagcttggtccatattcactaatttagagcagtccggaccaaccctgtccttacccgagtatgtgcttctccaagatagaggaacctctaacaatcgagccacttgctgaaccatccacttctgctagctcaattgatgagaaggttcccgagcagccgtccatcgagaatgaagaaattcagactccggattgtgccgcaattatgttcagggacggttttgacgaagactatggcaataccctgaactattttagcaagaggaaaccacccgttcctttgtcacctcccgatcctatggaactcgggttcctatgagaaattgtccgggaattgacatccataatgagcaatgaatggcttagggaggcagagctttcatccgaagta

SEQ ID NO: 29441 - DNA, 8883 bp, Oryza sativa
gtattccggataccatcaaattcccatccatccggaggaccatactaagactacgttcacacgtccatatggcatttatgcgtatcgtaggatgtccttgggactgtgcaacgctcctgcatctttccaaaggtgtatgatgtctattttctcggatttgatcgaagatatcatggaagtcttcatggatgacttcttagtttatggaaagactttcggtcattgtctgcagaatctagacaaagtcttacaacgatgccaagaaaatgacctcgtgcttaattgggaaaagtgccattttatggtctgtgaagtgatagttcttgggcatcaagtgtccgaacgaggaatcgaagttgatcgtgctaaaatcgatgttatagatcaacttcctcctcctgtgaacatcaaaataatccgcagcttcttgggtcatgctggcttttatagaaggttcaccaaggacttgtctacaatcaccagacccctgaccaatctgctagccaaggatgcaccctttcagttcgatgacgcgtgcctaaaatcttttgaagttctcaaaaaggcactcgtctccgctccaattattcaacctcctgattggactctgccctttgagattatgtgtgatacaagtgacttcgctgttggtgagtcttgggccaaaccaaagataaaaagcatcacgcaatctgttacgctagcaaaactctaaccggagcccagttgaattatgcaactactgaaaaagagctgctcgaggttgtttttgctatcgataagtttagatcttacttagtaggagccaaggtgataattgatactgatcatgctgctttgaaatacctgctcaccaagaaagatgctaaacctcgtctcttaagatggattttgctgctccaagaatttgacttagaaattaaagataaaaagggagtagaaaattccatagcagatcatttgtccaggctgcagatcactaacatggaggaacagccgatcaatgatttcttaagagatgatatgctgatgacggttcgcgactccaacccgtggtatgccaacatagtgaactacatggtatccaagtgttgatgtaaaaacacgaggcctgggagatctgcttaactccagtgcaagtccaaaacttgccttcgggtatgctagcgtgacagttgatttgatcctgcaatcaacaagaacaaggacaaagaaaccgcggttaaatccataaacgatagccgatcggccaggtgccgatgacatatcatttatcttcgagccgatgtcatatttgcatcgatcggcaggcattaataaataaaacaaaactaaatctactcgatcggctgtagatattaatgatatataatccttatatcgatatatacttaaatcaagtgattgggatagatcagtcgccatgccgagacagtataaatcacttagatcgaagtatatattaataatgagattatatatattcgtaacatagccgatcagatagatctagcatgtatcggctaatactctgatactgctttatactaagatatcaaagcaaatagaatatatcaaacaaaggcctaatatacttaaatgcaacaagatcttaacataaagggcagattcaacatatcaatgaagcacatagggtaaaaagtagttaaatcaggtaagatcggctgaaaccccaatgttaccctaatcggcaaccaagaagcaggctagaaattgagattctaatcacgacttataggatcaaactgaactgatgtagctataagtatgaaaaatagcacaatatctagacaatcaagccgttggatgtgtcatagagtggtagataccttatataatctaagccaacatcaatatttaacagaggttagccaattataggttagatagcgatattgccagagattatgtaagatatatgataactcgacgaattacataaacaagattagagtgtcatgaagatggaagcactaatcccgagaacgcaagccgccataacaagttttacctcttgttgaagatcgaaaccgatgcagctcaacccaaaagcaagaactcgtcgaaacaaaacgaaagtaaaatgggtggcgatgtgctgagattgtattgaacgtgtgttaattcgattacatgggggctcggggtctatttatacacgagaattacaaaacatgtccatatcggacatgactcttatctctaacaaactctaagataccataagtctttgcagcagacttttgcccaaacatatctctaaggaaattacataaaatatcctaattaatagatacaattgccttcttaggactctatccatgtgtggcaatcatcttgaaacatatcaactcaacctgatgatgtataccgagttgtattgtcggaatcgactgtatcggcttacctagtctgactcggacacagccgatcctgatcgtagccgatttggactctagccgattcttactctgtttttgaaatgatcttcgtctttgattccgcctcgatctaatcttcatctccaatgctgatattaccaaatttggtcgataacaccaagtacataccaccaggggaaaatcaatgaaaactgaagtatgaaagtcgccgtcacatatgggatgagccatacctatatcgggtctgctccaatggcctactacgaagatgtgtgccaactaaagaaggactgaagatcatagaacgatgccatgcctcaccttatggtggtcattacggtgcattccgcacccaggccaagatttggcaaagtggtttcttctagccaacaatgtacgaagactcaaaagaattcgtcagaagatgcaccagctgccagaggcaaggaggaatcactgctcgcgatgcaatgcccctcacatacaatctgcaagtcgagatattcgatgtttggggtatagacttcatgtggcctttccctaagtctcgcaactgcgagtacattctggtggcagtcgactatgtctccaagtgggttgaggctatgccgtgcagcgctgcggatgcgaagcatgccaagaagatgttcacaaaaatcatcttccctagttttggtacccccagaatggtcataagtgacggaggttctcacttcattgacaaaacctttcgagacctcctacaagaaatgagagccaaacacaatgtggccactccttaccatccacagaccagtggacaagcagaaacatcaaacaaacaaatcaagaatattctgcaaaagacgatcaataaaatgggaacaggatggaaggatagattgccggacgcactgtgagcatactggacagcatacaagacacccattggaatgtccccatatcagatagtttacgggaagccatgccgactacccgtaaaacttgagcgcagagcatactgggccattaggaattggaacatggattttaagcgagctggagaatggagaaaaatgcagatcgctgaacttgaggaatggagagaaaaggcttaccacaacgcaaagatatacaaagaaaggacgaagcgcaggcatgacaaaaggataaagatgaagaaatttaagccaggagacaatgtactaatgttcaactccagggttaagctttttggccacggaaaactgcgcagcaaatgggaaggaccgttcgacgtcatcgacacctctttgcatggggcaatcacacttcgcgacgaataaggtaacatatttaaggtaaacggtcaacgcctaaagattttccttgagccaaatgaaactttagatgaagaagtggatgttactgaattaatttattatgaaccatgatgatctcatctattgcatgcttaaaaccctgtatagttgtcatttttgtacttaaaataggttttagtgggcctatgaaaaatttggtggcatgtcgaacccaccattgttcagccgaacatgatggttcggccgaaccagggcggcgcccgatcagccccaattttgaacctcagtctcccccgctcgtccctagtctatttagatgcgtgtttggaggtagaacgttcggatcacaccagaacactccttcctcttttcctccacatttgcacactctcctctccaattcaacacaattcctcgaatttccactcatatccaccaatggctggcaaatccctaatcccattcatcggcccttcctctaattccacttataacctcaccggagagccgacaccagcgaatcaattgatcccgatggaagaatacaccatggaaggggtaattgcacagtgggagcagcccctcgcagcagtgctgggctcccctgcgaatctggagcccgtcggcgagctccttggttcggccgaacccttctcggccccaatcggcctcccgttcggcagcgcgatccctctcccctcgctatgttacaagaacaaaaatccggggggattcgcctgcacgacggccgactacggcagaactcagcttgttaaaggcacgatgtcttttccaagatgacgggaaggccgcaccgcctcccgccgagcgctatgtgggcgccctcttcaccaaggcaggggatgaggtgctccacaagtataccacacccaccgctactccatccaccccaaaaggggagcgtttctgcattcagggagtgtgaactcccggcggtgggtatggcaaaggtttactccggcctttgatggcatcggagaaggagagggcagcggaatcccgtagccttccacctaagaaggtgaagtatcgtttgacgccccctccaattgtgagggctctcggccaattcctagaggatgaggtgaagtcaccggagccctcgatccacaagctcgccgctcaagtgaagaaactccgcaaggagaacgtagagcttagggattgcaatgcggagctaggggtagaacttgctgaaattagaaataatttcgatatccttagtcgcggtttgcgcgctaagatcaagcgtgcgttcatagagatgggaaaggaaaataagtattatgctaattagatgtttcctttcccatgaataaaatagtagtaggtgcttagttttatttttgcaatcatgtaagcacttgctatgaataatgtggcacattggtgtttaccccaatgtttgccaaagtttgttttttgtttaataaaattcaggttttgaataagtgtgggggcgatatcccagcttctgacgtgcatatgctctgaaaattgttgaaatatctgaacacctggaagcactcaactctgcagaaaattgcagaggaatcgggcaccagagtggttcggccgaactaccaggttcgggcgaaccagtgctggccccagtccctctcatcttcacaggtaagcaggtgagcacgtcctttatctgtatatctccaccatggtatagtactagagctgcaaatttagaaacaattggttcaagcataagtgaaagataaaatttccaactattgaaattcttcatgtgattgatcttttatattcattattctcagctgaatttgtgcttgtgaacaccatccatgtttagggaaccttatacatctaggtaattgctttatgtgagatgattaagatgaaaggactccttgtaactttgttgtgactcttgggaatttgttttcaaaaataaactgttttaaaagctctatcctccaattgactttaccttatacctaccaaggccatatgcaagcggcggggaaggaatctccacccgcggtgactgccagcgaagtccgctcgggagagccagcgaggatcactgcagtgacctcccaaccagcgtggggctctgcgtcgtcaccctcctgctccggaagcggcctggcctggtagtccactccatgtggataccccaggacaacgcacataccccgcagctccaagacgaagccagtcatgtccaaaccacgacgggtgacgctgccggccatctacaaacaaaaacaaaaaggaaaacaacattttaaagatcagattttggcgataaatgaagcagcaagacagagagagactagacagttttcacaaataacaaagaatttttatttcgaaaatactgctaaggcttgggatctaaggctagtcctagggtcaagggggctctgataccaacttgtcacgaccggaactaacccaacgggcgttccttacgtgcgtgcattaatccttgtcccaggaggcaaggtacaccaaaagttgatacaattcagagtttaacaagcggacgcgtaaatagttaacttattacatgggcagcgaaggcccagcacacacagagacaaacgagaaacagcggaagactagggcgacgaccacaggcgcttgacggcaggcacgagctagacaccgaagccttcatcctccaggaactcctcttctggggtttgggaaaaattgggcaagactgagtacaaccaccgtactcaacaagacacacccagaaatgcagaataaatgcaagggagtacaaaggagttatactataaagggttagggttgcagtaaacagcatttaaagatatttagttgctcaaagctattttgtaaacacgattctagaactatacaatgttattaatcaaggccgtgaacccacacgaacctgccttaacccaaggcctatgatgattcagaccgaactggcaacccgaccctgggtcccagctcgtcccaagccaacccaggccaaccattccacattttagttgttaagcaggttttaagaattaaaacactaacttgggtacattgctcggcttgcccataaccgagggcgcggctattcgaatagattatactctgattagaggtgtacatctttacccacaagacacatcttcctcacgtgcaaccacgtgccacataccaccacggtatacagacggaagacgtgacatagtttccaacccatcctagccatagacaagagtaccgacccaatcccacctacggccggaacctccgggacaggcaggcaggactgagcccctagcagcaggacaccggccctgtgccatgacatctcgactaccgagccgcagctcgtgtagccttcatttgccctggagatgtccatcgacccccgacttcttccatctccatccgtgtacttttgtttataaccagactgagccacaaactaagccttacccactagacatgtggaagtacggtagtgctttgcaacagaggcccgaagaccggtccttatatggccgaggtgctactatcaaaaccatgcaccccgagcccagcctaaaaccatttttggggattttgaatagaaggagcggtgtgaagccaattccacaataaccaaaccatttcaaagtgtccaggtgatatgaatattcccaaagtctagagttgaaaaaccacctaaagttgcctagttaaaagcgaagcatctacctaaaatcatactagggataccatgagtagagtgtccactagttggggttttgtttattctagggtgatcaaggtaataataacaataacaataataatagggtcataacaaaggtaagtaggcatggctaaataaaatagtgataacgcgggaatttaaataaagcgataatgcaataatttaaatcaacataattttacaaaccgggattcaatatgttcaaagatgatgtgacttgccttgctcgctttcccaaacgtcggcttcaacttccacgaagagcggatcttccgaagctgcaacgtctacacgaccaacggaaaagaaaaggcttttactctaataaactccatataacaagcagaaacaaagcacaaaaatgggttcttgacttcttaaggaaaaattagaaacttgaacggtccaattccgagttcaaatggccaagttatggcatttgacgtttatatgctctttaattgaatatttgcgaatttcttcatttaaattttcaatttaaaatcagatttattgcgtcagccgaggggaggggcgcgcggaccgggtccacgggagtggggcccacgcggcagcctcacggtccacggtggaccgggagcacgcggcttgcgccggccggcgccgtgggtcccacgcgtcagccgcacccgcgggcgcgggcggctgacggccgggccccacatggcagccacggggcgcgcccgaaggtgacctcgccggcacggccgacgggaggcggcgcgcccgcgccccgatggtcgccgccggcgaccaccgacgcggcggagcggcgcccgagagaggggagggaagggggaagcgaaagggtcggtccacggctcaccccgggtcgacgaggacggcggaaacgacgaccggagcggaggaaggcggcggcgcggctcgggttgacgaggacggcggtgttccggcggtcggcgggcgaaacggaggagtggacgaggtcggcgaggacgtggcgaagccgaaggaggcgatgccgaagcgggaggaggtccggggcgacgacggcggcggaccggagctcggcggcgacggcggagagagaaggggacggcgcgagctcgaatccgacggggaggagagaccggcgagtggcggaaacggtggagggaggcacggggagtgtttgtatagtgttgggaggggcagagaccggccggatgagggggactcggccgcggaagatccggccgccattgatgcgccggcgaagtttgcgggagtgtttccaaacgaatccgagggagagagagagggaaaagtggggggggaaagagagagggaatcacggggagtgatctccccctctttattgcgcgcgggggcggcggaatgcggcggaatccgcggcggcggcggcgctagggcacgggcgaggcgg

SEQ ID NO: 29442 - DNA, 26821 bp, Oryza sativa
ctaggagtatgactaatgatcttcttgagtccatatttttggctttgcaatatatatgatgtaggcatgtcaccagtttatccctaccaagcttcacatatcagccttagaataggggtaaattcttgcacactttgcgttggtgaggatccaaatgaaaatatacatctttgagagataagagagaaagtcaaatatgaggaaaagagatagtttgcgaaaattcataaaaatcccatgagtttgacagagaagcaagaaggactgaaatcaagatcgttccatcccaaaaatccttcttttatttattaggagagggcatgattacattttttttaacattatgctcatgcttgatggagcataaattctttttttttcataaccatgcctttccctcctttctttttttttctttcaaaaggatttttctttttttaggagaagaaagcacatgaaagcatggagaatttattttggtggtaatatgcatatggaatggaatattgcttagctcccagtgtaggagtttagcatgtgcatatatgtgggtgtatgatcttgatcatagagcatgagaagtatctacacaagtcataagagtttgacaaagttcaatggaaagtcaagcaaccaaaatgtatatagtttaatcatgatagcatatttttggctctggtaggaatttatatcaaatgaggaactttcaattttatcattttgaaaacaaatcatcggaatttaagtcaaactagtatcaggatcatagctactcttatttactatctcatatctcacaatagcttggacttaaatcagcaagtgcagcccatttaccttaggttcccggataattattggctacttatattcaatctttgagagagcacttaccaagaacccatatataagagatataaaacagagcaacaattcatcatttcaacaaagagaactagctagtcttacctagcatgactcaaacctatcctatctttttggtattttctattttgcaaatttttatgttttttttgagttttataagatgcaattggaaagcaagtatgcaattggaaagggaaatatgcaatgggatacaagttaccttagtggggggagagatgtctccctccaagcttgccttttgctcagggtccttgataaggattgaacccctgaaatcgaaagtacgcgtgaaggtcatcatgatgttactgcatcatgttgttgatgttggcgaactgagcattagcagattgttgccattcttgtgtttgagctatgtgttccgtgaggttgtactggatctcccctgtctgcacatcaagggtgtccattgtcctagtgatttcacccaagtcccaacgagaggaacttgagcaccattcacttggagatggaggcacaccacttgatctagagggttggttgtccccccagtggatgtcatgaggcgcatgccaccggtcctcactggcgcttgaccaggttgagactccgatgctatggcgtggagcttggatccatccaggtgcatccctagttggtgcccaacctgcctcatacatctgcacgggtgtcgaggatgatgaactttctcgttcgttccttgtcatgttgcgcgtctccctgtatgttccacctgcacgagattcttctatggtctgcaggggaatggttagttcatggcagttgtacaaatgataccccgcatttggcaacaggatttcatttgtaaaaccggggaaaaagtatatcaaaaattcatctgctccatgtttcaaaatatgcccttgcactagataggcctcatcaatacgcggacgagcggctgagataaaagcaatttggtcgctaacgacccctagcacgagcctaagtgtaggattatggatatcatttgttgtcaaagccacaactgcatacgtcgaaagacgtggttactcaacagtagttggaaaagaagtaaaaatgttttaaaatgaaaaatttttcttgggatccccctattacatggccctatggggctagttataaccccattacaggttcttactactaggggtttggttatatagggaatttacatggttgcccgtatgaaaaggacatttacacgggtacacagtgtaatttaggttcatgggccccctacgggccgttaggcgattgttgaccccattatcccctatgctttttgtgcccgaataggttttttgggcccccccggggcgaacttgctacggcaaagtcgtctcccttcggcatatacttttcgccctacatccttcgcccaggaggcctctggcttggtgaagtacccgtgagattccctgcctttcgccgttggtgtttcatagtcttcgccatgggggacttcgccctgactaaccttgacgtctcgggcttgaatccccactggtcgcatggtttcagcaggtttggtcaaagggcctcatgccatatcgccaacaagcccctcacgggcaagggtgagataggagcttcggccgagaccgtgcaaaccatgtggtatggtatgtggcgccccctttcgactggtgctcctgccccccattctctttttcaccgccacacttgtcattttcaccgcgcgcgctttcttcctctgttcttcctctcacggcgccccttggcccttcagacctttcactcgctctctctgttcgcaactgcacactcccttcgccatggctccccgcaagcctaacccctcttcggcgaaagggaccgaccccggccggattgacgacgacaccaccgcctatttggggatttctctgatagacaacggcgagttggcaaagttggtcagctctagggcgttggttgagggacaggctttcgccctggggaaagccgttgtaccgaagcccgtcgacaaccggacggtggtgttcgccgtgttttttgaggcggggctccggtttccatgcaactcgttgttgccggagatcctttgccttttctaggtggagctcccacagttgagcccgtcggcgctggtccggatcactatcttcgactgggcgtgccgaacttccgggtttgagcctaacgccgaactcttcgatgccatatttttcgccaccgtgaattcgaagacggtgattaccccggccgggatgaagaagacagtgttcgggagcgtgaactttaatgttcgccccgagcactccaatctctggccggtgaatgccgccatgtcgaagtgggaccgccattggatggcgaggtggtttttccacatcatccccttcgaggctggttccgagtcagcgaaggccctccggtgccggcgcaaggcgattgcacctaactggaaacccaagatcgccgtggacggtgctatgaaggcgtggttcgctctgctgcgtaaggtttgttcccgccttagctgtcatgacttggtggagactgcatgcttcgcatctttcccctctcccagtcatggcaagtcgcggttgaccaaggcgaagaggttgatggtctgtcaaagttggttctccctaaggggacgaatggtaagactgcactttcactacgcattcctgttcttggttattttgcttcgttcgacacttaatgtggctgcaccctctattttttttgcagtgttgaccctcaatcaggccgacgccgaagcccggaagatgatcggcgacgtgtcggtcgtagagtatagccagctcctgacacgataggcggtcggccgggcgaaccgggtttataacggcgaattgcctcccgggcgaacccccacaaggccgacgacgatgcagggccttcgcgaaagtggacgcgcggacaagtgaagcttgcccctaggaagcgaagggttcctgcttcctccgattccgacgccgatgatgaggacgacgtcgaagagcgtgacggcaagtaggaaggggaggaaaaagaggaggcggaggccgtggccgaaaaggccgcggacgaggcggtcgaaaaccgcgtcgacacccctggctacactcctactccaagtccaggtcacaacgagactggggtggaatcgaatagctcccttcttcatcgaaaggatttggagggggcgaaggcgctagtagcgttttcggcaggcaaggcggcgaagggaggcccagttaaaaagatctccaaaaagaaaggactcgtcgatgtcgctcgcgttttcagcgacgacgagtcttctgacgagactccgacttcgcccgctggccacagcttgtacctttcgaccgctcccattcttccgctcgacgctagtggggcaggtggtagcgccgccgctggggcttcaacctccgctgaccggatcgtgatggctgcggcgagggttttcggaagccctctgcgtcagccggttgtttcaccgctagtaaaggcgaaggggaagggggctgccgtcgaaacatctgcctcggagtactccctcgtggtgccccacttcgcccctggtgatttcgagacccgggcggatcttattcccttcgtcgagggagtaagcaatcttgtcttacctgcctgcacccagagcctattcaccgagttgaacgagttcgatgaagggtgttccgctattaaaagcttggcggttcgggtacgccttttcgctctctttttgattttcctctccttttttacatgtcccataattaacatttattctcctcgcccgctcctgtcttggatctagattcttgcggcccactgttcgacagagcgaactgtgcgggcccatcttgatggatttaagaaccgtcttcgggccaaggatgacgaaataggccgcaagagcttgaagatggaggccattgccaaaaccctcaaagaggcgaaggccgaaaacaagtggctccaaaccgaattggagaaaggaaaagaggctagggccgaggtcgatcgcctcaaggccgaactggagaaggggagagaggccagagctgaggttgatcgccttcaggctgaactgaagaaagaaaaagcccattccactatgctgaccgactattataacctcactaagccgaagatggaggctcttcgtctggaggtcagcaaggctgaggcgagcactgtggaggagtcacagcggttttcacgggagatggcgaaagccaccgaatccgcaagaacggcgtgccaaacgctccgccttgcccttactgacatgggtgcaagggtgcgaggagtccctgccgaagacgcctcagccttcaacttcttcgagtggactcagcaggctggtggtgcggtttcgaactgcgccactacatacagcgattgttgtgtgcacgtatcagcggccttcactatgggccttatgtagcagttcggctgtgagcacgtcaccgagttccctaactatacgaagggggactgggaggtaagtgcgcagaacgtttcgccgacgctccgtgtgtggcgaaagcagttctggcagaacgacggccgatccaccgccaaggcgcgcctgctggagcaattggcgaaggcagaggcggcagaccggtgtgaagaagaggacgcggcggccgaagggggtggaggcgatgcccaggatcacctagaggtgtgaggccctccgccctttccttagatttttgtagtttttcttcttccttttgtgtttgccgagagaggcgaatgatgtaaattcggcgggctggccctaaccctccttattgtagccgaaaaaggccccttggatatttggaatgtttgactcaatcttagccactttttatggtcgatgcctttggcgtatatgattacgccactttcgcattatgtaatatttgctcttttttcgcccattcttactatccaattcgtcttttgccctttctgcattgtctaccagggtgtttgctgaaaattgtgcattcggcccccttctgggagttggcgaagcaaaaacgagaaatttgtggcgttgaaggatctgctaaatgtacgatgcccgtttcggcatgtttatcgcgagatggtgataaacggccacagctataaggtttttaaggttgctggctggctacgggcgcaccccgggcgaaccttagaagattatgatcttgttcattcaaaacgtttggaggatatggctagcttttggcaaaaccatcagaagactgatcggcaggaggcgatctcccagcgtcgttacagtctagtctgtgtttcgcccccttctcctcttagggtcgtgtatgatattagtagtgatgacgaacccagttcgtctgaccattccttagagagagagagagtgattgtgggggcgaagatgtaatttatctgtaagctgggctgtaaaaccattgctttttcttttacttgtaccatatttttctttcgaagttaacaaagatgtgttttatttccttttcgctatgcattgtcactttgcgtgctttcgttgggtcagaacgtgttggccctttgcgtatattagcgaaataggttttggcttttcagctttcggcttccgttttcgatccattttgttctacattgtaggaagcactcgtgcattccttttgatcgagtgtaacggtgttcggttagttgttccccgaaacaagctgttgcggtttcaacgttcggcgagcgatgcttcgaccgatttgtttcgcccccatggcctttttcgctgatcaggcgtttgccttggggtttttccacaaattatcaatcacacaaataaataagacgaaggtggaggacacagagattttattatggttcaggcctccatggtagataatagccctacatccagtttttcgtctttttacattttcctcttttttttctttttttccttttttcttctttgccgaaaggtttacatagtgtcgaagggcttacataacgatacatacatttttacaatttggcgatttgggtgccacccgttctagacatagaaaagcttgagagaggcagcgttccaggaatggtcgaactcttcgccttccagtgtcaccagtcgaaaggatcccatactggacttgtccttgatgaggtacggtccttcccacttcaattcaagcttgccaacagctatcgggttcgcctttggcaaaggagatgcagcgaagcaagggttggagcaccccggagcaatatagctggctcttcgcttctgcttcatcctccgggagccaaccgttcttgaggtattttacgaacggggttcaccagtcctttaggtcttcacacagctctgcctggtcgattgccatgatgtccaggatctctatgggcacacttggtgcgtacaggacctcaaaaaagatgtctggcgaatgcgggcctccacaagcagtagatttcgccagggcgtctgcttcttcattctggcctctaggtaagtgttcgaccgttatgccggcgaaacacttttccatagatcgaacagcctcaagatacctcttcatcccttcttcttctgcctcaaaggatttgtcaacatgacttgccaccaatttggagtcagttcagatgagcaagcaccgaacccccaaagctttcgccttttttaggcccaacagtatagcttcgtactctgccgtgttgttggttgtgtcgaactttagccttgcggtgtactgaatcgacacgccccctggcgaagtgagcactgccgcaacgcctgcccccttgtgtgaccatgagccgtcggagtacatcacccaaggttgttcgacaggctagggttcaagggcgaatgtcggtgtccattcggccacgaagtcagctaggacttgggacttgatggcagtgcgggcgacaaaatgcaagtcgaagggagataactccgctgcccacttgctgagccggccagtaatttccttgccccggagcacttcgcccaaaagatactgcgatggcaccgtgactttgtggccctgaaagtagtgttggagcttgcgcgaagccatcactagggcgtaagcaagcttttccatttcgatgtatcgtatcttcgccccttgcaaagtttcgaagacgaaatacactggtttctggcctgactctgtttcttgaacgagggctgcagtgaccgccactggcgaagctgctaggtaaagtagcaattcacttcccagtgctgggctgaccaaagcagatgtgctctgtagatattgcttcagctcgtcgaacgctgcttggcattcgggtgcccaggtaaattttcccgcgcccagagggtcttgaagaagggcaaacctctttcggctgcttttgagaggaatcgattgagtgccgcaattcggcctgcgagcttttgtacttcacgtacgctcgacggggggttcatttgctgaatggcatcgattttttttggggttcgcctcgataccccttttagaaacgagaaaacccaacaacttgccctcgcgaacgctaaccactcagggtggtcgatctcctggatcaccctagccttgcacagcatttgcacctcggctttcgctgcttcttggcgattagcggacatcttgcgcagcttttgtttccttggcttggcatccggcttgcccgccagatgatgcatgatgaggtctgtcgaaacacctcccacctcgtcggggccccaggcgaagatatcaatgtttttcttgagcacctctaggatgatctcagcttctcttacgcccatgtcaccccccagtgatacaagtcttgtgggataggcgtcgtcgacctgcaccttgatcaccctgccgtgaggggcgggcttcggcacgtgcttcacccggtcatgcggttcggcctcaacattgtgcactgctctgttgattacggccaaatcgccctttgatgtagccgaatgttgaagccccttgaccacgatcactccttcagggccaggcatcttgagcttgagataattgtggtcggagatggcttcgaacttgttcaaggttgcgcggccgaagattgcattatagttgtacgggatgtccacgacgtcgaacagtatttgctcttcgcccctgttttcacctgtgccgaaggctaccaccaagtgtgcttggcctagaacttgaactgcttctccgctaaaaccacgaagccgccggtgcttgggtgagggctaagataggcaaccccatcgtcgaccgaacttcctccgtcgactaggattcgctgaacttcgaagccagtacctcggccaagatagctctatcttgatgtgggaacagcactccttcggcatcttctggcccgaaagagatctgctggttcaaatatcgcggggcccctttgcctgccgaagtgatgttgtgcaccattcacagctgcatcttcttttgccgtcttgacagttgattcggcgggtcggcccttgtaatcacttggattactctgcactgcacatcttgccactgttcggctgggggtgcttgttcttgaataccttcgtgaggcgcttcgactgctgctccttgctgcggccttggatcttgcacgttgccacgctgcagaatgtttcggcattgctcggtggtgtgcgaagagcatccgtggaaggcgcagtaaaggtcttttctgaccttcttgcgaacgggctgttgatggctgcttgcttgctgggcgttgaactccttgcggagtgcttgaatttcttcaacagccatcacggccttgcctacacggtcgtttctgaatttcctccaagtcatgggagcttgacctggccttggcgattatccttggttcgctggctgtggctagcgaacagcgagaggagccgattcggcgacctgtgcttgtgcttgggcttgagcagcagcgacagaggccttatcatactcagcttggattgcttgccgtcgcttggtatcctcttcgccccttgcgtatccgtcaatgatgcgaagcaggtgctcgagtgtctgcggctccttattggcgatttttcttatgagttcgccctcaagcaacacagccgaagcggcgttgatgacgaacgcctcagttatgtcctaaacatggcatcgggcttgcgagaagcaacgtatgtactcccttatcgactctcccggcctctggcaaatgccgagtagatgttgctgcggctttggcttctcataggtgcctcaaaagttaaggacaaagacgtcgcacaattgctcccatgagtaaatgctgttagctagtaaattgaagtaccaagagcgtgcgatgccatctagagcgagatgtattacctttgccttggtattttcgtcaccatgagcggcttcgatcgtggactcgtagatggacaggaactcttttgggtccgtttcgcccgagtatcgcggaatgggtgggaacttgaattggggtggaattggacgaatcttgattcccccacttagcggcagccccgtttcgccccccgtctttctcacggcaccttgctgcggaggaccgtttggatatggcgtggcgaagtgcgatgtgatggcttgcacgtgcagttgggccatagtgttcggctgcccggccctaaatggtgacgcttggtgtgccgccatggatgggtcgaacgaaggctgggtccatgccatggcgatcttgttcggcgcctgattcgctccgaagcttggtgtcggtgcctgtggtcggatggttggtgcttgagtagcattgctgaagtcgaactacggtccttgactccatggcgaaggccctggaccaggaaggttcgatggtagccaactgggtgcaccttgacttgtgtttccctccagctggaccgaaggggttgcttctgaaatgttttagggttggttgagctactgaagaaaagcttggagctgcgcctgcaaggccgaagccccttctgccattgcttgcgacatctgaccaagtggcggggggcgtacttgggctcgaccagccgaacttgtggctgtacaagaagggtcgggtgtactgttgcgaccgaacgctgtccggcgcagtacgctggtgcttgcacagcttgtgacggaagggcttgaatcggcgcttgcaggtagaccttgggtgggatgtccgccgaatattggagaatggggaccgaggcgaccttggcttgccgggccgcttcgtacgcctgctgttgctcttgcatttgacgaagcatgtcctagagtcgcgccatgttctgacgcatggcccccatgtcggcttcagcttgcgcttcgaggttggtgttgacttgtgcggcggtaagcgcggtcgaagttgtagcctgctgcggcgaagcagcttggggcaccaccacttcacttgtcgaaaggatctccgccctggtctggagcgcccttgtcgttgcagccgcctttgccgtatcaacagtgttcggcgcctgccccgtcgaagcggcaggagccgaaggtggtggttgcggcgtaggggccgaagtcgatggagccacaccagcttcggcaccaagcaccgaaggctccgctccctcttcgactgccatctccactcctgcttcactctccttacaccttgcaaccttctcctctgcgaccttcttcggtggcattcgctctcagtggtttccctcagaggtccccacggtcgacgcctgccgcttgtcgaaatgacaaccgcatacgtcgaaagacgtggttactcaatagtggttggaaagcagtaaagtgtattaaattgagaatttttcttgggatccccctattagggtttaggttttacggggaatttatatggtttcccttatgaaagggacatttacatgggtatatagtgtaattgaggtacatgggcctctagtgggccgactggcaaacgctggcccagtggcccctgggcttgatcggctgagatggcctcttgggcctccttgaagttgaacttgttatggcaaagccatccgccttcgccatacattcttcgccatatagtcttcacccaagatgcctccaaccttgtgggataccagcacgatccttcgcccttcgccgtctttgcttgataatctccgccatggggacttcgccctgacagactcgacgtcttgggcttgagcccccactggttgcatggtttcggcaggtccagtcgaagggtttcatgacataccgccaacaaatatagtgattgctttggtgagttataaacactaaaatagatattaattgcttagacgtggtgtttaggtaattgttatccagtaattactgcgtatgccatagtatgtttgaggtgggtgtagaggtggtgacagccctcgagatcacttcagtcctccctgtccgggtacgaagtagagcgacatctaggaacagcgggttgccagtgcctgaagtattgcgttaggattaaaattaagctttccctagacactgtttctcactagtaaatcctctctatcctggcctatcaattgcttggtgtccttggatgaactggaggaagatctgaccacacacgttcccttggatttgatacccttggaatactccgtaggggaagtgctacatcagtatatccgtgcgcttgcggattttatctgtgatcgtaagaaataccaacaagcatttctggcgccgttgccggggaacggttgctgatcatttccgaacctggttcatccttgtatcctttttactttttattctaactctacccttgctatcctagagaagtattcctgtcaaactcttctcaaccatagagcaaactctttttgagttgtctgctcctcgggtcgaattctatgagccacctccttcatcggagcacatttatacaactggctatgaaattcgtcccgaactaattagtatggttagggaaaatcctttttctggctttgatctagaaaatccctaccatcatctgcgagactttgaacaagtctgctcgtgccttaagattcgtggcatgagataagaaactgtgtggtggaaattgttcccgttctctcttcaagagagagcaaagcaatggtacacctctaccgttggatgtgtaaacggtagttgggaaaagttgcgagatagattctgtcttgccttcttcccaattacttgtattaccgccctaccagtagaaattctcagttttaagcagatcaaaaacgaatcaattggtgcagcctggtccagattcactaatttagtacagtccgaaccaaccctgtccttacccgagtatgtgttactgcaacatttccatacgggtttggataaggagtccgcattctatctggacataaccgctggaggatcgttcatgcacaaaacgccgtcggaaggaagaataattttggatcgcattctagaaaatacttccgtcatgacgaaatccaatgaacccagccggaggcatccgtgtccaagatagaggaacctctaatgatcgagccactcgctgaaccatccacttctgctagctcgattgatgagaaggttccagagcagccgaccgtcgagaatgaagaaattcagactccggatcgtgccgcaattatgttcagggacggctttgacgaagactacggcaataccttgaactattttagcaagaggaaaccactcgttccttttcgacctcccaatcctatggaactcgagttcctacgacaaactgtctgggacttaacatccataatgagcgatgaatggctaagggaggcagagctttcatccgaactaattcagataaataccgctccccgaatcattctttgccatttggaagggaacgacatcggtattctctacagtccaactgtcggggccaatctagtttctgagtcttttccattcgcgtatttaagcgataaggcagtgaccccaactgacaaattcttcaaacatccaaacggaaatatcattgaaggatttgggattgtacaagatatgcctgtctactttgaagactgggaggtgatcttggatttccacatctttgaaattcaagatttcgacatcctaatcgggctgcccattgtgcaacttctcattaacacacctcgattagaaatcctcaaaataacattgggagggaatgaattttcagttccattctcatgagcaaggatcgccttgaccgattccctcccagaaattgagtctgtggaggaggttattgcagttctccctcatgagtctctcgaggcccttctggaagatgaggtcctcgatttcatcaaagagtaagcggatcccggtgagactctcgacctgccaatcatggaaccgctacctcgacctccgcttaagcttaaacctctacctccaggcctacaatatgctttcctacacaatgacagagaagctcctgtcataatcagtgacaagctctatgaagacgagactcaatgtcttctcaccatgttgggaaagcacggttctgttcttggctactcgcttcaagacctcagggggattaatcccgcgcttagcacccatcgtattcttattgaccccgagagtactccttctagggaacctcaatgacggctcaataatgcaatgcgagaggttgtaaagaaagagttcttgaaactcctgcatgctgggattatctatcccgtaccatacagcgagtgggttagcccagtccaggttgtgcgaaagaagggaggaatgatggtcattgcaaatgctcaaaatgaactaatcctgcaacaaatcgtaaccggatggaggatgtgcatcgattacaggaaacttaacaaggctacaaaaaaggatcatttcccgctacccttcattgatgaaatgttggaacggctggcaaatcattcctttttctgtttccttgatgggtattctaggtatcatcaaattcctatccatccggaggaccaaagtaagactacgttcacatgtccgtatggcacctatgcataccgtaggatgtccttcggactgtgcaacactcctgcatctttccaaagatgtatgatgtctattttctcggacatgatcaaggacattatggaagtcttcatggaagattttttggtctatggaaagaccttcggtcattgtctacaaaatttagacaaagtcttacaacaatgccaagagaaggacctggtacttaattgggaaaagtgccatttcatggtccatgaagggatagttcttggccatcgagtgtccgaacgagaaatcgaagttgatcatgctaaaatcgatgttatagatcagcttcctcctcctgtgaacatcaaaggaatccgcagcttcttgggacatgccggcttttatagaaggttcatcaaggacttttctacaatcgccggacctctgaccaatttgctagccaaggatgcgccctttgagttcgatgacgcatgcctagaatcttttgaaattctcaaaaaggcacttgtctccactccaatcattcaacctcctgattggactctgcccttcgagatcatgtgtgatgcaagcaattttgctgttggtgcggtcttgggccaaaccaaggataaaaagcatcatgcaatctgctatgctaacaaaactctgactggagctcagttaaattatgcaactaccaaaaaagagctgctcgcggttgtttttgctatcgataagtttagatcttacttactgggagccaaggagataatctatactgatcatgttgctttgaagtacctactcactaagaaagatgctaaaccacgtctcttcagatggattttgttgctccaacaattttacttagaaattaaagataaaaagggagtagaaaattctgtagcagatcatttgtccaggctgcggatcactgacacgcaggaacaaccgataaacgacttcttgagagacgacatgctgatgacggttcgtgactccaacccgtggtatgccaacatagtaaactacatggtatccaagtacataccaccaggggaaaatcaacaaaaactaaagtatgaaagtcgccgtcatatatgggatgagccatacctatatcgggtctgctccgatggcttactacgaagatgtgtgccaactgatgaaggacttaagatcatagagtgatgccatgcctcaccctatggtagccattacggtgcattccgcacccaggccaagatttggcaaagtggtttcttctggccaacaatgtacgaagactcaaaagaattccccagaagatgcacaagctgctagaggcaaggaggaatcactgctcgcaatgcaatgcccctcacatacaatttgcaagtcgagatatccgatgtttggggtatagactttatgggaccctttcctaagtctcgcaactgcgagtacattctggtggcagttgactatgtctccaagtgggttgaggctatgccgtgcagcgccgcggatgcgaggcatgccaagaacatgttcatagaaatcatcttcccaagatttggtaccccagaatggtcataagtgacggaggttctcacttcattgacaaaaccttccgagacctcctacgagagatgggagccaaacacaatgtccttaccatccgcagaccagtggtcaagcagaaacatcgaacaaacatattaagaatattctacagaagacggtcaacaaaatgggaacaagatggaaggatagattgctggatgcactgtgggcataccggacaacatacaagacacccattggaatgtccccatatcagatagtctacgggaagtcatgtcgactacctgtggaacttgagcacagagcatactgtgccatcagaaactggaatatggactttgaaggagcaggagaatggagaaaaatgcaaattgctgaacttgaagaatggagagagaaggcctaccataacgcaaagatatacaaagaaaggacgaagcgctggcatgacaaaaggataaaaatcaagaaattcaaccaggagacaaagtgctaatgttcaactacagggttaagcttttcggtcacggaaaattgtgtagtaaatgggaacgaccgttcaacgtcatcgatacctctttgcacggggcaatcacactccgcgacaattcaggtaatatattcaaggtaaacagtcaacgcttaaagattttccttgagccaaatgaaactttagatgaagaagtggatgtcattgaattaattgattatgaactatgatgatttcatctaatgcatgcttaaaaccctgtatagttgtcatttttgtgcttagattaggttttaatgagcctagggaaaaattggcagctagctggacccactagggttcgtccgaacctgctggttcggctgaaccagggcggcgcccgatcagccccaattttgaacctcagtctcccccgctcatctatagtctgttgtgatgcgcattcgggggtagatcagtcgtatcagacccagaaccctgtccttcctcctctctcccacttttgcaaacctcctcttcttctcatctcaattccattgcttcatcaccctcaattcaccagtggctggcaaatctttgatcccattcatcggctcttcctccaactccacatacaaccttgacggagagccgacaccggtgaatcaattgatcctggtggagcattacacgatggaaggggtgaatgcactgtgggcacaaccccttgcaacagtgccaggctcccctgcgattctggagctgatcggcaagctccctggttcggccgaacccttctcggccccgttcggccccccgttcggtagtgcgatccctctcccctcgccatgtcacaaggacaaaaattcggggggattcgcttgcgcgacggccgacaacgggagaactcgtcttgttgaaggcgcgacgccttttccaaaatgatgagaaggccgctccacctcccgccgagcgctatgtaggcaccctgttcaccaaggcaggggatgaggtgttccataagtatgttacacccaccgctactccatccactccgaaggaggagcgtttccacattcaaggagtgcgaactcctggtggcgggtatggcaagggtttactccggccgttaacagcatcagagaaggagggggcagcggaatcccatagccctccacctatgaaggtgaagcataatttgacaccccctccaattgtgagggctcctggccaatatcaagaagatgaggtgaagtcgccggaaccctcgatccataagctcgccgcacaagtgaagaaactccgcaaggagaacatagagcttagggatcgcaacacggagctaggggtagagcttgctgaatttagaattaatttcaatagccttagtcgcggtttgtgcgctgagatcaagcgcgcattcgtagaaatgggaaaggaaaataagtattacgctaattagatgcttcctttccatgaataacatagtagtaggtgcttggttttatttttccaatcatttaagcacttgctacgaataatgtggctcattggtgttaaccccaatgtttgccaaaatttgttttgtttcatgtttaataaaatttaggttttgaataagtgtgggggagatatctcagcttcttacgtgcacataatctgaaaattacttaatgtctgaacacctggaaggcactgaactctgcagaaaattgcagaggtattgggcaccagagtggttcggccgaaccaccaggttcggccggaccagtgttggccgtagtacctcccagttttcacaagtaagcaggtgagcacgtcttttatctgtatatctccaccatgatatagtactagagctaaaaatttagaaaacaattggttcaagcatatgtgaaagataaaatttccaactaatgaaattcttcatgtgattaaacttgtatattcatcattctcagctgaacttgtgcttgtgaaccaccatccatgtttagcgaaccttatgcatctaagtaattgctttatgtgagatgattcaagatgaagggaatccttgcaactcttgttatgactcttgggaatttgttttcaaaaataaaatggtttaaaagctcaatcctccaattgacttcatcttatacctaccaaggtgtcacaccctgaaaattcaaaatatataaattgttgcttaattggaatttttagaaatgattttaaaaaaaccctagaagagaagatctaattttaattaataaattccaatataaaatggggccagataaaatttcattaaatactttgcttaattctataattcctagatttttctgggatttatttgagctaaggaagtatttttaataaatggaattgcatttcatgaataatttaaattgaaaaaggttttttaaaatcctcttttggctttgggccgaaagtcggcccaaaacccttttctccctccccggcccaagtcggcccagaccgcagccgccgagcgcgcgcgttcggtcgctgacaggtggggcgcacctgtcggacccatcgtctacctccggccgccgccgcccgaaaccctagccgagccgcgccgccgtccccttcaaaatccggctgctcctttccttctccggtgaaatcttttgaggggaaacaatctccgggatctcctccaccttttctcttttggaatcatcggcttaatcgttttggaagttcgtcgattcgaggtcgaatcggatcggtctctttcctccgaaccccgaggtttccttcgcgtcgccggttgccgtgggccttcgccgccgcctcctagcccctttaaaaggatccccaagctcttctctacccgtcgccactctcgccttcgcctctcgtcgtccgtagcgccctagcgtcgtgtaagctagcgccgccgtcgtcgccgccgctccagccgtgcgccgccgtcactcctgttgtcgccgtcgctcggggaggtcgccttcgtggtcgccgtcgcatcgccgtcctcgtccgccccttcgccgtcgctgaagaccgccggagcaccgtcgccgtcgtcgagccgaaggtctccgccgtttcaacctcgtcgccgtcgccgtccgctgctcctccgccgttgctttggtcaccggtgagttcgccgcgtcgcccgcttcgtgctggtgtcctccgttcgcgccgcagcgccgtcgttcgccggcgagcatgcgcgcccgagccgcccgagccgccaccggtgatgacgtcaccgctgacgtcatcgggactgtccgccgtgagccggccgtggaccggttgatctcagccgtccgttttggatggatcaatctcggccgttcgtttccgtgtgccgccaccgtgcgcccggtccaccgcaaaccctagccgctgacgcaataaatcccttttttcttttcaaaaataattcattattgcgtcataattcaattaaaatcaatataagtgttttaatccgattaaatcttcaaaaattcataactaattcatcttagctcggatttagttggttcaagtctctaaatttttctaaaattgagatctacatgttaaaaatatccacatgtactgttcatgcttgtttatgtgctgttttggtgattttgctctttcctgcttagattctgacgtttccggagagtccgttttcgcaggagaagattttgaagagttctaaggccagcaaggcaagtcacacagatcccaaacaaccctttgagcatattgatcccgtttaaagctattgtttcttttcaactattgcatttattttcaaatgtcattgggtggaattaacctattgtttgttatagcccttttgttctggattactttattccttgatatcttgggttattataacttgactagttgagctctatatgttggttcaactagatgtattagatataattgcttagccctgcttagaaactttagcacactattgggataactttatgactcactattatttaatgatggcttattgatagttcacgatggtcagtcgtgattggttaattaattaatgtgccaactaaaacttgataatggtgggttgtgagcacatggttttgagagtcgtgctcatgacaattaaggaccggttcacgagtttcggttgtgaaacattaaccatgccaaccacaagccaacatgggcaacggctttatcttttgtatagcatggttcattgcggggcaccagactgagaagtggcagagataagcccacgggggtcactggggagtccatgccttgtttataagggggtgattatgatccaggaaaggtgcactgtagtggattgtgttgtgcaaggggtattgtcacaactcctttccgaggtaccgtggtggtattgaggcacatggtgacatgatgtggagttgtgtcttgtgggtacagtggtacacctctgatcagagtaaaactattcgaatagccgtgcccgcggttatgggcgggtctaacaatgtctttcgtgattagtctcacacttctcaccataataaatgatgctttaattgataataatttgattagctcctggtttggaatggtatattcctggtttggagatagatctgtacagccgggtatggttgttcagaatggttgggcctatacaacagggtatgttgtatagcgttggattaatattgtttaattattacttaacagtttcattaaattctgaaatgtttattaaatgctgtttatgcaaataaaaccctactatgccatcctttgttatcctgtgcacttgcatgtttgctgcgtggcttgctgagtatgtcatatactcaccttgcaatcattcatcagaggaagagttctacaatgatgctgatggtgtggaggattaggtgtagccctggtcaagctgcctgtggagtggagtcgtctgcgccgtttatcttattttccgctgcttagatctttattgattgagaggaactatatacctctgtaatgatattttattcgcttattaattagaataataattgtactctattatcaatttgttattgtgtgcctcggctgattcctggacgagggattcacacacatgtaagcgtttggaattttggatagaaattccgggcgtgacaagttggtgtcagagcccccttgaccctaggttatgccaaatggttacccatagaagccctctaaaaattattggaaaagtagaactgttctcctccccttctcttttaattaaaccaaactaatggcacatgcacttcataatctcttttaatggttctcattcaaaatctattccagtgttattagtactgtacatctattactgtactaatggctcattttaccagcaaaagttttacaatattgttttatttaatcttgatgcaaggaaataaatttagcatgttatttaatcttttggaacctgttgttcaaaagtacaaaatttgtaaccctgtttccaactgtttcaacttatcttgcaagcttggtttattttatttacttaccttttactttgattttctaactttattcaaattaatccaaaaacttgtgctattaattggataaatgtcttaactccctcctttcacttgtctttagatgccgcgctacaagcctgagtacttgtttggtgttgagggatttgtccaggagttgcgtacgatgtcctttgccataggatttgggactgctcctttttatgctcagattcctcatgatcgtcatgaagagaagtgccgagtcaaagtcaccttgaacagtaatagtgaagatgtcccctcagtgatgttcgaagctagaggaagaaactacaccatgcatgtcaggaggtggcaaggatcgccataggagagctccgcgatcgctatagtgatcagttggccgacactgagtatcgctaccatcctcgccaaccccagggaagtgaccgtggcagctacctagagactgaaggaattgagaatgatgctaccacaaggcatttggttgagatgctgtgggctgtggatgaaacccgtgcggagactgtattagcagctcaagatcgtgaagaccggaatcgtggaaagatttgcaagctagaggacaaggtggatcgtttggagaaggaattagccgcattgaagggagaagcaccaccgcagaaggccaggattcgtcttaccgcaaggaagagagctctttttgtccctcgctaccaattggcgccaaaggtccgtgtggtggaaaaagaagttaccccagttctagtagatcctccggtcatcaacgtaagtgatgatgaaggagaagaatcgaagcacactcattccaagattgagtggagagcaactcaagatgatgaagacgagccgaacgagccttcaatcaactccgatgcccggaagaactagaatgccatgtcaagccgttgtcttagatcgttgtgttagcttgtttgtttaagtttggttgtgtgggtcttgcgtgtaatttacatcagtggtgggatgtaagtgcatgcgtttgtttgcttctgagtgttaggaagttggtgagtttagtggtgtgagagtcttcagttttgtaataatgaaactcacttaagatcaataaaagttaaagtaattctctgtcctaagtagttttccccggtttctcttcttgtgtcctgcccatgccagatggtgctcactcacagcaatgggaatggcccccaacaacaataacaacaacaacaacaatggagagaatcccacacttgcccaagtcctggctcaacagacacaacttatgaacatgatgatgcagcaactccagaaccagcagaaccaggggaataaccatgcacctccccagaacaagttagcagaatttcttcgtgtgaggccgcctattttctctagtaccactaatcctgttgaagctggtgattggctgcatgccatagagaagaagttggatttgcttcagtgcaccgatcaggagaaggtctcatttgcatcacaccagttgcatggccctgcctctgaatggtgggatcactttcgccttaacaggactattgctgaacctatcacttggcttgaattcaccgctgctttccggaagacgcatatagcatcgggagttgtgtctctcaagaagaaggaattcaggtcgctcactcaggggtctcgctctgttacggagtatctgcacgagttcaatcgtctggctcgttatgctccggaagatgtgcgcaatgatgaagagcgctaggagaagttcttggaaggacttaatgatgagctttcttactcactcatgactggggattatcttgatttccagaagttagtggataaggctattcgtcaggaggacaagtacaatcgcatggaacagaagaaacgccggattgctcaattcaagacacaacaggggaataatcaaagaccgcgtcttactttaggaccccaatccatgccacagggaggttcttcgtctgttgttcgtccgcagcgtcagttcttcaacaacaatgctggcaacaacatccgtaatcaagctccacgccctgttgcagcttcgacacagcaacaacctgccaagaaggagcaaggcagcaagcccgtggtgtgtttcaactgtggagacccaggacattacgctgacaagtgtccgaagccccgacgcgtgaaggttgtccctgcccagagcaactctaccgcaccagcgccaaaggcccgtgtcaatcatgttgctgctgcagaagctcaaggtgctccagatgtgattttgggtacgttccttgttaacttagttcctgcaacagtgcttttcgattctggtgctacacattcattcttatctatgagttttgcgggaaatcatgggatggaagtagaagatcttagacgtcctttgatggttagtaccccaagtaatcaagcactctctttgcaacgtagcccctctgtcagaatagaaattaaaggagtaccatttctggccaatcttatcctgttagaatccaaagaccttgatgtcatcctagggatggactggttagccagacataaaggtgtgatagactgtgccaatagaaaagtaactctcaccagcaatgatggtcgagttgtaactgttcatgcattgtcttctgagtttttaaggtcgagactgaaccaaataactttggaagagattcctatagtccgggagtatcccgatgtgttcccagatgatttacctggtatgccgcctaaaagggatatagagttcagaatagatttggtaccaggaacaactccgatccataagagaccttatagaatggcagccaatgagttggcagaagtcaagaggcaagtagacgatttgcttcagaaaggatacatcagaccgagttcatctccatggggagctccagttatttttgtggaaaagaaagatcatacccagaggatgtgtgtggactatcgtgcactaaatgatgtgactatcaagaataagtatccgttgcccagaattgatgatttgtttgatcagcttaaaggtgccaccgttttctccaagatagatcttcgatcaggatatcaccagttgagaatcaaagaggaagatatacctaagacagcttttaccactaggtatgggttgttcgaatgtactgttatgtcttttggactcaccaatgcccctgctttcttcatgaacttgatgaataaggtgtttatggaatacctagacaagttcgtggtggtctttattgatgatattcttatctactcccgaaccaaagaagagcatgaagaacatcttcgccttgcactagagaagctacgaggacatcaactgtatgctaagtttagcaagtgtgaattttggttgtctgaagtgaagtttcttggtcacgtcatctcagccggaggagttgccgttgatcccagtaatgtggaatccgtaaccaactggaaacaaccaaagacagtttcagagatccgcagtttcctaggcctcacaggttattatcggaggtttatagagaatttttccaagattgctaagcccatgacacggttgcttcagaaagatgtgaagtacaagtggtcagaagaatgtgagcagagttttcaagagttgaagaatcgcttgatatcagctcctattttgattttacctgatccaaagaagggtttctaagtgtactgcgatgcatccaaacttgggttaggttgtgttctgatgcaagatgggaaggtggttgcctatgcatctcgtcagttacgtccgcatgagaagaactaccctactcatgatcttgagttagctgcagtggttcatgcgttgaagatttggcgtcattatcttttcggtactcgtacagaggtatataccgatcacaagagtttaaagtatatctttactcagccggatctgaacatgagacaacggagatggttggaattaattaaggattatgacatgggaattcattatcatccgggaaaggctaatgttgtagcagacgctcttagtaggaaaggctattgcaaagctacggaaggatgacagttgccattggaattatgccaggaagttgaaagattgaatttgggaattgtccgaaggggtttcgttgcagccttagaagcgaagcccactctaattgatcaagttagagaagcccaaattaatgatcctgatattcaagaaatcaagaagaatatgagaggaggaaaagctattggtttcttggaagatgagcaaggaactgtatggttgggtgagagaatctgcgtccccgacaacaaagatttaaaagatgcaattctgaaagaagctcatgatactttatactccattcaccctggtagtaccaaaatgtaccaggatctcaaggaaagattttggtgggcaagta

SEQ ID NO: 29443 - DNA, 567 bp, Oryza sativa
ggcgtgacacgaagatacacataatctccttcttcaaaactcaaatctctgcggcgattgtcggcataactcttatgacgagactgagccactcgcaatccttcttgaatgatctttaccttttcttctgcttcccttaggatatccatcccgaaaacctgacgttctcccgtttgatcccacaaaagcggagtgcggcacttccgaccatacagtgcttcgtaaggagccatctgaagactagcttgataactgttgttgtacaaaaattctgcataaggtagattcttatcccaacttccaccgaagtctaaagcacaagctcttaacatgtcttccaaaatctgattcaccctttcggtttgtccgtctgtctccggatgataagcagtactaaagttcagcttagaacccatctcttcctgaagcttcttccaaaaatttgaagtaaactgactgcctcgatcagacactattttcttagggacgccatgcaaacacacaatccttgccatatacaattccgctaactgacttccggaataggttgtctttactggaatgaaa

SEQ ID NO: 29444 - DNA, 1925 bp, Oryza sativa
ttataaaaatcccatgagtctgacagagaagcaagaaggactgaaatcgagatcattccatttatcaattactcaagatggtaagatagccactgataaagttcacaggtgcaggtatggttttgaatgatttatatgcttgatttatatcttgaagaaattcattctacactaacctttactcagggacgagcaaagggctaagtgtgggggtttttcttggcggctgttaaatgttgattctataccgccaacatctgcataaaattcagataataaaacattcaacatagtgataggtgcttaatctcacatattctacaagtgttggtgtatatttgtatgaagatgataaaccctaagttggaaggaaaatcggactaaagtgaggagaattatgtatccatacaaaggagaggttgtgaacttcatcgaaacatcagtaaatcaacccaaaaattcgagaaagagacagaggaaggtcctaggagtctaccgaccgaaggccaggccaggagggcccagcctaggttcggccgaaccctggtgatcaccgttgatcccaggttttggcatgggcggtcttgatcatctcgtgatggtggttgcggagcatttccgacaattcgcatagtacaaccgtaatacctacctctatataaaggcttcactctctcacttcacacacacacttccaagtttgagctgaattataagaggctctattgtactatattgtataatggaataggaagagagtagagtagaagaagtcgggagaattccagagttgtcggtaatcttctcctacttcttttattctgtttattactatgaattcaatgttatattcttcttgagtaattttgatttattttgtgagaattatctcttggttagttcctaagtagcatacggtattattgttcacaataatcaactaaaatgtttattactctgaattcaacgtaatattcttcttgagtaattttgatttattttgcgagaattatctcttggttagttcctaagtagcatacggtattattgttcacaataatcaactaaaatatagtgattgctttggtgagttataaacactaaagtagatattaattgcttagacgtggtgtttaggtaattattatccagtaattgttgcatatcccacagtacgtttgaggttggtgtagaggtggtaacagccctcgagatcacttaagtcctccctgtccgggtacgtagtagagcgacatctgggaacagcgggttgccagtgcctgaagtattgcgttaggattaaatataaactttccctagacactgtttctcactagtaaatcctctctatcctggcctatcatttgcttggtgaccttggatgaaccagaggaagatctgaccacacacattcccttggattcgataccctttgaattctccgtaggggaagtgctacatcggtatatccgtgcttgcggattttatctgtgatcgtaagaaataccaacacttgctgagtattgtgaatactcatccttgctcaatttcacccttttttagatctgggtcaagaggaggacccttatgactactactatgatgacttcgataatttagaaaaccctcagagtttgttccttcctagtcaaactttattagacttccgctgtataatagtaaccctatgtataattagttagacaatcagctttgtaaatcccaagtattgtaaactttacctatgcaatgaagaaccagctgtattatatgtatgaattatttactaatccagggcttgatacattaatcatggtcggatccaagtcattagttttgggacccgacagaactggtatcagagcatatgtttgactataggatgaaccttaaggatttctaacaaagttaagtttgaatttatt

SEQ ID NO: 29445 - DNA, 737 bp, Oryza sativa
  unsure (1)..(737): unsure at all n locations
aggtgctcttgcggccggtgatcttctggctgcgccagacgcgncgacgcttgggcggcaagacctctccctgggcgatcttgagctgatgcagctgcgcctccaccgcgtctaagtccttcttgagctgcaggttctcctgacgcagctccaggatcttcagattgttctcgaccatcccacggcacaccatctgatggaagtcgatacgagccgcgtcgtacgcctccaccatgcgcgccaggtgtacgatggtagcgtcatcctccgagctagcatctcggaaggtggcgtagtcgcgggctcctccgcgacgagggtggtagcggtagggcgagtgctgcaactcgtccgggtagcgctggtgaagagtgccgatggcgaggagagcggcgctctggcaagcggcggggaaggaatctccacccgcggtgactgccagcgaagtccgctcgggagagccagcgaggatcactgcagtgacctcccaaccagcgtggggctctgcgtcgtcaccctcctgctccggaagcggcctggcctggtagtccactccatgtggataccccaggacaacgcacataccccgcagctccaagacgaagccagtcatgtccaaaccacgacgggtgacgctgccgaccatctacaaacaaaaccaaaaaggaaaacaacattttaaagatcagattttggcgataaatgaagcagcaagacagagagagactagacagttt

SEQ ID NO: 29446 - DNA, 1387 bp, Oryza sativa
aggtgatgagaatattcccaaagtctagagttgtaaaaccacctaatgttgcccaattaagcggcgaagcatctacctaaaatcatactagtggtaccatgagtagagtgtccactagttggggttttgtttaatctagggtgaacaaggtaataatatcaataacaataataataaggtcataacaaaggtaaataggcatggctaaataaaacagtgataacgcgggaatttaagtaaagcgataatgcaataatttaaatcaacataattttataaactgggattcaatatgttcaaggatgatgtgacttgccatgctcgctttcccaaacgtcggcttcaacttccacaaagagcggatcttccgaagctgcagcgtctacacgaccaacggaaaagaaaaggcttttactctaataaactccatataacaagcaggaacaaagcacaaaaatgggttcttgacttcttaaggaaaaattagagacttgaacggtccaattctgagttcaaatggccaagttatggccatttgaagtttatatgctctttaaataaatatttgcgaatttcttcttttaaaatttaattttaaaagggtttattgcgtcagccgaggggagggggcgcgcggaccgggtccacgggagtggggcccacgcggcagcctcacggtccacggtggaccgggtgcactcgggctcacaccggccagcgccgtaggtcccacgcgtcagccgcacccgaaggcgcgggcggctgacggctgggccccacgcggcagccgctcggtgcgcccgaaggcggccacgtcggcgcggccggcgggaggcggcgcgcccgcgcccctatggtcgccagcggcggccatgggcacaacggagcggcggccgagagaggggagcgaaagggggaaacgaggcggcggttcacggctcaccctaggtcgacggcgacgacgaaaaggcagccggagcggaggaaggcggcagcacggctcgggtcgacggggacggcggcgctccggcggtcgacgagcgaaacggaggggtggacgaggtcggcgaggatgcggcgaagccgaaggaggcggcgccgaggtgggaggtggtctggggcgatgacggcggcagaccggagctcggcggcgacggcggagagagagagcgacggcgcgagctcgattccggcgagaggcggaaacggacggaggaggtgcgaggagggtttaaatagggtggaagggggagaaatcggccggcagggaaagaataagcgcgggaggtccggccgccaacaatggcgccggcgagatttgcgggagcaaaaccgcccgtttgaacgcgagagagaaagggaaaaatggggggaaagggagagggga

SEQ ID NO: 29447 - DNA, 26052 bp, Oryza sativa
tatggacgcaacccatgtgtagtccccaaacaatccttgggagcatccttctcatacatgaaagtggtgctggtcactgataaagcatcctcctcaaagatatgtggacgacttaggtcatcatcatctagctccaaagctgcagcaaactgtgccatagaggtcttgtactgctgcccctgaatggtccacttcacaaaatgaagtcccttcctggtagtgccgaagaaagcgatggagtagaattgaccaattacttcctcattccaggaatactgcaaggccaacagatctgccacatgcttgtgcacacacaccttgcgcacctcattgaataccaagttgttctttgaggacatgtactgccagtcaagccacttcatctctaccactggatgagatcttcccatgatcactgaattataccaatcaacctgcaccaaggtcctgaatctgtcatcctgagagtcaacaggcaatgtgtcaggactgaccatcctatcctttgcacactttagcagattcttcagatagttcaccctctgacgcctaagggtaggatcaaacaacctcttctggaaaaagctcaaaggatggctctcagtcccaggctcattctcattttcatcaatatctgattcaaaggcaactggagaggaggaacggggagcatcacgaatgacaatgctagcagccctcctagtttgaatcggaatttgactcccactgtaaaaatctccaaccttttctttgcccaatcttctcctaggaccacaaaccggggggtctcatgtcagcgggaacatcctgtgaaagcttctggcgcttctctcgagcatactgaccactgcaacaagaatcaataagtttggagtgcaatggttaaggaaaaataggtggaatcaaaggttgcaggctggctggattgagaccggaagttccggactcatgaacaccggaacttccggcctgcaaaactgaagaacagtggattcaaacaggctagtgcatgtgataaaatcctatagatcggcaatctacaaggtagcaggaacaattctatccaaaaggttttctccctaggttcacatatttagagatcgaggcaaaaacatgatgaaccaaaagagaagatcaaaaaggctaccttgagtgaggaaatcgcaaatcgatcgcgggaagaacctcctagccaccaatgtggttgattccacggagaggaatcaaatttccacggttggaagtgaaaatcgccgagaggagcactgtagcggcggctagggtttgggaatcggggaggagaagaagtgaggagagaggtgatagtctcgggctccccctgggtatttatacccccgacccccggaagttccggactggggtgaccggaacttctggcctaacagaacagagggcagtcaggcctaagttcaaaggaatagatgagaattcaacgattagaaatggaaacctatggacaaatagagacttatgatgcatatgaccagccaacaatcaacaaaacataacaatggtcaatacacatcacaagaggggaataaaaaccaaatttttgcaagaaaaacacacacaagaaattttcgcaaaattttcacaaaagagtttttggatataaggggaatgtttgagctttattcctggtatcaagaccatcttctacccaagaagtgatctcaagacacaaaagctctctttttttttaatttacattttagtgatacatgtttggctatgaattagccaaccacccatcacctaatgttgcgagaatctaagatattgagctcactcctaagctcgcaaaatcttttctcatctaaaggcttggtgaaaatgtcggctaattggctttcggttctcacatgggtaaggcatatgtctcctttagtctcatgatctctcaagaagtgatggtgaatatctatgtgcttggttcttgagtgttgaacgagattgttaggtattttgatggcactctcattgtcacataggagtggaatcttggagaagttgtagccaaaatcttttagggtttgtttcatccaaaggagttgggcacaacaagaaccagcggcaacatattcggcttcggtggtggataaggcaatggaattttgcttcttagaggaccaagaaacaagggaaggaattgacaagtcccgattgtgctttttctatcaactttacaccctgcataatccgaatcagaatagccaaaaagctcaaagtcacaatccttaggataccacaagccaagattaggagtatgaactaaatatcttagaattctcttgacggcaatcaaatggcactctttaggctccgcttgaaaatgggcacacatacaaacactaagcatgatgtcgggacgagatgcacataagtaaagcaaagatcctatcatggaccgatataccttttggtccacacttttaccattatcgtcgaggtctaggtggccattagtaggtatgggcgtcttgataggtttggcatcctccatcccaaacttcttgagtatgtctttcacgtacttagtttgagagatgaagatgccctcttgtgcttgcttcacttgtagcccgaggaagaaggtcaactcgcccatcatagacatctcgaacctttaagtcatgatactactaaattcttcacaaaaagaggcattagtagaaccaaatattatatcatcgacataaatttggcatatgaataaatcactcttaaattttttagtgaagagagtagtatccgcctttccaatttcaaaaccattttttaaaagaaaatcttggagacattcataccaagctctaggggcttgtttgagcccgtagagcgccttgtggagcttgtacacatggtttggcaactttggatcctcgaaccctggtggttgctccacatagaccaactccgagataggtccattgagaaaggcactcttgacatccatttggaacaatctgaaattatggtgagcagcataggctaaaagaattcttattgactcaaggcgagcgacaggtgcgaaggtttcaccaaaatcaagaccctcaacttgggtgaacccttgcgcaactaaccgggctttgtttcttacaaccaccccatgttcttctttcttgttgcgaaaaatctacttggtgcccatgacgtccatacttggttgcgagtgaagttattcaactcctcttgcatacccatctcccaatccggatcaccaagcgcatcttccaccctggttggttccaaagaagagacaaacgagtagtattgacaaaaacttgtgacacgagagcgagtagttaccccttgtcttatgtcaccaagaatgttgtcgacgggatgatctctttggactatgtgatgtatccttggatggtgcactaaggggacatgagcctgatcagtatgctctaaagtgcccgcagcatcgatcccatccacttacgccgttggcacgtcttcactgtcactggtccggaggttccggactggataacccggaacttccgggcctggagatgtccggatgttccggtcaataggacccggaacttccggctctcaataggacccggaacttccggctcagcagacacagcacttgtagggctattggatgtcgatgacggaggttgatccctatcttcttgttcatcctacgtctcgacttgtcgtatgtctccaatagccttggtacctatagcttgacttggatccacatcacctacaacatgtacaacaacttgctctccttgggagccattagattcatcaaatgtcacatccctagtgacttcaacaataccagaggttttgttgaagacacgataggcatatgcatttgattcatagccaagtaagaatccctcatccaccttaggtgagaacttagatgagcgagacctcttactcaaaataaagcatttgctcccaaagacacgaaaatatgaaacattaggcttcttaccactcaagagctcatatgaagttttctttaggatcttgtggaggtaaaagcggttgatggcatgacatgcggtactcacggccttcgcccaaaagacatccgaagtcttgtactcatcaagcattgcccttgcggcttcaatgagggtttgattcttcctttcaacaatgccattttggggaggatcatagggggcggagaactcgtgcttgattccttcttcatcaagaaattcttcacttgagtgttcttgaattctccaccattgtcgcttcgcaccttcttgatagtaagatcatagaggttttgggcttgctttgcgaaacgcttgaagacatcttgagcttcgcttttgtcatggagaaagtacacccaagtgaagcgtgaaaaatcatcaacaatgacaaaaccatacttgttacctccaatgcttatgtaggccatgggcccaaataagtccatatgaagaagctcgagtggtcgtttgtagtcatgatgttcttgataggatgtggacttccaacttgcttcccggcttgacaagcactacacacacgatcgttctcaaaagaaacattagatagaccaaggatgtgttccccttttagaagagatgccaaattcctcattccaacatgggctagcctacggtgccatagccaacccatagaggatttagcaatcaagcatgcctccagattcactctatccacgtcgaaatcaatgagatagaggtcaccttttaacacacccttgaatgctatggatgagtcatctcacctaaaaacggttacatccacatcggtaaacaagcaattaaatcctaacttacacaattgagaaacggataataaattgtagcttaaagaattgacaaggaggacattagatagagattgattcttggaaatggcaatcttaccgagacccattacctttcccttaccatcatctctgtcgcgaccgagaaaaatacattttcccgaacgctagtgtattaatccccgtcccaggaaaagccggggtacaccacacaaacatgatataaaagacacatctttattatatcgataatatttacattattacaaaggcacttaaggcctgacaatcaaaaataaacagtagcggactagcgggcctacggctccatcttcacaggcgctcaactagggtataagccaggactccacctacgacatcttctccaaagcttctcttactgaagggggggaaagattgagcaagaatgagtacaaccaccgtactcagcaagccacaccggagatgcataattaatgcaagggagtacaaggggataataatataggggttaagttttgcagtaaacagcatttaaaagtcacttagttgcttaaagctactttgtaaacacggtcctagagctatacaatattattaatcaaggccgtgaacccacatgaacctgccttaacccaaggcctacgatgattcagaccgaactggcaacccgaccctgggtcccagctcgtcccaagccaacccaggccaaccattccacattttagttattacgcaggttttaagaatttaaaacactaacttgggtacattgctcggcttgcccataaccgagggcgcgactattcgaatagattatactctgatcagaggtgtacatctttacccacaagacacatcttcctcacgtgtggccacgtgccacataccaccacggtatacggacggaagacgtgacatagtttccaacccatcctagccatagacaagagtaccgacccaaccccacctacggccggaacccccgggacaggtaggcaggactgagcccctagcagcaggacaccggccctgtgccatgacatctcgactaccgggccgcagctcgtgtagccttcatttgtcctagagatgtccatcgacccccgacttcgtccatctccatccgtgtacttttgtttataaccagactcagccacaaactaagccttacccactagacatgtggaagtacggtagtgctttgcaacagaggcccgagcttaatccttatagtacccgaggtacgactaacaaaacccaaccacgcacctcgagcccagcctaaaaccattttgggggttttgaatagagggggaggtgtgtgtccaattccaacataagccaaccattccatagtgtccaaatgatatgagaattcccaaagtctaaagttataaaaccacctaatgttgcctaattaatcagcgaagcatctacctaaattcatactagtggaaccatgaatagagtacccactagttggggttttgtttatcctagggtgaacaagataataataacaatagcaataataataaggtcataacaaaggtaaataggcatggctaaataaaacagtgataacgcgggaatttaaataaagcgataatgcaataatttaaatcaacataattttataaactgggattcaatatgttcaaggatgatgtgacttgccttgctcagagagaacggccttccgaaccttcggcgacgaccacgaaccacgcttcgggaacctcaggaacgacagaagctacgtgaagcacacaagcaaagctacaagcctataaagaagcaataacaatgcataaaaagaaagcacagggttctttaggttataacaaacattaggagacttgaacgggtcgattcggagttcgtatgaccaagatatgatcatccgaagtttaatgctgttacatggagatttgcggattattataattaggttttgcaactataaaacatgtgtaagcgctagcctggaaaagataggaaggctgcgccgttgacatgcggaccccacatgtcaacctaaaggaccgcggtagaccgagtacacagagacggtccacgggtcgacagaagcagatcccgtgtgtcaaccgaggcgagtggccgacaaacggactccactagacaccacacgggctgcacacgtggaaaccacgcggctaccgagcgggcacactaacacggtcaccacacgcacaagcgaacgactaccgacaccggtacacgggtaccggggtcgacaaccgcacaacgggcacgggcgacaccgaaaggacgaggacggggcagcgagaggagagatccttaccaccacgcgacgaggcgagggaacgacaacgacgaacgggcgcggcggagacggacggcgagggaacgacttcagcggcgatccttggacgaaggcgagacgcggccgacacaaggcttgacgacgcggagccgaggacgaagacgacgacggggcggcagcgacacacttgacggacgcggacgacggacgagaacggcttgacggagggacgaacgccacgacgaccgggaacgacgagaggacgacgacaggaaccggcgaggaggcgatgagggcagccggcagcagctgcacagagacgaggacggcgcggaacacgccgctacgatgatgacgagggtggcggcgcagcgagacgacgagccggcgaggacgaacgaccgatcggaggagtcgtcaacgaggacgaacggagacgacgacgatggaccgcggaggggttcggtcgaaggggaggcgaggccgagggcgaccttgccgctgcgatgccggaggtggagacggcgacgtcggccggcgcactggcacggcgaaaggggctgccggagtgggtgccgacgagaccgagggagaggcggcgcgcgcgacggcgttccgacgaaatacgggcgacgccgtggcttggccggggaagaggatggcgttccggtgccgggagaggtggtggcgacgtcggccggcgcacaggggacgcggcagaggcggccggaagcggaacagtggcggcaacgccactgttgccggcggggatgcacttccggaggtcttcgcgggaaacagagggcaggccggcgaagaggaggcggctgcgacgctggaggaggcgacggcacggccggccggcgtgctaacgcggcggcaggggcggctgaagacggccggcggcacgggagagaggggacgacggcggggaggtggctagggaccacgggagatcgcgggagggggctaaaacgatagaacggagcgaggggattccgttttatagcggagggaagcgagccgagcacgggaggagcggggaacggcggcggaaatggcggccggcggccatggaaggcagccgaggaaggcgcgggcgttcccgacgattgggggcacgaatcaagggggaaattagggggaattgaagaggaaggaaaggggattaattcccccttatcaattttggaattcccggtttgaatcgcgtggatttaggggaggaatcgacgctaggtttcacgggagagagaagagagagagaggatgccgggcgggaggaaggagacgaccgggtgggtgggacccactggtcaggcgcgcgtcgtcagcgcgcgcacgtgcgcggcacgggcgggagggcgccggtcggcttgggccgggcggccggcccaggaggagaggagggggaggcggcctgggggagagagggaggaggagggagtgggccgaggggaaggagaggaggcccaagagaaggagggagaggaggagagggagaggaatagagggaggaagagaggactttggccgcaggccgagagagagagagggaggttttgggccagacttggcccaaagggaggagggggattatttttaggttttctttttaataaactttgataattgttgttgttgtttaataaatatttccggtgctctgaaaattcaagtaaaatttgagggctccttttagaccaaggagaatttaacaaaaattctccgaaccacattcgaatttttcttgtacgtattttagtgtttgccaatttcttttcgaattttaattaattctattattccttttagaaaatgatttttatttcgggatgaatttatcaggacgtgacaatctccaaagacaatattttcacgacttccaccttcctcatcaagacttgtaaacatactcctctctcccgtcatatgattggtgcagccactgtccacaacccaacttgaaccaccggaggagtacgcctacaaaaaaaatcaagcttgggatttaggaacccaaacttgtctaagtttgggtcccttgatgttagttaccaaagcctttggcacccacacacaagtgcggtactcatcattgtaattcccattaaaataagcaaccaccttgccctctgaatttttggaaattacatatgaatcatagtaaagaccctctggccggaacttcctggtattatacccggaacttctggtcatccccttcggcctatcagaagcccggaacttcctgtcaaaatgtccggaacttcctgtcttacagggcaggaacttccggtcattttgtctggaactttcggttgtctgaccaatgaaggaatgagtcacctcacttgcttgtggagctttaccttctctcacaaacatcaagaattctttcccatttaccatcacatggttagacacaggacttccatgtcgcgaccgagaaattttgcattttcccgaacgctagtgtattaattcccgtcccaggaaaagccggggtacaccaaacaaacatgatacaaaaggcacatctttattatatcgataatatttacattattacaaaggcacttcaagtctgacaataaaaaataaacagcagcggactagcgggcctacggctccatcatcacaggcgctcaactggggtataagctaggactccacctaagacttcttctccaaagcttctctattgaaggggggaaacattgagcaagaatgagtacaaccacagtactcagcaagccacaccagaagatgcatgattaatgcaagggggtacaaggggataataatagggattaagttttgcagtaaacaacatttaaaagacttttagttgctcagggccattttgtaaacacgatcctagaactacacaatgttattaaataaggccgtgaacccacacgaacctgccttaacccaaggcctacgatgattcagaccgaactggcaaccaaacccaggtcccagctcgtcccaagccaacccaggccaaccattccaaattttagttgttaagcaggttttaagaatttaaaacactaacttgggtacattgctaggcttgcccataaccgagggcgcggctattcgaatagatttactctgatcagaggtgtacatctttacccacaagacacatcttcctcacgtgtaaccacgtgccacataccaccacggcatacggacgaaagacgtgatatagttcccaacccatcctagccataaacaagagtaccgacccaaccccgcctacggccggaacccccgagacaggtaggcagtagggatgaaaacggagcggatagtttccgtccgctccggacaaaaacggatacggatacctttcggatcggataattctcggatagttcggatatggatacgaatacagatattttctcccggatatgaatacgaatatggtaccagggtttccgtcggatacggataataattcggatatccggtgaacagtgctattcggatatccgcaggacccatgagacataccccatttctttctaactctataaccttcaatatacctttatagattttaatagtagtttatctcttaacactagtccatactattaatattatttaaattttaaaaaatatttataaattataccttattttatataaaatgagctaattatatatgttgatatttgtttccattagaagttgagttggttttcgtgttccaagaaaaatttgtttccgtattcaggtccgatcatattcgattcttattcgtattcgagataatccgtatttgtttccgtattcgagctatccgtattcgttttcgtatccggtaaaaaatatgaaaacgaatatggtatgagcattatccgtccgtatccgctccgttttcatccctagtaggcaggattgagcccctagcagcaggacaccagccctgtgccatgacatctcgactaccgggccacagctcgtgtagccttcatttgtcctagagatgtccatcgacccccgacttcgtccatctccatccgtgtacctttgtttataaccagactgagccacaaactaagccttacccactagacatgtggaagtacggtagtgcttcgcaacagaggcccgagcttaatccttatattggccggggtgctacttcccacaactggcatgcacccaaaccccaccggaaaacaggttttaggggttttgaaagaggaagagaggtgtatgtccaattccaccataagccaaccattctatagtgtccaagtgatatgagaattcccaaagtctaaagttataaaaccacctaatgttgcctaattaatcagcagagcatctacctaagttcatactagtggaaccatgaatagagtacccactagttggggttttattttcctagggtgaacaaggtgataataacaatagcaataataataatagtcataacaaaggtaaataggcatggctaaataaaacagtgataacgtgggaatttaaataaagcgataatgcattaatttaaatcaaaataattttataaactgggattcaatatgctcaaggatgatgtgacttgctttgctcagagacaagggccttccgaaccttcggcgatgaccacgacccacgcttcaaaaacctccggaacgacagaagctacgcgaagcacacaagcaaagctacaagcctataaagaagtaataacaatacataaaaagaaagcacagggttctttaggttataacaaacattaggagacttgaacgggttgattcagagttcgtatgaccaagacatggtcatccgaagtttaatgctattatatggagatttgcggattattataattaggttttgcaactataaaacatgtgtaagcgctagcctagaaaagacaggaaggctgcgctgttgacatgcggaccccacatgtcaatctaagggaccacggcagaccgggtacacagagacggtccacggttcgacggaagcggaccccgtgtgtcaaccgaggcgagtggccgacaaacggactccactagacaccacgcgggctgcacacgtggaaaccacgtggctaccgagcgggcacactaacacggtcaccatacgcacacacgaacgactatcgacaccggtacacgggtaccagggtcgacaaccgcacaacgggcacggggtgacacaaaaagaacgaggacggggcagcgaaggagagatccttaccaccacgcgacgaggcgtgggaacgactacggcgaacgggtggcagagacgaacgggaacgacggagacgatggcgaggggacgacttcggcggcgatccttggacgatgacgagacgcggccggcacaaggcttgacgacgcggagccgaggacgaagacgacgacggggctgctgcacacttgacgaaacgcgggcggcgaacgcgaacggcttgacggagggacgaatgccacgacgaggaggaaggaggaagacgacgaccggcggggaggcaatgatggcagccggcagcagctgcatggaggcgaggacggcgtgggacacgccgcagcgatgcccacgacggtggtggcgcagcgtgtcgacgagccggcgaggaggaacgaccgaccggaggagtcgtcgaggaggacgaacggagacgacgataacgaacaccggcggggttcagatgaaggggaggcgaggccgagggcaaccttgatgctgcaatgtcgaaggaggagatggcgacgtcggccagcgcacgggcacggtggaaggggctgccggaggcgatgtcgactaggaggaaggagaggctggcgcggcggcggcggtctccggacgaagacgggcagcggtcggggtggagggtgacgccgtggagacggggaaggagacgacgatgacggctgccgcaccgatgaggaacagtagccggccggaggtgggaaggtactaaacaccgacaaggagaccgctccggcgagcttcgggcgaggaggaggtgaggccggagatgagggcagcgtcgcggatgtcgcgaccgagaaaattgcattttcccgaacgctagtgtattattccccgtcccaggaaaagccggggtacaccatacaaacatgatataaaagacacatctttattatatcgataatatttacattattacaaaggcacttaaggcctgacaatcaaaaataaacagcagcggactagcgggcctacggctccatcttcacaggcgctcaactggggtataagccaagactccacctaagacttcttctccaaagcttctcttactgaaggggggagaaagatagagcaagaatgagtacaaccacagtactcagcaagccacaccggcagatgcacgactaatgcaagggggtacaaggggtaatgatataggggttaagttatgcagaaaacagcatttaaaagtcacttagttgcccaaagccattttataaagacgatcctagagctacacagtattattaatcaaggctgtgaaccctcacgaacctgccttaacccaaggcctacgatgatccagaccgaactggcaacccgaccctgggtcccagctcgtcccaagccaacccaggccaaccattccacattttagttgttaagcaaattttaagaattaaaacactaacttgggtacattgctcggcttgcccataaccgagggcgcggctattcgaatagattatactctgatcagaggtgtacatctttacccacaagacacatcttcctcacgtgtaaccacgtgccacataccaccacggtatacggacggaagacgtgacatagtttccaacccatcctagccatagacaagagtaccgacccaaccccacctacggccggaacctccgggacaggtaggcaggactgagcccctagcagcaggacaccggccctgtgccatgacatctcgactaccgggccgcagctcgtgtagccttcatttgtcctagagatgtccatcgacccccgacttcgtccatctccatccgtgtacttttgtttataaccagactgagccacaaactaagccttacccactagacatgtggaagtacggtagtgctttgcaacagaggcccgaagaccggtccttatatggccgaggtgctactatcaaaaccatgcaccccgagcccagcctaaaaccattttgagggttttgaatagagggggaggtgtgaatccaattccacaataatccatccattccatagtgtccaggtgatgagaatattcccaaagtctagagttgtaaaaccacctaatgttgcctaattaaccagcgaagcatctacctaaaatcatactagtggtaccatgagtagagtgtccactagttggggttttgtttaattctagggtgaacaaggtaataatatcaataacaataataataaggtcataacaaaggtaaataggcatggctaaataaaacagtgataacgcgggaatttaagtaaagcgataatgcaataatttaaatcaacataattttataaactgggattcaatatgttcaaggatgatgtgacttgccttgctcgctttcccaaacgtcagcttcaacttccacgaagagcggatcttccgaagctgcagcgtctacacgaccaacggaaaagaaacggcttttactctactaaactccatataacaagcagaaacaaagcacaaaaatgcgttcttgacttcttaaggaaaaattagagacttgaacggtccaattccgagttcaaatggccaagttatggccatttgaaggttatatgctctttaaatggatatttgcgaatttcttcatttaaaatttaatttaaaatcggatttattgcgtcagccgaggggaggaacgcgcggaccgggtccacgggagtggggcccacgcggcagcctcatggtccacggtggaccgggcgcacgcgggctcgcactggccggcgccgtgggtcccacacgtcagccgcacccgagggcgcgggcggctgacgcccgggccccacatggcaaccgctcggtgcgcccgaaggcggccacacaggcacttcggcggaagacggcagcggccataggcacggcgtatcggcggccgatagagaggagggaaagggggtaacgaagcggcggtccacggctccccccggtttgacggcgacatcggaatcgccgaccggaacgaagaaagccgccggctcggctcgggtgtacggggtcgccggtgctccggcggtcggcgaccgaaacggagaggtggacgaggtcggcgaggatgcggcgaagccgaaggagccggcgccgaggtgggaggtggtctggggcaacgacggcggcggaccggagctcagcggcgacggcggagagagagagcgacggcgcgagctcgattccggcgggaagaaaggccggcgagtggcgaaaacggtggtggggagctcggggagggtttaaatagggttggaagggggagagagcggccggcggggaaggaataggtgcgggagacccggccaccattaatggcgccggcgaggttaggggagaggtttccaaacgaatccgagggagagagggagggaaaaatggggggaaagggggaggggatcccggggaataattcccccactttattgcgcgcggggacggcgggaggcggcgggattcgcggcggcggcggcgctagggcgcgggcgaggcggcgggagcagcgggaggaagggaatgacgggtgggccccacccgtcagcgagggtggcgggcgggcccgcccgtcagcggcgcgcgcgcggggaggagaccggttgggccgcgggggagaggagggagggggaaggagatgggccgcgccggcccaagagggagagggagggaaaaagactttttagggtttttctttttataaactcattttaactttgtttatttcttaataattattatttgtgctctgaaaattccactaaaatttgagggctctttttagaccaaggagaatttaacaaaaattctccgggccacatttgaatttttcttgtacgtattttagtgtttgccaatttcttttcgaattttaattaattctattattccttttagagaatgatttttattttgggttgaatttatcaggacgtgacagcggagccgagggacgcgacggcacggccgaccgacgctcacgcgcgggcgcacaggcggctggaggcggccggcgcgggggaaagagaagggcgacgacagggaggggtgatacgaccacggggaggctcgggatgaggctaaaacgatagaacggaaggagggggttccattttataggcgcggggtgggagccggcaatgagagaggccggaacggaggcgggaatggcggccggcggccatggaaagcggccgggtttggcgcgtccgttcctggcgattgggggcacgattccagggggaaaatgggggaaatcaaagaggaatcaatggggattaattccccctatgtaatttggaaagagccggcttgaatggggtggatttggaggaggaacaacgctagggttcacgggagagagaggaaggaggccggcggctagaggtcggggacgcgcctgacaggcgggacccacgcgggaggcgcacggtcaacgcgcggcaacaacgcgcacgcgcgcgcacatgcgcggcacgggtgggaggcgcggctcggcttgggccgggcgaagccgaggcggcccaggaggagaagaggagggagtgggccgggaggggaaggggaggccaagagaaggagggagagaaggagagggagagaaagagagggaggaagagaggactttggccgcgggccgagggagagagagagggaagactttgggccagacttggcccaaaggaggaaggaggatttatttttagtttttatttttagtaaactttgttaattgttgttgttgcttaataaatatttttggtgctctgaaaatttaagtaaaatttgagggcaccttttagaccaaggagaatttaacaaaaattctccggaccacattcgaatttttcttgtacgtattttaatgtttgccaatttcttttcgaattttaattaattctattattccttttagagaatgatttttattttgggatgaatttatcaggacgtgacattccacccgaaaacccgagcccgtgtccatccttgttaggatgagcggtgatggtcttgtaaagggcatcttttgaatggtaagtcttcatgcatccatatttcaccaatgtacccaacctttcattctctttcttaagagcttgcatagcatcaacattagtagcataagaggtcaaatcaatattgtaacacctagcacaaccattactagtagatggattggaagaattagaaaccacatttggttgagaggtgctactccaaagagtgtctaattgaacttcaagatctttatgacttttgtctaaaatagcaaatttttcttgaagagtttcattgacatccctaaggctagctaaagaaccattagccaaattaagctcattagctagttgttcatttttagcacattctttagctaatctctcctctaaggcaatgtttcttttcttttcaagaataagcaattcttcttgcctttcgagtgattgttctttactatccaaagctctcattaatttagccaagtgttacatagcgggtttgctaaagctcttaagcacatcatctaattcattatcactttcttcatcactagaatcatcatcaagagaagtgtgagaaggcttttgagtcatcaccttgcggccttgggccatgaagcatgagtagtggtaggagtcgtcgtcgtcatcactcaagttgttgaagagacactctttgcttgaagaggatgacttgaaggcgacggtagcaataccaccctctccttcaatcttgtcttttggcttgggtttgggcttgtcctcggaagcttcttcatcttcggagtaccacacctccaccatgtgtgccttcaccacatgagcacgctccggcttcttcttgtctcctttagccttagcttcatttgttttggggcaatcggcaatgaagtggccatattcgccacaattgaagcaagctctctctgattgcctctttcccttgtcatcatccttccttcctttgccatagccactcttgagaagaaagtgcttgaatctcttgacaataagagccatctcttcatcttcactttcttcacaacttgactcttcttcttgttttgcgttcaaagccacttcttgatttttgatcatggcggcattcttcaccatttgcctcacttcacgagcttcctcttcttgcatctcatgagacacaattcttccaagaatgtcacttggggtgagcctcttgaagtctttcctctcacgtatcattgatacaagagtgggatttcttggaccaaatgcacggagaagtctcttgaccacaaagtgatttgtcatgtcctcactcccaaatcctttaatcttgttgacaaggatcatcatcctatcatacatctcttgaggtgtctccttgtcatccatcacaaatcttccaagccttccttccaacaattcaatcttgtcctcacgaacggcgggtgatccctcatgagccaattgcaaagtatcccatatctctttggcctcctcaagaccatcaaacttattgaactccttcggactcaaggcggagagaattgtattggaagcttgagcattgcggtggatgagttgctcttgctccgaagtgagctccatgtcatcattgggtacatcaatacctgtacaaacaactttccaaatacttggatgcaaagagattagatgcaacttcatcttgtgcttccaagcggcataatgtgtcccatcaaaatgaggtgcacgcccggaaggcacggagacaaagttatgaggaggaacattaagtttgatgtaatcaaagtgaatagtagctccctttgatccagtctccttggtgctagaagcgtctcccttctcctccaaatattcgtctccctctagatgcgacatcgtggatcacttcaagcggtgaagcttgaatcaagagcaacctgctctgataccaattgaacgtgctgatgaagcctggggggggtgaataggctgtccctgaaaactcaaaaacaaatcgcaacggtaaaattcaagcagacccggaacttcctggtaaggaacaccggaacttcctgtgttcttaggacaggaacttccgggtaatggaacaaagacgaaattcaaatttcgaaataggagactaagccaatcttaacaagatgatgcacaggtattctaagcagaagatagatcacagaatcatccacagaaacatcacagaaagagacaagagtgattttttcccgaagttcggatcttgcgatcctactctctgttgaggagctccaaagagctgggtctcaattaaccccttgcctcagttgtgcaaaaacccagaggaaatccacagccttcaaccctaaacacccctaggcaaatttctagaattgagtgaccaccaagatccaactcaacctacatctagaaattcgccacaagtgtaggttgctctacttggaaaacctctagaatctcagcacaagaacttcattaacttacctcgttccctttcggaggagaggagatcgttcacaaacttacccgggacatccacaatatgcaacggattctcgcgggcgacacctaaccgtctaggagatcatctccaagagtaataagcaccgagatgacagcccacgagatattcaagtgctcacccaagatcctagtcttcacacatattcaaatctgcttctctcactctcaatctctctttctcacaagaattaggctcaagattgagtggagaaggcaagaaacacttgggagaggctagcaacagctctagggatgaaaagtgaaagtggaatggccaagaaataagctggaaacaagttggttatgtataacggctaggtgacgtcatctagccgttactcacaattttgaactggaagctagacaggaagttccggacctggaagacaggaacttccggacaacactttaggaaaatctttcaccagaccggaacttccggacctggaagacaggaagttctggactcgctatgctggacagatggagtatttgcaaaaataactcctagggaaacttgtcacttaggtcacactaagagcacttgacatatctcagagaaccacatggaacccctcttaatagtacggtttttcctaaaactcgattgcaataaatatactatcctatgcactcctcgagttccggttcgctttgattttatacttttttggggggtgtccaagcatcttatcttccacaccttggactaatgcacctgagagtagctcaataaactcattagtcccttaaccacatttatcattaatcaccaaaacccactagggggattaatgcactttcacctatgtagttcatgggaaacacatggcgatcagatagcaccaatcaaaataatagtcccgttccttaagaattactacatccgtttcaggttataaggctttctagcattgcccacattcatatagatgttaatgaatctaggcatacatatatgtctagattcattaacatatatatgaatgtgggcaatgctagaaagtcttataatatgaaatggaggaagtactccatagagaatctcacagtccgatttttgctgttgagcagcttcaagcctccataagtaagaaacatgtgctactaattgatgatgccacagatgttgagggatactattaggagagtgaattcacatctaatagaaggctttacatgtactgatgcagaaggttatgtactctataggaattatactgaattaggaagaacaacaagtcttttaagagagagaggctaaatataacgaatactactttctttttttaacgaaagactgcaaaaacagtatccaaatttaggtagttcagtaaatcacaaaacaaaatatagcaatgggcaagaatcatcatacgactcgtaagacaaggaagattattgccataacctagccgaatgctttggtgaccacctctcgccgaaggagactggggtagaggcggaggagagcgacacgtccatgaggcttcaaacaacttgtccgctcttgctcctcgagccgatgatgccgcaccgatggcggcggcgctacagcgaccgtgaggaaggggctaggggctgctgctgctagaggtgtgtatgggtcgatccattgcagatttgtgggccacaatgacaccgacttagctccccgcaaaaaaaaaaaatgacaccgacttagcttggaccatttccggatcggcccatatgattttgtgtcgtggttttggcagaagacggcttggcccgttcaggatcaggaggagcccaagaaagatgaaagcccaccataaggcccataaccgaggaaactatggtctgtttgttagagctcaactcctaaatttagctccaacggttgagtctggagtgaagttgtagagctgcctaaacccagctgcacttctttaattcattttgtgagagcgttccacccagcttcgctcccattttaggtggagctaaaattgtttagctaagctggagctggaactgtgccaaacaggccctatatatatgtgcaaatcatctaaactaaaaccctcctagcctcgacagcgattcgggggcagcgtggctatttcccgtgctatccatgttgcccccgatgctccacgctgctggatttcagctagtgggaggttgcctcgactccggtagttttgcaaaaacacccttgatattattgataatttgtattcttacattgttgtgctgtggattcttacatttaggcccttaaagacttgaaatatcttataccaaggccccgctcgatgtggggttttgtagatagattttggttgtacgagaaacctcattagcacatgattatttaagcattaattattataaatttggaaaatggatttatttgtttttttataaccacttacatatagaaactttttatcaaaaacacaccattcaacagtttgagaagtgtgctaacggaaaacgaggaagttgaagtttggagttgagaaaaagaattgggcccaagaagagaaaaacagaaaataggattgcgcttcaaataacagcaagtgagaggtctttttgtaaaaacgaacaaccctaccgcccggcgctcgtccccaccacgattgattgccctgccctgcccttcccctctcctctctcgctctctcccctaccctcgcgacgggtgcatcttgtcttgccctcccccttgcccgcttcttcccatccgttgccgcctctcttttgctcttgtagccagcctgcacatccccttctcttaggaggtcaactgccagcaaggagtcagaggtggagcgtcgccatagtcccttaggttgacggcggaggaggcaacgacgacgacagcggtctgatgccgcaaggtaggggaagagcaaatcgggaggagacaggagacatggtgcctagatccggagaagagggtccatattaaggccggcggcggagggggtcatcagagatggccggggtcggagatgttcacgtcggtgttgttgcccgtgatgaagaggcccgcagccaacccgagcgccagtgtctcaccagcatctgaccgagtgccacccgctattggctgaggtggccatcagctggtggagcgagaaaatggacatttggccactttcaaaactgggtttcgctattatgccatcctcaaaacgtgattcgataaaataccatttttgagctcgcgttacttgccaaagtgccatttttgctgttttattcatttccaaaacgaatttcgctcggttgtggggtgatgagatggaaatgccttgttgacaggtaggaccccgggcttgttatccccttgcagcgagctcaatctttgtattgtacagcaaggaatggaaacaaagaattgtggactgccgcggaacatctcatcgatggtgatgatgatgcctatggccagcggcgtgcctaggcggggtcggccacgaggctgaacacatcgtccctggccgactccttccgtcggacctacgcgcatggcgttcctgcgtgaccacgcttctcctccagccgcggccgcatgcgccgcatgaaatcgaactctcccggcagtgactgcgatcatgggcgcgtgcggcggaccaccaaggccgacggcttagtcggacccactaataactacatccacaacgaggcggcggcgatgcaatgcctgcatgggagatgccttcgtcttcggcgacggcgaggcgatgcctgcgttggatctccggcccggcgctccgcctcttgtaccgccccaacggctcgcaacatccctttgccctctccgtctgcaccagcctcggcccgctcggatcccccacacgcgcgccgttcgccatctccaccgagttcaacctcctctgctccaacctgcccgttttctccctcctcttcaagcctgcatcggcgacttctcgctcgccaaatgcgatgaccacaatggccacagggcgcggcaaatgtggccgccgcggggaagagcggttgtggggtcaacgcactgttgtccgggatgtgcctcacgacctggagcgtgctgccgttgtggagcaaggcgagcctacggttccagtgggggctgcaggtgctgccggagctgaaggctgccctcgcggatgatgggtaccgttggtgagtaactttgaggagttcttgccagtaaacgaggcctcgcggcggcagagcgagtccatggcggcggtgacccgcgctctagctcaccagcagctgctgcctcctctccagctccacgaacctggcgctcaccgcgtccccctccgcctcttccgccgacaaggccatggggcccacctcgaaactctagccgccgccgccgccatcgaccccacgggcctatgagataactcgggcggcggtgttgtgtgccgtgctccccgcgcttgagacacaccgcatgggaaatttcgtctcatcaccaaacagaggagcaaaaatgatttcgaaattatacaaaatggccaaaatggtaaaatgacggtgagcacgtgctccatattgacattttaacgaaatgcgtttttgagatggtattctagcgaaaccatgttttgaacgtggctaaatgtccattttctctggaagagcagaggttgacagatccaagcagcgtgaccacgccagtcgccaccgagctccgtgcttagcttcctcaccaccagcaagccccacgtcgacattcagtcccctcgagctgttagctgcatcgtcagatctgtggactgtcaccagcgcggacgttagcccctctcttggttgcctcctcgccgtcgtcgacgcgcactgagcagctgtgctctatctcctacgccgatcatgcatggcaggtgcagaagcacaaactaggaggttctatgggaagtgggaactcacgcggaccatggcaatgacacagtcgctgcaatattcaaccgcaactccttggacgcgcgactatgactctttttagatgggactaaaactttactatcacatcggatgtttgatactaattataaatattaaacataggctattaataaaacccatccataatcttggactaattcgcgagacgaatctattgagcctaattaattcatgattagtctatgtgatgctacagtaaacatgcgctaattatggattaattagacttaaaaattttttcacgcgaattagctttcatttatgtaattagttttataagtagtctatatttaatactccaaattcaaccaatacgatagggactaaagtttagtccctggatccaaacgctacctacgtctcaggcgcccgatccgggggtggaaaaatcggacgcccacgtcaccatgcaaaactactttcaactattttttctcttaaattatttatccaaatcatgatccgattacaccattaaattcgttgtaattaaatctttgaaacaagatctgttgatgcgaaaacacgaggcttgggagatctgcttaactccagtgcaggtccaaaagcttgcctttaggttcgtgagcgtgccagttgatttgatcctgcaatcaacaagaaagaaaagcaaagaaaccgcggttaaatccataaacgatagccgatcggctagttgctgatgatatatcatttacctttgagccgatgtcatatgtgaatcgatcgacaatcatgaataagtgagaaggaactaaatctactcgatcggccgtagatattaacaatatataatccttatgtcgatatatacttaaatcaagtgattgggatagatcggtcgccatgccgagacaatataaatcacttagatcgaaatatatattaacaacaagactatacatatgttcatagcatggccgatcaaatagatctagcatgtatcggctaatactccgatactactctatatttgtcacgtcccaaaacgactctaaaatacatcctctaaattatgcctagaataattaaaatccgtgtgaaagcctccaacaactaaaatgtgcaaagttaaaagtcaaataaggcttggaggatttttgtatatttcctaaaagcctaaaatgcgtaaataaattttagtggaattttcagagcacaaataataattattaagaaataaacaaagttgaaaaggttttataaaaaagaaaagctttaaaaaa

SEQ ID NO: 29448 - DNA, 10485 bp, Oryza sativa
tgggacccagggtcgggttgccagttcggtctgaatcatcgtaggccttgggttaaggcaggttcgtgtgggttcacggccttgattaataatatggtatagctctggaatcgtgtttacaaaatagctttgagcaactaagtgtcttttaatgctgtttactgcaaaccctaaccctttatattataacccccttgtactcccttgcatttatcctgcacttgtgggtgtgtcttgttgagtacggtggttgtactcagtcttgctcaatttttcccaaacccagaagaggagcccctggaagatgaaggctttggtgtctagctcgtgcctgccgtcaagcgcctgtggtcgtcgccctagtcttctgctgtttctcgtttgtctttgtgtgtgctgggccttcgccgcccatgtaataaattaactatttacgcttccgcttgataaactctgaaatgtatcaacttttggtgtaccttgcctcctgggacaaggaataatacacgcacgtaaggaacgcccgttgggttaattccggtcgtgacaatattaggatgttaaagcaagtaaaatatatcaaacaaaagcttaacatattcaagtgcaacaaaatcttaatgtaaagggcggatttaaaatgtcaatcaagcatatagaatataaagtagttaaatcaggtaagatcggctgaaaccccgatgctaccctaatcggcaatcagaaagcaggctagagattaagattctaatcatgacttataaggtcaaactcaattgatacagctataagtatgaaaaaaggacaatatctagacaatcaagccgctgaatgtttcattgagtggtagatatcttatataatctaagtcaacgtcgatattgaacctaatcggctgccttctgttgacagacgtttgccgattgaaggttagatagcgatattgctatgtaagatatatgataactcgacgaattacataaacaagattagagtatcataaagatggaagcactaataccgagaacacaagccgccaaaacaagttttacttctagttgaagatcaaaaccgatgcagctcaacccaaaagcaagaactcatcaaaacaaaacgaaagtaaaagggtggcgatacgccgagattgtattgaacgtgtgttagattgattacatggggctcggggtctatttatacctgagattacaaaacatgtccatatcggacacgactcttatctctatcaaactctaagatactataagtctttacggcagacttttgcccaaacatatctctaaggaatttacataaaatatcctaattaatagatacaattgtcttcccaggactctatccatgcgcggcaatcctcatgaagcatattaatcttaacccgacaacatataccacgtcatattgtcggatctgactcgatcggctaacttcatccgactcgaactctgccgatcccagtcgtagccgattcggactccagccgatcctttctctgtttccgggacaatctccatctcgaattccgcttcgattccatcttcatctccgatacttggattaccaaatttggttgttaacaagaccacacatgaatatattctgacgaatttttttaagcttattattgaattatttttaaatgttgcacgatgttccaccaagtatatcggaattgtttcactaagtagatcgaaaatatttcaatcgtttaaattgacgctgtttcaccttatataaaaacaatgttttagcaaatagcgaaagaatgtttcaattcactgcaacatttgatctatatatagtgaaatattataagtacactaggtaaaatatttttggtagaacaaaaaatgaaacaaattcccttaatagagggtttccataatatgtaggtgatttgttgtaaaaaaatgtttcgattcactgcaacattagatctatacatagtgaaacattgtgagtacactaggtgaaacatttttttggaaaaaaatgaaacggattctcttaatagagggtttctaaaatatgtgggtgatttgttgtaatggcgtgtgtgatggggacacatggcaggtgtgcaggacgacacgcgtgtcaaggggggagcgtccgatttttttctcctcccggacgcccaatttgcaacattatcccaacttctccattgcaattttagacgaacagagaaattgcatctagatcaggcgtgtaaagttttggcgtgtcacatcacattattatatacgctgtcccatgaggagttcgggcactaataaaaaactaattaccctctcagttaagaaacccggagataaatttattaagcctaattaaaccatcattagtacatgtttactgtagccccccattgtcaaatcatgaagcaattacgcttaaaagatttttttcgcaaagtaggcgcaactatgccattaattattttttaagcttatatttaatacttcatacaggtgtttaaacatgtttaaacgttcgatgtgacagggtgtaaaattttgagccagcatctaagtgtttcccattgattggtgtcaggcaaggcaatgcagctagatgagaatgcattagatggctaggcaagacagccgcatcgatacactaggtgatgcccggaccacgtatcgcgcgcgggcacattattggtcacagtattaaatttataataaaccatggcaataataatttttaagtaccaaaagaaaattacatatcgagtcataaatctttgtataaaaaattatactatgaagcaatataccactattgaagtgcgaaaagttatttaagtttagtcagtaaatcttgagatatcctcatgtatcttgaaaattacaatttctttcggaatatgatatgcaatctagagggtctagaaggtatgaatatgtttctgcagatataccacctggcataagagcaagaagggcacattcgtcaactgctgaacaaagatccctacatacttcctccgtcctaaaaaaaaaaaaggcgaaccttaggtttgcgtgtccaacgtttgaccgttcgtcttatataaaatttttttatgattaatattttcattgttgttagatgataaagcatgattaatactttatgcgtgacttacctttttaaattttttttcatattttttcaaataaaacaaacggtgaaacgttggacacgtaaaccaaaggtttgccttttttttttgcgacggagggagtaggtctatgcctaaagcacctacattaccaaaagaaagcacacaatgtttacccagaggaggttgactatcattctacaacctcaggaaaggacataggatggaaaacagcaacagggcttggcatgatgccaatgtcaaattcctctgcaaaaggacacatacttcagtaacttcaatagcaaggattacatgacgtaataatttaaaaatgatatggtgaatagtaggaattcattagataataagaactatgaaatgataaaaacttttagtatcaggaatacatgcacaataatagacaatacatggagtatccagttcagatattatatccatgattggagtcaaagaatttaacagagtgaagagttggtgataatcaaataaaatgaatttccagaaacatgttctccctttttttttcttttaacctgaagaaacatgatttctgttcggaaataaactgccattcacaatacacctgacaatctgttcaggaggaaaaatatattttagtagggtatttgtagaatgaatctacatgtcatatcataatacagcactaaaacatgtataggtatagctagtaatctaaaggtgtaaattaccaaagggctaaaatatgtaggaaagactcaccaaaggacacgtgaaccgaaagcatgataaaacaaagcgagtacagtaaagttggcaaacaccctgcggatgcatgatttggtagaaacagaatattacattagacaggatgggtatgttgcctgacttgcctaatatctctgaaatgtattttcagcaagcaatcaagtaaataaaatcatattttgttcaaaatgacaccatatacagcttgctaccatattcatgaagccttgatttcagaattcagtaagtaataacacaacaatggtttagcaagaaaaaaatattaccatgcatgctagaagagaccatatggacatgaaatatgattttactgctaaattatggtttgtcttcatggagctgcacagatcaatataatttgttaacatataaaatgaatcattttagtgtatggggcacgtagagtaagacttcaacttctagactggatttcgcaggcaggaaagaatatgcatctctcgaacaacacaacacccatacgcatctcttgcccgtgtcatataaagaaggaaaaatcaaaactacaaatccatgttagggagcaggttttcagtacgtagaaacataagctatcatatatatttttttacagaggagaagaagcataattacctgagaacctggcaagtccaataaaaaatccaacaatacgacgatctgcagggctgtaaaacagagaggatccctcaattattttaaataacccctaataaaaagttaacaatttcaaatcgagcagagcagtaaaaaaacataagcattagcctagaagttaattaccagaatacttgcttagtcaaattataaattgtacgaacatggtgatctgcagggctggaaaagaaaagaggatcacataattaatgtaaagaaccccaaataaaaaatgcatatatttctgatctaaaccatggcgacacaataaaaagtgtctccgtgtgcgctcgccggtgtccgtaggcctctccttacatgtgtcctcgacgaaatcgctggctgccgaagttctgaccgcatcgtctcccccaaaatcgtcgggctgccggcaaccaggtcattacctggcgtgtgcgcaaacacgaaggatgagaagtacaacttcaaattgagacaaaccggcaagaagcaagacaagaagacaagtcatagaggtcaaaacctaacttgctacaattgtcacgaaaagagacatattggtaaaaattataccataggtaatactcctaagtttactattatttttgatgattatgtgcttaggaaaaataggcaagacaatgtatttgctagatatgttggtttacctagacttgcacctagaaggaggaccatttgggtgcctcgcaatttggtaactaacattgatggacctaattttgttggggaccaaaatatgctcaaatgagaatataggtacatgaaaggcattggtgttttggcctatgcgagaaaatgtgattctcaccaagttcaagaattggagccaataataaggatggagaattcacatcaaggaccaatgctatctcggtaacatgcttttggtttgaaaattcttttttatagctttgtgtagtttgcaatgcattctcataactctttccaaaattaaatctctctctcttataaaaatcatcatatatgcatgttgagcataataaatgtggcatatgaagctataggtttgatcatattcatgtatcatatttttctcgtgttgcttttgtgcttattatcaagcatatttgatcttagctcgatcttgtgtttattttcctatctttattgagttgaagggaatatcacattaagggaaagttgtcgcgcccggaaaaataccttttccagaacgctagtgtattaatccccgtcccaggaaaagccggggtacaccacacaaacatgatataaaagacacatctttattatatcgataatatttaaattattacaaaggcactccaggcctgacaaacaaaaataaacagcagcggactagcgggcctacggctccatcttcactggcgctcaattagggtataagccaggactccacctagttcttcttctccaaagcttctcttagtgaagcggggggagatagagcaagaatgagtacaaccaccgtactcagcaagccacaccggcagatgcatgattaatgcaagggggtacaaggggataataataggggttagattttgcagtaaacagcatttgaaagacacttagttgctcaaagctattttacaagcacgatcctaggaatacacaatatcattaatcaaggccatgaacccacacgaacctgccttaacccaaggcctatgatgattcagaccgaactggcaaccagacccaggtcccagctcgtcccaagccaacccaggccaaccattccacattttagttgttaagcaagttttaagaagtaaaccactaacttgggtacattgctaggcttgcccataaccgagggcgcgactattcgaatagattatactctgatcagaggtgtacatctttacccacaagactcatctttactccgcattccacggccgtggaacccgttgtaaagaatgtgtcataacccctttacccatcctagccgtgacaaaagcaccgagccaaccccgcctacggccggaacccccaagacaggtaggcaggattgagcccctagcagcagaacaccggccctgtgccatgacatctcgactaccgagccgcagcccgtgtagccttcatttgccatagagatgtccatcgagccctgacttcgtccatctccatccgtgtactcttgccaggactagactgagcaccgagttaagccttacctattagacatgtggttagtacagtagtgctttgcaacagaggcccgaagaccggtccttatagtggtcgaggtgctactagcagaaccatgcacctcgagcccagcctaaaaccattttgagagttttgaatagaggggggaggagtgtgttcaattccatcacaagccaaccattccataatgtccaaatgacatgagaactcccaaagtctaaagttataaaaccacctaatgttgcctaattaatcagcgaagcatctacctaaattcatactagtggaaccatgaatagagtacccactagttggggttttgttttcctatggtgaacgaggtgataataacaattgcaatgataaggctataacacggattaataggaagtgctaaataaaacagtgataccgcgggaatttaaataaaacggtaatgcaataatttaaattaaaataattttataaactgggattaaatatgctcaaggatgatgtgacttgccttgctcagagagaacggccttccgaaccttcggcgacgaccacgaaccgcacttcgggaacctccggaatgacggaagctacgcgaagcacacaagcaaagctacaagcctataaagaagcaataacaatacataaaaaaaagcacagggttttttaggttataacaaacattaagagacttgaacgggtcaattcggaattcatatgaccaaggcatggtcatccgaagtttaatgctgttatatggagatttgtggattattataattaggctttgcaactataaaacatgtgtaagcgctagcctggaaaagacaggaaggctgcgctgttgacatgcggaccccacatgtcaacctaagggaccacggtagaccgagtacacagagacggtccacgggtcaatggaagcggaccccgtgtgtcaaccgaggcaagtggccgacaaacggacttcactagacaccacgcgggctgcacacgtgaaaaccacgcggctaccgagcgggcacactagcacggtcaccacacgcacacacaaacgactaccgacaccggtacacgggtaccggggtcgacaaccgcacaacgggcatgggcgacactgaaaggatgaggacgggggcagcgagggagaaacccttaccaccacgcgacgaggcgtgggaacgaggacgacgaacgggcgcggcggagacggctcggggacgacggaggcgaacggcgagggaacgacttcggcagcgatccttggacgaaagcgagacacggccggcgcaacgcttgacgacgcggagccgaggatgaagacgatgaaggggctgcagcaacttgacgaaacgcaggcgacgaacgaacgtggcttgacggagtgacgaacgccacgacgaccgaaaacgacgggaggacgacgaccggaaccggcgaggaggcgacgagggcagccggcagcagctgcacggatgcgaggacggcacggaacacgtcgctgcgaggatgacgacggtggcggcgcagtgagacgacgagccaggtgaccgacgggacgttgacgacgaggacgaacggtgacgacgacgacggacagcgaaggggttcggatggaggggaggtgatgctgaggacgatgtcaccggctcgccgctgcgatgccggaggtggtggtggcgcggccgacggcgcacgggtggaggaagggccgaccggggaaattccggtgaggcggatggagaggccagcgtggcacgacggtgttccggcgaaattcaggcgatgccgtggcctggtcggggaagaggacggcgttcctgtgcctggagaggtagtggcgacgtcggccggcgcacaggagacgcggcagaggcggccgaaggcggaacagtggcggcaatgccactgttgccggtggggatgcacttccggaggtctccgcgggaaacggagggcaggccggtgcaggagaggcgactgtgacgccgggggaggcgacggcacggccggccggcgtgctgacgcggcggcaggggcagctggagtcggccggcggcatgggagagagagaagggtggcggggagaggaggtgaggccacggggtagctcgggaggaggctaaatcgatagaacggaggaaggggattccattttataggtgaggggagggagccggccatgggagaggcggggaacgatggcggaatttgtggccggcggccatggaaggtggccggggttggctcgtccgttcccggcgattgggggcgccattcaagggggaaattggggagaattgaagaggaaggaatgagaattaattcccccccaatcaatttcgggaaccccggtttgaatcgcgtggattttggggaggattggcgctagggtttgcacgggagagagagaggaaggaggccgagcgggaggaggacgactcgggggtgggacccacgcggtcaggcgcgcggtcagtgcacgcacgtgcgcggcacgggcgggagggcgccgctcggcttgggcccggaggcggcccaggtgggatggggcggggagacttgggccgagaggaaaaaagaacggagggcaggcccaagagagagagagggagagaaggagataaggtgaggaggaagggaggactttggccgcgggccgagggagagagagagggaggactttgggccagacttggcctaaagggaggagggggattatttttttggaaaaagtcgacttagactcccttaattgtaggccgaatctaattcgtacccctcaactagaaaaccggatagaacgaccccacgaacaattgaaaccagtgcaatttgactccctcaccggttttggggggtggttttgctgacatggcgctgatgtggcggtgttgacccggtcttcgtcccacatggcgcttgcgtgggattagaattaaaaaaatatctgtgagacccatatgtcattcacaaaaaaatacatagttggacccactaacatgtggggcccatgtcacgaccggaattaacccgacgggcgttccttacatgcgtgtattattccttgtcccaggaggcaaggtacaccaaaagttgatacatttcaaagtttatcaagcggaagcgtaaatagttaatttattacatgggcggcgaaggcccagcacacacaaaaacaaacgggaaacagcggaagactagggcgacgaccacaggcgcttgacggcaggcacgagctagacaccaaagccttcatgttccaggggctcctcttctgggtttgggaaaaattgagcaagactgagtacaaccactgtactcaacaagacacacccacaagtgcaggataaatgcaagggagtacaagggggttataatataaagggttagggtttgcagtaaacagcattaaaagacacttagttgcacaaagctattttgtaaacacgattccagagctatacaatatttttaatcaagaccgtgaacccacacgaacctgccttaacccaaggcctacgatgattcagaccgaactggcaacccgaccctgggtcccagctcgtcccaagccaacccaggccaaccattccacattttagttgttaagcaggttttaagaattaaaacactaacttgggtacattgcttggcttgcccataaccgagggcgcggctattcgaatagattatactctgatcagaggtgtacatctttaccctcaagacac

SEQ ID NO: 29449 - DNA, 7127 bp, Oryza sativa
aggaaggcacaatagacttattcttattcagccagagagtggcccacaatctatggcccaggcccaggtcctcttctaactcttcccccacaagccacacaggaagattttttcacggtgcggcggcggggccaaaccccagatagaaccctgcgccgcgtggtgcctagccccgggccgccgccgccgtggtgctgcccggggcttgacggcgtcgctcctcagttcctgcctccgccgactgtttcttcttctttgaggtaagccggaagggagtgggggagatggatcttgtagctatcgcctctcgctccttgcctctaaccctattcgcctcattcgctctctcgctctaatctcgcccccaacccgacgtcctcggcagcggcggagtgagtaatttgagtgggtttgccctagtttgggggatttgatttccctctcttctctttactttgtctgtttgatttcgttggacgtttgatgtgcaatcgatgcttctgttccagtccaaggaattttattccgttgaatattgaatcccctggtcaggtttcaaagaaaagaaaaatccccagttcttttcctgccaagacgcctttcctctggatttcgatttcatttgaactgatagtttgattttaccccagtgggtgactttgacggcaagcagccctgatttttttggcagagttacatatctcctgaattcccactttgatttcatctttactttttttttcgtgggatgctctctttggggatctcgatttcgagagtttagttttacttcatttcattacttcattcagtggatgattttggttttaaatggattgcgtgtttgacatgggtattcctccttgcagagcaagctggtaaagcaaagtagtatacgatctccagtccaaacatccattcgtgtgagcagtcaaacagttaatccttaaggtatggtgcaatgtttttttttctagttattgacaagtttggagtagtctctgctgtcctgatttaatccatttggttggcaatggcattaaaatgagttaattgcaatgtaagataagttgcaatctttttgacaaaaaagcgattcacaactgtagttacatagtaagtgcaagaagattacaagataacaagaatgcaaaagttaatggaacctatgttggttagtctatagtggctgtagatacatcactacctttatagaaatttccagatttgcatagtatagagtaaaatacatggctgatccttaaagttggacgaggatatatggaggactttgagatcttccattcttcgacaatgaaagatcagccatatggcatatctagatatggttcatcgatttgtataaatgcatatctaggtccctaatctcagtttaatgttttcccaaggtccaaaatacatacgacatagcttgggtgctgacgtagttatccactacagtattttgcatttagacccctccacctcaatatgccccaccccgaccccccaccgtttccaccatacccgtggccgtggggaaggaggcgaagagacatcaattaggcagtatttgatcatcagcgatatgaggtcctcggagccgggatagatggtacgatagggagagggtgatcccgtgagtccagtatggtgtgattgtcaccttgacctcagattgtgggaggatcacatcgacaataaatgccacacctgactcacgggatcacccacttcgtaataagctatttatcttgacctccaggacctttgattgctgataatcgccacagctataatcactatctcttcatctcctctcccactggtgcggtaggagtcaatttggaagtggtgagagtcaatttggggggtatactgtagcggagggacctaaatgtgaaatctgtgccactgtggacaactacggtcagcgcccgagcggtgtcatctgcattttggactttgggttatacattaaatcaaaatcagggacatagatgtgcattttacaagttaatggacctagatggcacctctgtccaagtttaaggactgtccgtgaaggattttattttttttaatcataatatgatgatacaaatttacccccaatattaatgtactcatagtttgttcactttttcagtatggtttctgtatacgaagaagcacgggaaaggtggacttggaaaaatcaagtaacagaagaagggccttatggctttaaaattctctcccaaataagacgccaggaccatggtatgtactataatattgaagaccatgattctgcttggtccttctttgtattataatgcaaaacgattttatattttacttaactgattcttcgcttaaaaagggcaaaattttctttagactaactttttgacatttcctataggatactcttagttttgtggttctttgagcaatatttattcaaactcagatcttgcaaggtggctaagggtaaaatcgtcttttgtaaagttttatctctccattagaagaggatatattaaaataatggttgggagtgtcttttggcaaaaaaaaaaagattgtcctaaggcaaaatgattttcacgacaacagagcgttgataaactaaagcaattaaagctatgaatcacttgtatttttctagtaccgagaaacccagttgcttgtagactagtctgaactgaagctagctacatagtgcatgctatgacttatacattatcgaaaagatcgaagcacgaactgcaagcacgttaccatatggtttctgaagaaagtacaaagctacataacctcatgttgtgcaaaatcaaactcaaaaagagcctatactgtaaatgtaaatctaatcacatcacaatcactgaccattgaaatctgaacatggtgcatcaaattttgcccttagaaaatgtaggttgcgtttttttttcattttgtaatgatgcattgctttaacttattgttgtattactcccaattgcagactgctgtaccttctctgctatggcttcaactctcgaggccaatgtaagagttcagcatggaaggaacgatcaattttccatacctcacctgcaatttatagatgctcaatcaaaaatcagtgcaccaaataccaatgagacaaaggtactgaggcttttgaaaagtctaaaagagagagacggtggggtttacttggatgaagactatgatagtgaggtaccttgtttaattcacttctatgcctattttctaaacataatgtagaaaaaatgtgattgcctggtgcctatattaagcatactatgttttgtttttcaggggaatctccgagccttagatgctaaagtttgcagggtatggaagttcaatctctaccatgtgaaggacattattcatcttcgaagtgctcttcatcggctgcgcaggcaagggcctttactggctgttatccgcatcagccgtaattatgatgagtgccgcaagtcaggccatgtctacaaatatgatcctgcccgaatctgcacatatgatgatgggaaacccaagacgcacgcgttgtgtgttgtttcgtttgtaactgagaagggtacaccatgccttgagtgtcaggactctcacggcacagcttggggtattggcggttacttaactgtggaaatcaggtcactaaaagagctatacagtgttagagttacgtagctggtggctgtcaagtcaatgcaactcaagactctacgtatgcactcattttctatcattttaatacttcctgcttacagtacgtggccaatgcaaagatttcatggctcagaagaaagggatctttggaattaatactttgtatttaagtgataatggcctgttgcttctcttgaccttttgtcccttttttggatgtgagagttatggaagttagatttggggaacagaagattttgtgattctatcaaagcgagatcatttctttaatttgaatatccacatgcctaagggtatggttgtagagtgcctgaatgctgatatacgtggaattttgctcatttgatcatcaaccagcatgcctcttgttctctaaactgttaacgtggaatgttacaactcgctgatatttttagtgtactgtatagtatacattatatatgatctccggaggtttcgttggatttataccttcagatttcagagcaaggttaactagtacatcaggctgagtgtatggatgatacaccagcgaacaaactttgatggatgagcaaggtactttaagcgttaggcagatggactgtattgcacatcatatgctactatttcacattcagcacatgacatactccagaatcttaatatatctcagtttaagtttcagattgtaaatatgcacaacatatagatgaaaaactcactacattctgactatcatagagttgagaagtaactttcttgcaggtataattagaacacatgatcctgatcggcatttgaatcaggagcacttcagaattcaaatctgaatatttcagattcacattctaaagataaacatgaccaaaacttatacatgatgatctcccccaatgtagttggttcttaattgtaagtgctagtagtcaaacctgtttgtatgtgctagtagtcaaaccaatggatgcactccatatttcttaagtagttcgattgtcgcttgattaggtaggaatattctaactaatataacgtctttcatttcaagtagaaataaacaataagatgaacgtttatgaactgaagagagaataggaactaggataatagtccaacaaaaattctaaatactattgattgtaactttcccttggaagaaagtacggctcatttcccttggaagaaagtacggctcatttgtaagagcaggtacaatagcaggctataagccagctgcaaacatattttaaagagataaataaggagagagaagggcagcgggctacagatttgtagccagctgtagcacggactccaagacgcagtgtgtgtatgataggtgggaccatatattaatagtgtagtatgtaactattgtattaatgagctattagattagctatagattaattggagctagtagttagctacactgttaaacttgctctaagtttacggtagttcacacagatcaatggagtagttatgtaaatgacaggctaatgcttcagtggctactggctagattgattaatcaaagatcccatttcccttgaagaaagtacggctcatttgtaagtttatggtagttcacacagatcaatagttatgtaaatgacaggcttgttttcagtgataagatactagtgcgttcgttccagtgacattgggtgagaaaacatctcgttttccgcatgcacgtttcctaaactactaaacagtgcatttttttgcaaaaaaaaaattctataggaaagttgctttaaaaaatcatatttgtcagggttacggataaaatatactctctattcttgaatatacgttgtatactgatatggtatacccgcgcgtatacggatatttcctgtgtacgttaaggaaatctatcacgtgatagaagtggagtccatagatggaaggagtcctactcgaataaaactgggtcgttaccatatcgtgtggggtccgatatccctgagtcctacttggagatcgactgacccgcggtataaaagggaccccccgagcaggacctaaggcattgaatcttaccgccaacacacccaccacagcctacgaagccagagcctacaagagccaagtcgccgggtgatctagtcgaaccaactcgactatgatctcgtcggtatcgccgagttctgttattccctttgtaatctatagtttccactatataatcccatatcaactggattagggctattacctaccaaggggcctgaaccagtataatccttgtcttttgtttgcttgatgtcgtattacgtagatcctcgtaccagcgtaccccaatgccctctatatccggtctacgggtatcccccgtcgacaatattaatccatttttgcaatttaaaatagttaatactcaattaatcatacgctaatgatctatctcgttttgcgtatcttcccaatcttctcaatcccctccttctcaaactcattatgcttctcaaagatcccattttttcggtggggacaggactgtaagcttgtttacctgtataatgtgtatttgacttcgatgtatgcgtctcgtcttagtttgaatcacacccatgtgcataattgcggtgttaagcgtgtgagggtaattttttgaacaaggatgatccaaaaactgctattccctccgtccaacgaagtctttttttattattattttctgtgtccaacgtttgatcatccgtcttatttaaatttttttaaaaaaaatagtcacacataaattattattcatgttttatcatctaataaaaataaaaataaaaatactaatcatagaaaaattttaaataaaataaagagtcaaacgttgtataaaaactgaaaaatggagtctttataggatggagggagtacttcattgcagcaagccgacatgctttgctccctggcaacaaaaataaataatgaaatacaagctactttattccaggtttatgtgtaatttttacaggaaaactgtcatattccgatgcttgaaaggaggtggcctagtgaaaattggtgcacgtcccgttttctttactggagtacgtatttaatcgaagtttaggtttttgtttgttaatatgcttatgaaacccacaatttttaaattatcccttcctctctcttgattgtctcagggctacaaagagaaggttaggttaagtttaagctcgagcttattattataccgaaattgttaggctgacactgttgggattttcatgtcagcttgctaaaagtcaaaatgcttgctgtatggcagcagcttattcagatcatttggtcctatgtatcttcttcgattcattagtactattatgcaacccctgtgctacatccgtatttcagaggggttgtataatatctataagaagtggagacataaagatataaggtgggactttcttctcattcatcattctgtcatcctc

SEQ ID NO: 29450 - DNA, 25298 bp, Oryza sativa
  unsure (1)..(25298): unsure at all n locations
aattgataattaaaacatgattaaaggtgggttgtgagcacatggttttgatggtcgtgctcataacaattaaggaacggttcgcgagctactgttgtgaaacatttaccgtgccaaccacaagccaacatgggtaacggctttaccttttgtatagcatagttcattatggggtgccagactgagaagcggcgagaagtccgtgagtgttgctggggagtccatgcctctggttgtagagggggtgattatgatccaggtatggtgcactgtggtgagttgtgttgtgcgaggggtattgtcacagttcctttccgaggtaccgtggtggtattgaggcgcatggtaacatgttgtggaactgtcttgtgggtacagtggtacatctctggccagagtaaaactattcgaatagccgtgcctgcggttatgggtgggtctaacaatgtttttcgtgattagtctcacattactcattattggtgataatactgtgacaattaaattgactcctggtttggaatggtatattcctggtatggaggtttgatttgtacaaccggggttggttgttcagatgaggttgggcctatgcaacacgggtgtgttgtatagtgtttatttaatattgcttaatttacttaattgttttactattctctcaaatgtttattaaatattgtttatgcaaatgagctttattatgccatcctttgttatcctgtgcacttgcatatttgctatgtggcttgttgagtatgtcatatgctcattcttgcaatattcattcatcagaggaggagtacttcagtgaaggtgatgatctggaggattaggcttgttcgggtcaagttgcttgtggagtggggtcgccatagctgttccgccttttgtttttattttccgctgcgtagaattttattcttttgagaggaattatccacctctgtaataatttattattttgcgaatattaattagtagtttgacattactctattatcaatttgttattgtgtgcctcggctgattcctggacgaggatttaacacacatgtaagcgtttggaattttggatagaaatttcgggcgtgacactcagccagtcttgtctctctcggatagcttcaccaacctctgagacttcgtcaagctcagtactcgggggctactatggggtacacggtacctaggtacccaacgacaagccttggaccgccaccacatggggtgggcccagtgccctaagcccatgtggcatacttgtatacatagaaggagataaaagataaggaagtctatcctatctcttgtaaatagatggcaaggtatccattttataagggatactttgccatgtatgggggggggagccctagctctatataaagggcgctggcgacaatcctacggaggctttttgaccatttttccaccggatacagacaattcatcccactggacgtagggtattacctcatctcgagggcctgaaccaggataatcatctgtgtcaccatctctccttgatctagcgcaccccataaaatatattgccaatcatagaatcgacagaatttatctagcaaggtgtcgactagggtttggttatttgctagtcgttgctaaagttgggtagcataacgactaggtttggtatcttcttgttgatgcgaaaacacgatgcctggaagatctgcttaacttcagtgcaggtccaaaaaaaaatcttgcctttaggttcgtgagcgtgccagttgatttgatcatgcaatcaacaagaaataaaaataaagaaactgcagttaaatccataaatgatagccgatcggccagccgccaatgacgtatcatttatctttgagccgatgtcatatttgattcgatcggcaatcataaacaagcaagaaagaactaaatctattcgatcggctgtggtattaacggtaaataatccctacgtcgatatatacttaaatcaagtgattgggatagatcggtcgtcatgccgagacagtataaatcacttagattgaaatatatactaacgagaggactataagcattcataacatagccgattagatagatctagcatgtatcggctaatactctgataccactctatattaagatattaaagcaggcaaagtatatcaaacagaagcctaacatacctagatgcaacaagatcttaacataaagggcagatctagcatatcaattaagcatatgaaatataaagctaaatcatgtaagatcggctgaaaccccgacattaccctaatcggcaaccaaagacaggctagagatcatggttctaattacgatttataaggtcaaactcaactgatgcagctataagtatgaaaagaacaacaatatctagacaatcaagacgttggatgtttcataaggtggtagatatcctatataatctaagtcaatgttggtatttaacctaatcggttgccttcccgcaatagatgttagccgattgaaggttaaataacagtattgccagagattatataggatatatggtaactcgacgaattacataaacaagattagagtatcataacgatggaagcactaatcccgataacgcaagccgccacaacaagttttacctctagttgaagattgaaaccgatgcagctcaacccgaaagcaagaactcgtcgaaacaaaacgaaagtaaaagggtggtggtgcgccgagattgtattgaacgtgtgtgttagattgattacatggggctcggggtctatttatacccgagattacaaaatatgtccatgtcagacacgactcttatctctaacaaactctaagataccataagtctttgcggcagacttttgcccaaacttatctctaaggaaattacataaaatatcctaattgatagatacaattgccttctcaggacttaatccgtgcatggcaatccacatgaagcacattaactcaacccgacaacgtgtatcgagttacattgtcggaatcggtttaatcggctaaccttgtccgactcgaactctgtcgattctggttgcagccgattcggacttcagctgattcttgctctgttcccggaacgatccatccttagattccgcttcggttttatctccatctccgatactaaaactaccaaatttgatcgttaacacttctctagccggtgtcaacagacaacatatcgactagagaagtaggaggctcatgcaggtttagcgaggcggaagtgttactccgacaaccgtgggtggtgacggagcggcttggatcacacatagcccgagagctaactgtgcggcgtgctgtggaggtcgagggaatagtaaagctccaaccacagtacgcatagaggcgtggggtgctaggagcagcacatttgaccttgctgggctttacaaccaacagtctgatgtaagggccagtagaccgggcaaacatccccatgaaaggcgtaaagttccaaccggcggctctttaggggctaatgggtattttggaatgaaagaagatatgcgataatcaaatataagtttaaagtaagaattcaaatataagtttgaatcaaatataaattcaaatggtaattaaggaaattcaaataaatcttaaaatagcaagtctgatatcaaaatgtagagtttgaatttagatgaatttaggtcaaatttcattggaatcggatatatggtttaggagatatgggcttctaaataataggatttggattaaatctagaaaatactaaaggttactccctccgtttcatgttataagacgttttgactttggtcaaagtcaaactgttttaagattgatcaagtttgtgaaaaaaagtagtaacattttcaacataagacgaatttactatgaaaatatattcaattattgatttgttgaaactaatttagtattataaatattattatatttatctataaacttagtaaaactaaacagtttaactttgaccaaagtcaaaacgtcttataacttgaaatcgagaaatggagacagtactgtttatgggcccacttgtcaggcttttcttttctctctctttttcttgtccttcttcctcccatcaacatattctctgcttcttgccagggaactgagaggagggagagaagggcgctggtgctccggtggacagggaaaggtagcgtcgncggcagatgatgttcccgagcgacgcgcatctagggagggtggcttcatacacaagcactgagagagnaggccggaacggcgagggcaagagctcactccggcagcaaaagaggtagctgtggtggcttgatcatggaatgggtagggaagaggggaaagtaggaaaatggattcacttcattgaggcgaagctattggcgcgagtatttggtcggcaatgctccggtgagggagatcaaccgatggctagcatgggagagagagagaagaggagagctcagagagctcggttgtgtggaggggaggggcgagcttttcgccgtctatttataggcgtcaagaggcggttcgcagaggaagagaggaagggaaacacggcatcggcggagtggggaaagagaaaacggctgacggctttgtctccgattggtcgaccgcgtctgtttgacgtagcggctgagatcagggtagtgacgcaaagctgcgggcggaggtggaggaggaggagcacggcacggcgatggcgcctctggcttggcgaagcagcggcgacggcggctccaactcgatgcgacggcgcccatggtatgttggcgacggcgcccacgggacagggaggaggagcggctgcctctgctgagaggtttcggcccacaactgaaataaaaatattttttaaatttttgttgaagatttagatgattaggtttgaacacaatttgaatttggaggagattttcaaaagataaagtttctaatttatatgagagtgattttttggaggtggaatatatttagaagcactcaaataagaaataggaatattttgcactataaataatagggcttctaatttggatatatttttgggaacgtggtagaaaatacatgaatgaagataaataggattttatccccacaaatgggtggtatggatttagagaaatattttgtggctaataggagatttgaattttggatgaggagtataaattggaattttcttagcacaagagcaatcattctaatatttataatattgctaatcttgtgccgagaagtattagattatggaaattggaacgggaggttagatcaaaataggagcttgagtaaagaataaatgatagaatatttcggatggagaagaattaaggatttttagaggtaaacctagatcaagggtttggtaaagaaataattccaattggaattcctctggtttaggattaaggacaatattggaggatttcttggaccaataattcataaaagtaaaacgggtttttaatagatttgcaacaaggaattttaatcgaaagaaagtaataaaaccaaatcaagaaataactcaatttaaatgaagatcagagaagaactaaaatgtcaaagagagggcttatacaaacaaatttttaggaggttacctctaattataatttcttaggttttggaagttatgaagaacataagaatcggcataattcataattaacaaatggttaattttcaggatgttacaagttaccagtgacaacgtcgcggaagaaggcggcgaccacagctctacccgtcgccgcgctcgaccgccaccgctccactcccgcgctcgcctaccatcgcttcacccgccacccgccgcccgctaccatgctcgcttgccgcccgccggctctcctcccgctgcctgccgcccgcgtccgctctcgcccatcgccgctccgctcgctgccagcctccctcactgaagaagagaagagaagagagaagagagaaaagagaagagaaggagaagaaaagagaagaaaaaagatgtgccgctgacatgtgggccccacgtactttttttaaattttttttgctgcctaagatgtcacgtcagcgaaaccacctatatatactaccataggaccttgagtaaacgatttatgtgagtttaggggtacacatttctagttttgaggttaagggacctcaaaaaatctcgctattaagttgagggacctccggtgaacttactctaaaaccaaatcccggaggaataagtacacgaaggtccctcaacttgtcatcgaattacaaaatcatcccccaaccgcaaaaccatatatatgacatcctttaacttgcaaaaccgttcgctttacatcctttggaggttttgaccccggttttatccgacgtgacgggcgagtaagcatgggacccacatgtcaggacgccacatcattaggctctctcttttccctcctctcccttcctcctcctctctctcactctctcactcatctcccaccccccacgcccaagtgctccccgccgccgttctggccattggccggcgagctgatcagtggagtgacaccggaggtgttcgacctgtgcagatcatggccaatttcgtcagagtgccagagttcaggtgaagagaagaaataaatggttgatgaattgagttacctagtgggagggaggcagaaggtgatggtgtaggcggcggcgttgcaggtgaaggtgctcatgccgtcgttgtaggcgtagctgtaggcgcgcgggcacgctgacttgaagatggtcgagtacgccgtcggccggctgtcgatgcataaaacacagactggccggagaggtttgctttactctagtgcaggtccaaagagatcgctttcgggttcagggcgtgccaattggtttaatcctgcaaataacaagaaacaaagaaaccaaagttaaacccgtaaatgatagccgatcggttggattgccgatgacatatcctttgtgccaggccaatatgatacagatcagatcggccgtaatgtgatgaaagagataattgagtttgttctatcggctgtatatgtcaataacacataatatgtgtttcaaagtatgcttaaaccaagtgtttaggaaagatcggtcagcacatcaagacagtataaaccattcgagtccaagaatactttaaagcagggattatatgtactcacagcatagccgataggcaaacccaacgtgtatcaggtagtactcagataccactttatactaagatatgctaaacaagaatcaatctagtgtcagggtgacctaacagactgatggcaagcttaacatatttggtccaagcgagatattaatataaagggcagatttagcgtatcaagtaaacacatatgaaatgagataactaaatcaggtaagatcggctgaaaccccgatgctatctctattaacaatcataggacatgctagatattatggttctaaatgttacttaacagatcaaacttaactgatacaacattaagcacatggagaaacataggatctaaacaagtccatgagagccttttcgagatggtagatatgctatataatctgattcgacacagctatctaaccctatcggctattttcgatgatagaggctagccgacacggttatatagcaagatcgatctagattatatagcatactagagaatgccccgcgcgtgctgcgggacttggttaacatcaatttgttagataagaggtataatctcaagaagaaatagaagaaacaaatagctttcttggagaaattcttttttagcagccctatcgaaaatttgtagataatttaggtagtacatgtcaactgaaggagcgttcagccataaaactcttttatacgattgatgggctagatacatgtagatgtgtgtggagatgggccaatgtgttcatgtgggctacatttggcactgaggaggctaagagactcacccggttggtgactgatgggttgggctctatgctgcattccatccaacgtctgagaaacaatctaatacattcatccaacggttcacaatttgatgatgatgtggaagcacgaggcttgagcttttggctttaactttatagaaagaagggatatgataactctgcggttttgcataggcagggctagagtgtcatgaagatgtaagcactagccctgagaacgcaaaccgccataacaagctttacctcttcgtcggagatcgaaatcgatgtagcccaactcgaaagcaagaactcgccgaaaacaaagaaaagtagaaaaggtggcgatgcgtcgagagtgtatttaacttgatgttatttgtttacagggtcttgggccatattatacccaaaatacatgatatgtccttgccggacacgactccacttcttttacaactcaaaaatgcgagcaagtcccttagacggactcttaccaaaaatatctataaggaaactattaaaatatcctaattaatagatacaattgccttcttcggactcaatccatacttggaagtacttgtatagcacttcaaccgatcccgacaatgttttcatgatcatcttgccaaaatcggctacatcggcttctccctatctagttctgtatcagccaatccagacggaagccgatgcagtccgtagccgatgcgtactctgtttctgtgatcatcaatttcctcccaaatctacttcggttttgatttcagatccgatctatgatttaccaattttggtcgttaacaccggcacgtcaccggcgtcgcgtacgcgccgctgcagcagtactcctcctccccgaacgcctcgcacgcgctccggcatgccgccatccacctgccactccttcgaactcactgcacatatgctcatgtcaacacaaacacgttcgccatgtacgacatgcgtgcatgacacacggatgtgtgacacgcttgcttgggcgaaggaaaagagactgtaacatcccgccactcccaggccgggcccgcttacatctggcagctttcatagatcaatcaggcttaaccctggagttctttggagatcggcttccgaaaaagaagttgcaacttgtttatatgagtattctattaatcttattaagccctaggccgggatgtcacagagaccgagcgtaatgaatgcatggatgatcaaagctgattggggaccaaaccaagaccctctccaagtctacttctacctcatcacgtcacttttggtccacagaagacaagatataaaattttacacgttttggattcggattcgggccttctggcagcatcaacttcaaatggacctagccgctgattagaaggaatttcggggcccatgagtacttgttggaaagcttatggagtctactttcagatggttttggttccacatcaaaattcctaccgagctgccggcaatctgcaaaacaagccacctatctcatccagtccgaatctgatttgggttttgggccttgtaactgtgtcgcgggcttagtccaagggggtgtgcgccctggggcaaccctaggatgtctctaatcatatttagtcagtagccgtcatcgtttagagtcgggttttacttagattaatctgtcaaaaacagtttcaccgctagatcagtttatggaacccccaaattcgagtgcttaatcattcatatgcaattttgttgcaatctatcttggtcttgcttgtgttcttcgattcgcatatagggattagccttctcggcgaggtcaaccgggtttcggcacgattgataaccagaggagacgtggtgctgcgattacagggctcagtagcgtgattgttcaaagccggatcgagttgtgtcgcccctccacccaaatcgactatttatcaatacctatcggaagatcgggagcaatagtcaacatcatttggtatcagagttgagcccttatttaaggggatgggaatgatgaggacatcctgtcacgcccagaaattcacgaaccagaatttctaagctgaatgtgcattaattccctgtccaggactagccagggtacacaaacgacaattgttgacatacagacccacgtcttataaaaatatagaagattacaaatgcgcggaaaagataaaacgagctaaacttggaagcttgacttcagtagcgggcgactccactccacaggcaacccttgacggcagcgacgaaaccaacctttatgagacagctccaactgggaagaacttccgctctggtgtgggggaaaagagagcaagactgagtactacccactgtactcagcgagtcataccggaagaggaggtatgatgcaggatataaccaaaggaggctaaaggttcatttgcaataaagtaggcatttaaaagcagtagttgaaaatagtaaaacaattgtagtaagtaatcagtattaacccatcactatccaacgctacaccacgttgcaacaggcccaacaaaccacctgaactacaccagttcattaaactaaactaggggtgagactaatcacggtgaatcaggttgatcgcccataaccgcaggcacggctattcgaatagtttttctctggccagaggtgtacaactgtacccacaagacacgattctacacatgtcgccatgccccaaagtatcaccatgatactgcaaagggggaaatcgtgacaagaccctccgcataaccctcccctaaccatccacaccacgctaaggtttcacccccacccctcaaaaggcagtgggcggtcccctcttgcgccgcggtgaatccggcagctggacaaccggacaccccggccaacccaacttcatcacgcccaccctcgccaccggtgccttggaaagggtcgagctatacttcagatcaagcagttacccactcccgcttgtggtaagcacggtaagtctcccagggtttcccgtgaaccggtccttaactgccatgggtgcgaccagccaaaccatgcacccacagctcaccattcagtgtattttaattaactaacaccactgcggtggcaccaatccaaagctatgctaatagtcaaagtctatgtaataatgtgatccccatttgtgtactagttgaactagacatggctaagcgttttcctaaaccaacatctagttattttgatacccaagctatcaatggcataaggtacacaataaatggctgagtaataggacccatcccacatgacattgtaaaaggatgcaatatttaatagaaatgcgggatatttgtaaattgggtacaatatgatcaattgtaatgcatgacttgccttactctcgcactgatgagatctcagcaacgtcttcgagaaatcgcggatcgacgaaacagccgaaatctacgggacaaacaaagcacacaaacaaaacatgctataagactactgaaacaggaaacaaaaccatttttaatggattctagggatttttatgaatttactgagacttgaatagacttaaacggagctcgaatgaattacttatgaattttagaagataagttgtgtttttactaataaagaaaagtcatcaatcaatttattgcgcaataaagcccagggctgacgccagcgaaaggggggcggcgccagcaagcgggccccgcatgtcagcggcacaaagggtggccggtctaccgtggaccaggtccacggggaggaggggtggtggtgtaccacgtggcgccgacgtggcaccacgtggctggccacgcgggccatgggacggacggccacgatcggtcgagggccgatagggcggctggggacgggcggcaccgaggccagcccgggcatggcgcacggtggcgaccggccggcggcagcggccggcgacgcggacgggcggcggcggcaccttaggagagagcagaaatagggttaggagtagggaaggcaaccacggcggacgccattgacggtcggaggcggaggggatggggaagctcaccggcgttcgggacgaagggggctccggcagcgattgatgacaatcgggcagcgaccgaggtgcaggcaggctcggtgagcgcgacggcggcgattgcgcggcgcggcggcggctctagcggcggcggcgcgcggccggagatgggtggcggcggcggagctcggcgagcgcggcgccacggcggtaggaagcacgggaaagggcggcgagagtgggaaacgagagagggggcccggggagggtttttatgggcgagggaggggcggacgtggccgggaaggtggctgatttggccagcgacgtgggggagtggagggagagagaggggtgttgggggatttcaaatcccccaccacttgcgggcgcgcgcgtgcgggagaggtggagatgggcaacgacgtgggcgcagggtgcgggcgcgaagtggagcggagaaggcggaagtgcggggcggttggagcttgggctccaacggccggaggtaggagacgaccgacaggtggggcccacctgtcggcgtcccagagagaggagggagggagcgggccggcccacaaggggaggccgagcgcggggtgaggtggggtggactggcccgacggcccaagaaggaaaaagaaagaaaagaaaaagaaggaaatggaaaaaaaggatttcctggggtttaaatattgcggttaatgaattttaattggttaaaattacttatagggctctgaaaattcctctaaaaatcatgttaatgtattggagcatggggaactcaagaaaaaatccaccacgccgaattcgattattaaatgcatttattaattgaggattagctctaggttaattcgaatcatttcttcggccgatttatttaacaaatttttaaagcaaggaaaaggggaaacttcagggcgtgacacatcctccactattaactgctggtaaagacgcaacaaggggccaagtggtccagttgtagtcggacggcaaccgtgtgagcctctgaataatcccaccttgcttagcttgggaggaggaagccaccttaaaagggagagccacgaagccctattagactagtcttttagggagattgggcatttccccgaatggatgtgcctaagaactgttggggttcgggcaactttaattattgggcctcggccaacctcacctgggccggatgtattaggtggtggcacggctgccgccgcactccaagcgatcgccgcagtcgctggtctagcacgcggtcgcgccaccaccgtcgaccggcctgcctagggagagaggagcagggagggagacgtgggtcctacactgactcacccgctatgtcggacaaaaccgtgatcaaaaccaccgaaggatgtaaagcgaacggttttgtaaattaagtgatgccattatatggttttgcggttgggagacgattttgtaagtcgatgacaagttgagggaccttgggtgtactttttccaatcctggagtacagtacaaagaccgccactgcctctcgtggaatcgtggcccgtgggtatgtgtcaacgatcggcatcggctgctctactgttgctgttttgggctgagccacgtgagctgctgtttgccgctcgcgtccgccagtagaggatgaaagcccataaagcccaccactaccgtctttcaaagcccacaaagcttcctcgtgttcgagtccgactgcctgtcgtgcttggtaccctatatatgttgagtcttcataatctaaaatcgccaggtctggctaatttttccataataaagaggtttctgtttttttactcaatttttcccacatagaagattgaaccctgttgaaagctcacccggacaaaaggtcaagtagattttggtcaagaaaagatcaagtagattccatcatgcagatgcgatcgtctccgcccatagttcttacgggaagaagtgaaaggttggtgtttctttgaaatttgtgatttacatcgagttactctatgatccattattgctcctaataagtttttttttaattacacacaaacgcacgcgtgcacacaccattacacgtagcaccgcacaaacatcctcgcaaatacgtaccctagaacacactcaaagagatgaaaccaaatgtatatacatgatctcataagaaatcatctacatgtacgtaatatttgtaggcatcaggatttgaattttggtgggtgcctcctaaagagtttgatctgtaagaataggtgaaatcgaagcttgggcccttttgctctgatctagtaattgagaatacatattagtattttaagtactctacgctagtgcatattccccaatggctttaccacatgttaagatagcttgacccactttatacggacgctatccatataatcttttgtgcgttgtgtttacacaataatgtcgcacattggagtagtttacctacgattgcttaaataatgctaaaagacccgctgcccacccaaaagtccgcaactctgtaaccgatccaggccgcagccgtggcccaagaagcccaaaaggcccgctgcccacccaaacgggtcgagtgacctgcgcacccaaactgagggcgtttagttgtcgtcgacaggttgcggccgcgaggggagcggagaaagggggggaaaaaagatggaaactaaccctaatctcgatctcgacggcgagggcggcgccggcgccggcgcctcgtcgggccgttctttgctgccgaaaggaagtggtaggttccgccgctcgtcggcccgttgttcgctgccgaaagggagtgataggttccgccgctcactatcgccggtgaactcgcggtcgctcctagaaggacgggatgtgcgggacgctgttttccccaacaaactcttcgataaagccttcggccagcctcttccgtaagttcattcatgccctccctctccacacccatgaggccatgagcatgacttaacctaagaatcgattgctgccgcagagcgcccgtaacgccgtctctggtaccatcgcccgcttacatcgtgcgccccaacctgccgaccccttccgagccacacggattgaatttcaagttgtgcatgtttacccttagctctattgattgattgagtgattgattttactcccctttatattgatttccttgttcttttattcatctgaagtgccccacttgttggcgatgggaagatgcaaatggatgtggagggtgccccacttgttggcgatgggaagatgcatatggttgtggagagtaccccacttgttggcgatggcaagatgcatatggttgtggaggaggaaatgacaacagctctggctgttcatcagccttcaagtcagagaagtcagaggtacttagcacatcttctgccataaatcattcatatataattagaagtagcttaacacatgatctggaaattcctttaactcaggatcatagtgattgagatgatggcagatgttggctcaccttcctctcctggctccccctactcccctagttccccttcttctcatcgagacgctccctcggtccgcttctcctctcgaggcatccgtaaccataagatgtaagttggttctcctatgtgcgttatgtttttgcatatattagcacatactgctgattattaacattgaaattaagaataatagactaaaaattaaattcgtaatgaaacagcacttgacaccaccatttttgagatctgaagttttatgattcatatatgctacttcctccgtttcatattataagactttctagcattgcccacatttatatatatatattaatgaatctaaacatatatatgtctagattcattaacatctatatgaatatgggcaatgctagaaagtcttataatatgaaatggagggagtagaccctagagatggatggtggtaatgcagccgttgcttcacttatttgtgcgctcacttgttaatcatgttcaccagctggcctcatttctcccactccgatgtgtccatccaagcatgttctactatcactctaggctgtgaatatgttgggtgggggattggccatctggtcagtttgggaagtgaaagttacacgaaccattggtactttgggcagatagtaaatgttgggacctaggagatccacggatagaacagtttagtacatataaatgtttgatatatctaaggcttataatttatttaggtctgtaatcaaatggtatatatgttattgacatgagaaaacattttgtagtcaataatacagaggggtgagatttatcatgttaacctttgaaacttttgatgaaatgttttaggcctcagtgtgatatagacagatcagacactgaagaagatctatattcatcgtgtgaggaggatccctacttcaatagccttgtggatgatttcatcggtgcagttaccagcaccgatctacttgcatcatcacctgaaattgactatatggcagctaatcaaagtcaatctcttttctatgctgaaagtgcattaaaacattataacaacaatgatgagaacaaggtaacttttttgcatttcttttgttgtattttctatttatgtacgaatctggctgctagaaatctgtttagatttgtttcttacctcatgctatggtgattagccctctctattcttgtcatggctttgtcatttatttgtagttatctccaattgttcccagcaataatcagattaactcttaaattaaaagttgtggtaggtcggtgaaatctaattcaattttaacttagagcatggacttagcacgccacacagttgtttgatccttttgaatttttgaaacaatattattttttgtattttacttatcttccaaagtttgtatatggctttaattattttgttgtgataccgctatccaagattcttagtattttttttattttccttaactagcaaagtacttgccttgcaacggatttcaaaagatatgtccgaagttcttcacttggaaattgtatttgccaaacataatttgcaagcaaacatccagcaaaaaaccaagccacacacacaaagatatatttatctagacttggaagatctcactaactccaactgatggcagattcaccaccaccactaggttcttttatatagtagagattttacatgtatatgtgttaaatatttgtttactgacttttattgtctttctatttgaaatatagataaagtatgagttaatcagtgccattacaagcaatgcaattatagaccggagtggttatggtcatgtaaactttgttgcaaaaggggatctacctgattcagtggatgagttctttttcgcagaagtacgttgggacattgattcttatgtgccagtttgcatggtctccttagaagggaaggaaaaatctggttagttcgaaagataaccgaaaactctattaatctgttcttttcttctaaattttaacatgtatatgtaattgatgtgtacaggtggttaccgtgacattgaagtcgactatccaagagaggttttgtgggtgttcccgtcgataagaatcattgctatgcttgtggcgatggactcaagcatccagaggatggaacgttatatgagagtggtcatatcgcttccggcagttattatgactagcagttttattgaaattgcatttttagaactttatttagctagactagaagtgtgcaatcctttatatctatgctaaactaaattagtacggagtatactcaccattctactttgtatacatcttgtttgatttgggttgaactccgagttgtatgtgatacacccgaagacgttattatcgttgcaaatattgaaaaagtcatagaaggtggcaatccactcctgggagtggggatggatatatgttgtcacaagtatgatcctatggacgggactagcaattggacatgattttaggtagattgttgaacggtgtttcattacttgttaaaaaataaaatatttatgtttcatcagttagtgtaaaaatgttttaaccggatgtatttgtttattgattacacacaaataaaccaacagtagtggacataggggttactgggttattcccgggaataccaaaaatttgtgaagtaaaattgatatatatgggtatacacatatgtaagtatttaattagatctaatacttcatcatcgatctgttttttctcaacaaatctattcttctggaatattgactcacatcacttctaactagttaactatctcaaatcccctaactctatcccactttttataaacaaccacaacaactctatcccactaaacaatatggatgaaatacttgcgattgttcagtaaatacccagatatataatccgcatccgccaaaccaacatgtgaaacatcaaagaaaactaactgcaacatcgagaaaaaaaaatgttattcaacacatttaagacggcagagggcgaggcgtcacacctttaacgagacaatgcgcatcatgtgcaagtgtaatatctgaccggatagagtaaaacacttgaatacaccgagatgcaacaaaaaaaaatgataacaacaaaaatctttagactctggtaagatcctaccatctaacttcttcctctatttcgatggtcggatacgttttcttactctagtccagtagccagaaataagctacttgtggatgcgacctagttgcggcagcctccctcatctccttatccatagccatcaccatcacactcacacatgagcctcattgcagtggatattgtctccacttcgtgcccccactgccgccaccagctttgtcgtccgctcgtcatcactgcgagtcttcatcgtcattgccaaaagccttatctaagccatgcacccccatcggcaccgcaagctttattgtcgtatcacccactccggtctccactccttaatgttgttggaaagtttgtttttgggatgaaatgattggggtgagagagaggacacgtaggagatggagaaaagcaaaaaagattatgttagcgtggagctcaccacgctaaccatccaacactcaaatatggcaaatgattatattagaggagttgggagttttcattctgaaaaaaagggaatatgatacgttgatggatattgacagcttcgatctcatgtttgccatcgctcgatgaactcacttagaacatgctcaatgtcgtgaccttaggccattcacagtgcaacatgtttctatgaggagcctcaatatgccacataggacgagatatcgagtatcaattctctttatcccatggtgcaaaggagctctagctgtggctttaattttttatgtcagcccataacattttatatttaagtcctcgtagtttttttaatttagagaatggttcgaattgtacacaaaacaccctaaaaaagggaagcatgtataaaatctatcatttctcattttccacattccccctctagcgccgccgacgcctctcccattccaacccccaccagcacctctcccctccccgccagcgacccacgttccactctgtccagtcgccatcgcctctaccctctccctggcaccgcctcgatccgggcggctgtcgagcagatcaacgcagaaatgaggccgaaggcatctccggcgccacggcaaggaagttgcagctccgtcctctcttccttttccagtaggcggcagcgggggcgataggtggcagatcaaaaatgggctcgacgacggcgggatcggtggctcgctggcaagaaggcgaagacgacgaggagggctcctatggtttagatccgaggtcattgtgaaagggacaacgtacggcgacggtcccatgtctcgccgtcgctgcccctttctctggctgccggacttgggagggacactgggttggttgtgggcgtgggggtgtgggggcccccacgcatcacgagggcacgaggaggcggggacatgacctccccaacgcaagttcttcctgtcgcttcacctttacgcagcctcagcctgacaaaacctgacgtgtttcgcgtagcaaccttgggacatggcaaccgaaacccttgctggcgcaccgaggcaccatgaacgggctaaagtgatagctgtgatctctagctaggcccgaattcctgtttaggggctcaagtgccaacatgggctgtgtttagtttttaaaattggggagaagtttaggaaaagttggtagtttagaaaaaagttgggagtttatgtgagtagaaaagttttggatatgatgtgatgtgatggaaagttaggagtttgggaaaaatttggtgtgaactaaacaggattttgtgaaacttgaccctcataacgaagaaggattataacgtgaatgaatgttttgaggagatccatctgataaccacatgattacggccccgtcgacgctgtgcaccaaacacaataaagacatggacgcttccagaaggagccaactaggcaaccgccaaccgatcggaaaactctccgccacgcgacgcaaacgaatcgcacttcgcagaggcgaagcgaagtagcgctgccttgccttgtcgcccttccccttcgactccattccctcccgcttctcgcgcaacgctatcccgccgccgccgcgtgtctccccaatcccaatcactagcctcctccgtcgaccgtccgccttcccctgagggcggcctgcgtctgcgtggctgcgccgtgccgccgtcgcgcccccgcagcttcttgcgtcttgctgcgcgccgtgccacccgccggcgcctgcgcctgcgccttcctttaccgggctaccaccctgcgccgtctctgactccccggccggcggtcgccctgcccgctgctcctgcacggcgtggctgcaccctagcccctgcccataactccattgtaacaccgcccccagctcgattgccgcctgacacaaggcagacagaggtatgaatctggccttgaattgaatagttgtgagtcttaatcggtacggaactatggataatgatgcaaattgtagtgaatcggcaatgttaatcttagaagagtagattgtggtgcagattaaagaaattgtgttgtacttattttatctatgtaagatctttaatatttgaattatttatatttatatctttgcaactttcaaactttaggtgttgattttagtcgatttgtgatgctatgagatacaattgctttattatgtcataatccgagcaaattttgtgggctaatggcgttattaaattttggaacatgaagtaggaacacccaacaagaaattcctggagctgccattgcggcgctgccttccatggagaccgagggctggcctgccctccagcctctgctgtgcctcgcctggatcgccactacactccccatcattgtcgccgcgctgccaatccccgcagctgctggtggtcacctccttcgccggctgctctcggccttctcctcccgcggcaagaccgtgaggccctcccccgcctcatcctctggttcctcctcttctaaggcggtaagatcggttcaaggtgccgcagcacctatttgctgcttcgccttttctgttatcattcgacaatcccatggagttagtatgattccttggtaaacgaagcttggttagaccttgataagttaagcgaaacttgttcaaagcaaatataggtttgggttggtttgaaaaagatataaccgtggattgtttaaggccaaagtagctagctactgttttgtagtgtttagttgatgcaaatctgaaatattatcgattgattgtgagaagatgatacatttggaagaaattagttcttaaatgtttgggaaccacagttctggacttaaacaatttttttaattggtgtttgtctacaggatatacagccagcttttcttgtcaacttggagatttagttatgctaacttagctatacgaaaaatacataccaagccagttttgtgagtaaaaactaacattatatagtaggatcgaattgattcctcatcggcttttcttgagctatttttcatccaattgatgatcaattgcacatgagaacacgcaccaaatttgtagttcttctcatattcaacttctgtataatgctgataatctcagatcgatcttttctaatctgcagaagttcactgttccacaaaaatacttcatgcatttttatgtggtcggagtgctggcaacaacaattttgcttctggcaatatggttctatgcatatatgaaaatgacaccattattgcctgagtcatcaagttattccacaattgccagccatcttgtaggctcaaattcattctcttttggtcgtgttcactcgcgcaccatgggacacaagtatcatgtctggcgaacagtatttgtacttctattgatggaaattcaagtgctgagacgactatatgagactgaacatgtgttccactacagcccttctgctcggatgcatattgtaggatatttgacgggtctattgtaagctccagcttgctttacatcctttatgttctatatctccatggcacatttgttgtgaaaaatatcccacttgattagttatcatgtcctttactttattctgttgttatgttacatgattttgcttaaaggtttctaaataattcttgtatgcagtttctgcagctcatacatgtaggctgtccacaaaatatacacacatctaatgagttaatttactgcatgatttgtcattgacctgaactgatcaaaagaaataccacttcggtagaaaatagcccaagtgatgctgataactgaattgttcaattcttgacattttatttgctttcttctgccatagtgcttatattaggaagaggatatgcattcatgctacccatgatatttttttcatactattgttgttgttcttttgttttcatgtataacattttcagattgacttatagtttggtttttcttcatgccagctattatgtagctgcaccattatctcttgctagctcttgtatccctgaagcagcagagtatcttcaaggtcaagtagctgagttcatagtaaagggtcgtgcgagaatgccagatcttgtaattgattcatcatctctactacagcctcttctgaagttggggtggacccagtggataggtgctgttatattcatttggggttccctccatcagatccgttgccatgcaattcttgtaagatctatatgctctctaatgtccctatgaccctagatatactagcaagtttcttttacatatatgggcagcatcagaaatcttcctaaaaatgaaaagaaaagaaagaaagaaatccacctatatatgctgtaagttggaactgtcaaactgcaaccataacttgttagtgtaaagctgaaggtatggcttgctggaagtgttctattttttgagagggtggagcccaccaggctttaggaaccccatttacacaaattgcttggtcaatcaacatcaggaatccttcatgaaatgccaatcagattcaatgggttatgcattatgcttgttcagaaactgtggtattatgcattgttgtcttggaaacttctaggctgcggtctatattttgaatttcatggtttgttttttattgcttttacagggaacgttgcgtgagcacaaagattctgatgaatatgtaattccttgtggtgactggtttaatcgagtctcttgccctcattaccttgctgaactagtgagtgtcttttctatgtcctcattttcagtatgtggcatatactgttttgcaaaatatggcaggtcttgttaatctgcttatttaacaacgtcaagttagattaggcctgtccatattgtcttgggtttgtcaataaaaatcatcttggggaagtttggacgggttccaattggtggaagcactagactgattagctcctggtccagcttcaactcctggctggaataggttgggggaaaaacagagaatttgcatgttgcttttgctgggatttagagtttttacactgaagctgaattccagtgcagacttctcatcaaatttgttctgttacctatttcatcactgtagttctctgagtgcaataccatgtgagagtgaatatgtccttttagtatcacccgtactgggaaatgcaaacattctttgcatggcttaaatatgataaaacaggataatattttctgaactttcatattatttcacttgtgtgaagcaactagatgactctaacatgacagcacatatgtttccatgtagcagaattggtgctgtttgacttgacagttgatgcagtagggcactgagctactaaaagagctcctgttgttttaaattattatggcattaacatttacagttactttggcttgtaggtaatatattttggcatgttggttgctagtggtggagaagacattccagtgtggttcctgttcgtatttgtggtacgccctacagtaactttttgaacaaagatagtcagaattcaactaacgcgcaattatcttctacatttagtttcttttgttttttgttccagtagattgaactatcttttttctttttcatttttgcagatcacaaacctgtcatttgcagcagtagaaactcacaagtggtatcttcaaaagtttgaagactatcctcgctctcgctatgccatcattccatttgtatgctagtgtctacgaaatggctacattatgcaaagcttatgtatttgcacacaattacgacatgtaacttagcttgatgtaaatgtgataacaatcatactacgtaccaccgtagaggctggaagtgttgtattgtataacgtagccacgcagaatgtacctgtgacacttcatgctgtgtgttatgctacacacttggatatttatcaacattcttaagcatcgggaataaagttcttgcagaattggattggaaaatcttcaagctgtgacaatctaggcaatgtcagttcctgatttgtgacttaatatcagagcacctatgtacgttaccagtagtaatctttgtgcttctacatatttaaattacatgccaattatgtcatcgatgaaacatgtttggtaatttaaacttaaatgttcgcaactcaaagtgatctagggtatgttgtgctcgtcctttgtagaaggaaaaagaagtgccgtcatgtttagagacctaaatacctgatctggtctggaaaacggaatacttcaggatttatcagagcgataccatttcaactttaagcaagatactttat

SEQ ID NO: 29451 - DNA, 7911 bp, Oryza sativa
  unsure (1)..(7911): unsure at all n locations
agtggggcccacgcggcagcctcacggtccacggtggaccggatgcacccgggctcgcaccggccggcgcggtatgccccacacgtcagccgcacccaagggcgcgggcggctgacagcggggccccacgcggcatccactcggcgcgcccgagggcgcccacgccggcgcggtcgcggtaggcggcgcgcccacgccccgatggtcgccgccggcgaccaccggcgcggcggagcggcagccgataaaggggagggaagggggaaaggagcggatggtccccggctcaccccggggcgacggtgccgacggaggaggcggccggaccagagggaggtgccggcgcggctcgggtcgacggggtcaacggcgttccggcggtcggcgaccgaaacggagaggtggacgaggttggcgaggatgcggcgaacctgaaggaggcggcgccgaggtgggaggcggtccggggcgacgacggcggcggaccggagcttggcggcgacggtggagagagagagagagcgacgtcgcgagctcgaatccggcgaggaggaagggcggcgagaggcggaaacggacggaggaggtgcggggagggtttaaatagggttggaagggggagagagcggccggaggggaaggaaaccggcgcgggaggtccggccgccatcaatggcgccggcgagatttgcgggggcaaatccgcccgtttgaacgcaagatatagggaaaaatggggggaaagggagaggggatcacggggagtgattccccccactttattgcacgcggggacggcgggaggcggtaggattcgcggcggcggtggcgggagcggcgggaggaagaggatgacgggtgggccccacccgtcagcgagggtggcgggcgggcccgcccatcatcggcgcgcgcgcggggagggaggccgaatgggccgcgggggagaggagatagagagggggagggagatgggccgaattcggcccattagagagaaggagggattttagggtttttctttttataaaattattttaactttgtttatttcttaacaattattatttgtgctctgaaaattccactaaaatttatttacgtattttaggcttttaggaaatatacaaaaatcctctaagccttatttgacttttaaccttgcacattttaattgttggagactttcacacggtttttaattattctaggcataatttagaggatgtattttagagtcgttttgggacgtgatatggaggccccctcctcctcctcctcctcatcctccgcagagaggcgcttctcgtcgtcggagtcatcggagttgtagtcgtgggcgcgcttccggagcagcttgaagatccgcgacggcgacgacctcacggccgccggcgacgggagagagagagagggagggagagaagcgagcgggagagggagagagaggccaccccacgcgcccctcgccgtcgtccaccccgcgcgcccctcgccgtagtggaggagccgtcggccaccccgcgcgcccctcgccgtggtggaggagccgtcggccaccccgcgcgcccctcgccatggtggaggagccgtcggccaccccgcgcgcccctcgccgtggtggaggagccgtcggccaccccgcgcgcccctcgccgtagtggaggagccgtcggccaccccgcgcgcccctcgccgtggtggaggagccgtcggccaccccgcgcgctgtcggcggctccgcgaggatccgcgacggcgacgacctcgcggctgccggcgacgggagagagagagagagggagggagagaagcgagcgggagagggagagagaggccaccctgcgcgcccctcgccgtcgtccaccccacgcgcccctcgccgtggtggaggagccgtcgtccaccccgcgcaccgtcggcggccccgcaaagatccgcgatggcgatgactccgcggccgccggcgatgggagagagagagggagggagagaagcgagcgggagagggagagagaggccacaccgcgcggcctgcgcccctcgccgttgttcacccagtgcgtccctcgccgtggtggaggagccgtcggccaccccgcgcgccgtcggcggccccgcgaagatccacgatggcgacatcctcgctcccggggtgggggatggggaggggccgtcggcaccgccgtccagctgcgacatggcatggatcgccatcgacgtcgtcaccgttggagagaggggaagggggaagaaacgttggggagaggaggaccatgtgggccccacagtcagtgggtccttgtattttttggtgtgtgaatgacatgtgggtcccacacatctatttttaattctaatattacataggcgccacgtcaacgccacgtgtgaagaagactcggtcaacactgccacgtaagtgccacgtcagcgaaaccaccctccaaaatcactaagggagtcaaattataccggtttcaatatttttgggagtcgttctatctggttttgtggttaaggggcacgaattagattcggacgacttttaagggagtcaaaatggactttttcctatttttttctagtttttctttttaataaactttgctaattgttattgttgcttaataattattttcggtgctctgaaaattcaagtaaaatttgagggctcattttagaccaaggagaatttattaaaaattctccgggccatattcgaatttttcttgtgcgcattttaatgtttgccaatttcttttcgcattttaattaattctattattcctttttagagaatgatttttatttcgggatgaatttatcaggacgtgacaaaagcattgcatttcttacatatgcactacaactcttagaatgtgaacaaagtgatccaagtggtagaagtattttcaaaaggcccattttgacctaaagttaaaatgttgtgaaaatgataaatattcaaaactactagttggacactctttcaaaaggtctttgatatgttttccaagctttagtttgcaaaaaaaactatttgtaggatcttgttttggagcaaaactatttttctctctacaaagatttataaagggaatttgaaatggatcccaaaccaagttagagagagttgacctttcaaatgtttttggtttttgaatctcatccaaaagaccaacctattaaaataaatttgatgcgaaaactcaccaaaaatcttaactagaccatatatggtcactttctagcacttgggtgagtttatttcttaaacctgaataattgcatcttttttggctcaaaatcatatttgaacttcatgcatattagtttatctcaaataccatttcattttcttcttttcgcatttttggaggaaggtattttaaaagagagcttttgtagccttttgctaaaacatggcctttactatcaaatcttgaattcatggagcaaaaaggagaattgcatcaagggggagcaatctgaatcaaacccatatcccccttgcttccaaacatgaatttttcaaaaaggttgcatccataccatttcaaaagagcctattttggacaaaagtcaaaaatcttatttaaatggcccatatttgtgaaaatcctttcaaatgtatcccaatttgtatttcaaatgtttttcaaggcctttggagtcaaaatttccatttgtgaaacaaaatagcaaaattggtctcaataggatcttttaggatcttgttttggctgaaaatgttttattttcctaaatcaaaatctattgagtttttagaaaagttttctatacaaaagttttagagttggtcattttaaacatttctctagttcaaagttttcccaaaataccaaccattcaaactctacaatcttttgaatttcagctaaaatcttgacttgactatttttggcctaaacttgcatatggtgtgttaagcctttagagccaaagttctttgtgaatcttggcttggaagtgtatctataaccctcttaaggctttacaaatgtcaaactccatggatttcaaatttgaatgtgatttgagctctcaactcaaatttactcaccctaaaggcctacaatgctcattttgtcatatcttttgatagaaaaatgatttttaagaaattattttttggaaaagttcctcacaagtataaagatcatatctgcaaggtttcaactcatttcgatttgatttgcaaagattttgaccttttctcattttgcgcagcttgctgatttttcagaaaaagactgattttgggctgatttgtgatttttgtatctccaaatggattgcaaatttgaagtagcttacataacgacttttgatcctcaatagttgaagtttacttccaaatttacttacatttttcagtggtcatttggatgccttttgaacctcatattgggtctccaaaatatgaaaaagcctgaaactttcagttggctaaaagcttgtgagatttgtttcttcaattcggttgagatcttttattttctcccaaaatgaaatttttgcatttggacatgaactatctctaggatttatggcatatttttccgagccttgttccataggtttctattgctaaatgacgccaccattgctatgtgctttttcagctaaacatggattgaaaagtgcatatcacttcttattgattatttgagcatgggggtgaaatataagatgtttcaagtactgagctctatgttattttgaaaacttcatgaatccttgagctcttttggatgtgttccttgcttgaactcttttggtttttgaaatgcccattgatatggaaaaaacccccccaaaaaaggggaaaatctaaatgtattttgactttgaaaccaacctcatggatagactcgaaattccaatcttacccaccaaaatacaaattgatccttgcttccaaagctaactacgatatcttgancctaccatcccaaattcaatcttctatatacaactggtctctcaacaaatggtcgtatctcatgatcatcttgaacccaacatttgctcatcattttcattcctcaccgatattacacacttgagcaacatacttccaatattcttaaccaagctcctcttagtgcttgacattcttgagaaaacctttggtgaggatattttaagagaaagtttaagtgctcaaactcaccccttctacatatggaatctattccaaattccctatccaaatataagcctctattagtaagggggagttttcctaaatggttcttttctaaatttgttgctttgtgcctcaaaaaaaattatttggccttgtgagtctttatttctttttgggcttttgtaattgcctattttctagctctttttcatttttgggtgattaatgtcaaaagggggagaatatttgaggatcccacatttgatcttaaagggagagaatatttgtgatatccttatgatcatagctataaaagggggaaatattctaggatcccacatcatagcattacatatgcatcatatgcataagcatgtcattggcatatatatcactcctatttactcaatgacatgcatggatataaatcaattgccaagcttcaatacaatgataatttatatgcttcatatccaaatgtggttattattaatggatttgtcatcaatcaccaaaaagggggagattgtaaagtcaagtgccttaatttgggtttggtgattaatgacaaatctaataatatgagactaacgtttttatgagcttttctttgactagtctcgtttggatattaaaataaaaattattagaggtatgtattaaacttcacatattctaacttggtctctcttgtggatccaaaatatagtgtgagctccgtcactgatcttgattgattatgtatatatgtgttcctttatatccatatgtatgcacatcttgagggggagcttattctatattttatttagtataatatctctaccttgatttgaaattatctttcatctcatctctctatattgtttatatcgggttattatctatcacaaaaagagaaaagattgaaagatcttggattaaacaatttgtgtaattgttgctttgatgatagatgataaaccgatgtttatgggattaaactctctttttcataagttgtcaactaggttatttcccgatgatgagatgtggtagatatgcattctttggtgatggaccttaatcatgataaggatgaaatgcatggagataaaacgatatgtaccacttcttatctcctactttttgataggttcatatatatgatttccatgttattgttatataagtgtgagactaatgtttactcgagtcgtatcttatttagtctcatttacattaagaacatggagatcatgaatgtatgtgttttatgttggtttacatcattactacatatgccttctctatgtgtataggataaacccccattggtcattctctaattatgcatatacttcttccatctcttgtatatttatttgtatgcatatatttagggggagcaaatcctatacatttattgtgcatgttctagatccctgttgttcacctattatttatatcggatctttgcacttgagcttgcatacgagtatatgacacttgtgatgttaatgaatactcaacaaacatatccatatctttcatatgcaaccggttggtcatcaagtgaaggatgacaaccgatttgttgagactaatgttctccatttgagatgtgaaaaggaataggtcccactacgatgaggctaatgaatgacaccatgagttaatggtcaccaagccaaggacatcatcatgttggcaagaatgaagtcaagcttgtgatgagaataaagtcttgacaaaggatggtaaagacctcggcataaatatggttcaaccgaatggtaacaagtgttgatgttggctcaagcattgaccccaagttggatggcgcaaggcaaaggtataatggagctaagaatgttttcttagtctttttcccggtttcggtgtttggtgtagaccggatttgctagatagacgccgcactatcaagaggggtctatgaagcgagcatgtgtatgatcttgtgccatattagttcatatgcatgtaggttcatttggtgggctcgtcaagccaagtgtgatgagttttctcatgtcccaaacaaagagagaagtgagcacgtccaataggagtgagtgacatcttgtgggtatgtccggtgtatatcctttggagagtgagccctttctccctgtattaagttgtgtttcttggatgaattgttcatgggttggatagccctttggataagctttccatagagtccaagaacgtcaaattccgagacccgagtcaagagatatcgccgttttactaacggccggttgagctgaaaagtgacctgcggtctaaccgctgccattacggcggtctgatcgaagtatgttgtccggtctaaccaccactcccatggcggtttgactgctcatcctgattttgaaggaggtctcgtcttggcgatccagagccgctagagccgcagccggtcagaccgagcccctggcggtctgactgagccgtggacggtctgactgtccgctacactgcggtcagaccggccaggtagagtaggctcaattattgccctattttctagccgttacaaagtagtctggtctgaccggccacactatggcggtctgaccggcatagcatagagttgggtttttcgaccccaacggctagttttgttgattgggggtatatatacccactccccagcaacaagggcaaggttttggcactccattgcattatcttgaacccttccaagagctctcacacccatgtgcact

SEQ ID NO: 29452 - DNA, 3478 bp, Oryza sativa
agacggcttgtagaggtgttacccggtgacctctacgaggagattgtggaggaggcccggcgccggttgtgagtggtttggagttcaccaccttcggagtgaaggaagaactatcctagtgatcgaggcttgggtagtcctctccgtgggtcggctcccgccttgcccaccccttgacgaagggggcgtgcggtggcttcatggttgagtggtggagttgggctcgcctcaacggggattaggaaaccggcgagtttccgaacctcggtgaaaaattccttgtctcttgtctcctttattttgtgcaaatttactttgagcaactttacatactagagcttatttgtgctattatcaccctaggcttgcaaacctcaacataggctagcttctttgtgcacttacttaagactagttgatttaggttttgaactgtacaaaaccgttttgatttacgcttccgcatacaaaactcggttttagccaaaagttttaaaaccgtgttaacagtgaaatttagtaagcccggagtaatcatcgctttagagtcagcattgtcttcgaagtcctgagattagccgatgagagttatcaagtcatcagttgtcggattcttgctatattcggttaaggaaattgatctactaaaggaagcttatccagaagagaccaagttcaaagagaatgcggcatggcaagttatctattaattaggaatagtttgttagtttctactggattatattgctatattatattatcatcagccgattgccttcatatcattatatacattggacatatagccgatagctcaaaaccctatcgctatcagctggcattggctatcggctggcatcggctatcggctggaactactacatcggcttgtcagccgatcatctatttgatctactgtttacatatcttgtcagttgcaggatcaaactgactggcacgcccgcatctcatcaacctttggacctgcacaggagctaagcagatctcccaggccagtgtgtgtttttcgcatcaacacatttttgtcacgcccagtgggaccacgaattttatatccacatgtctgaagaagaagtcaatggcaagatcatggtcacagtggagaatttaacagaggaacagaggcaacagacggagcagtttgtagctgattttcaaatgcgttgtcttcaatgtttcatcatgacaccagaagggccaactcagaagactcgattccccaagccgatagttgacaaatacttcaagatacagttgatgaagcagttcatcgcgcattgtttgagttttggcgaatacattacaaaatttgatcaaggtaatagttgatgagttaattatttagaaaagccagctcggggggcagattgaagaacaacaacaacatcggctcggggggcaagcacatcagcggccagaagaatctcaaagacatcagaataaagaagattgggctgatagaattgcaaaattagtagaggagcagtttggacttagacctaaggaacggatccatatgtatcggcaaccatatcctcaatggtttgaaagagttccattaccacaccgatacaaggttccagacttctcccaatttttagggcaagatgatatatctacaatggaacacatcagccgattcttagcgcaatgtggggaagcatcggctaaggaagctctaaaagttagattttttccgttgtctttgactggatcggctttcacatggttttcatcattaccattaaattctatcagaggatggaccgatcttgagaagcaatttcatgattacttctttgctagagtcagtgagttgaaactttcagatttaatatcggttgagtagcaagaaggagaatcggctatggaatatattcagagatttcataatgtccgcagccgatgttatggtttgagcctaagtgatgagcaactagccgatctcgcattccaaggattgtcagcacctatcagagagagattcttttgccacgagtttgacagcctggttcatctaatggaaacagtatcggctcatgaaagccgattgcaagaagcaaaggaagattagttttggagttatcaagacaagaaattttgaagcatgaattctcatactccaaaactaggggggcatgtgttaacagtgaaatttggtaagcctggagtaatcatcggtttagagtcagcatcggcttcgaagtcctgagattagccgatgagagttatcaagtcgtcggttatcggattcttgctatattcggttaaggaaattgatctactaaaggaagcttatctagaagagaccgagttcaaagagaatgcggcatggcaagttatctattaattaggaatagtttgttagtttccttttttcggaaagttttttctttagtttctttcttgtccgacaaggactagtgtctccctatgggtataaatatgtatacccggggtcattgtaatctatcaatctatcgatcaatataactactctcggcacatcgccaccctctttaccgaggtttttacttatcatccgatggaacttggtacctcacgcggggctgcatcggttcagtttgatctccggcgaacgggtaagtcctacgttccgccggccctggtgaatctattggctacattggtgttgttcaagggttttgttgatatatttgcctacctgatatctcaattctatctctagttgcattgtgtttagagacgcatcggtttagttggaactgtctcggttaggtccgatctcctgtcttagccaatatatctctacaatcacattgctgttataaatagatttgttatatctatcacattagacatatctatcggctcatcgagtactatattatcatatacaatctcgtgcaacatcggttaggttcgacctactagattgttgttgataatataagtcttgttaagccgataggttcatgctagtgttttatcggggtgctagccgataagttatctggatgttgcatcggcttataaggattgcatatacatataagttggatttagcaaatccgcagcaaaggcttcattgatcaatctaatcttgtggattttactacatcggacctccagccgatgtatgctttaaccttcggatcaatgcttgttctactatatcatattgttagccgattggtttctactggattatattgctatattatattatcatcagccgattgccttcatatcattatatacattggacatatagccaatagctcaaaaccctatcgctatcagctggcatttgctatcggctggcatcggctatcggctgtaattactacatcggcttgtcagccgatcggctatttgatctactgtttacatatcttgtcagttgcaggatcaaactgactggcatgcccgcatctcattaacctttagacctacactggagctaagcagatct

SEQ ID NO: 29453 - DNA, 5228 bp, Oryza sativa
atcggactttctttttagttttttttcgctgttttttttatttgtgacggacaaaggaaacatctcttaaaaaacttattttttaagtagtactagaaaataggcccgtacgttacaacgggtgaagactattttaatcatattattgttagattttttctgaaaagtatatgggatttttatttgatagtattgatatctaatttagcacccttatttgggatgatggtcatatcatgtacgatgctttcttatgctctaacaagaattctgaagcaattaggagtataactcccgtcccaagttagatgcgagtttttaaaaggaattgttgtacgactccttatgtatttttaaaaacagataaacttaaaaaccgacttaaatacgaatgacgttgcaaggtatcaacagaaacatgtacattttttataaaaatagagatttccgtttgatttgagttttgtgctgtatattttcttattggtgaaaaaaaaagttcgttggagcaatttatgtggtatacttacatacatgcaacattccttgctgttgctggcccgttggatacgtgggcaactataaagagtgaaattcacggcgcccatgaagaatggatatagatataatagtcggatgataaaattaaaaaccaattcaaatacggatgatgtatcaaaattctgacgaaaacatctttagttttataatagaagagatagaaatatagtcatatagagataaaggtgtagaatattcaatttcggtgcagataatatcttaattcaatccatatgcagattccatgatttctctcgataatctataggaaagggaaacaattttatccaaagagaattacaatcattaatcgatagggagcagaaaatctccttgtattagtagcaccaactaatagcagtgcagcatgtatcaacaccgatccgtgccattacgtgactgattaattaaatgcaaccgtaatcaatcaagtctctggttacgaagtaaatccatgcggacgcgcgacgccaaccaacacaggagacgacgcatcgtcgcacgcagaggcgatacgtacgaaaatcaggcaaaaacatcttaaaattttataatagataaagataagtagacagatttattttagttagtaaccaggattaatttgcatatatcacgtttgccatttcatctaacgccatctgaattgatttccctgctatgctgtgttccatacggtgcaggatacaataccacgagctgattatccctcctgacttattcctgggctagctacgaacaaagattctataaagatgtatttgctattaatgtaagcgaacgcccagcttttctatattggtgagaggtgaatcagcaatgtgtgccttagtgcaccatttacctctacataagggtggaaacgagcctggctcggctcggcttgtaatggcttgcaacaaggtaggtttggctaggctcggctccggtaggaaaacgagctaaaacatgagctcggctgtttcttggctcgagctggcttgcgagccttccgttgaagctatataatttggtaatcattaagaaaaacaataacaaatcatcaacatgtagaaataaaataactttatatattaaattcatcaaaatatagatgataaattacatattgacaaataatatgttggaaatatagtcatatatcggcatattttaatccaaaatattaagacaataatcatagcatgaacaatgtggggtgatttagtgataaaatcaaacataaacaggagcatgcttaagatagaataagcatcatcatcatacatagaacgcaatagcattgcgactaacagaaatatcaaaaaccgaaataacagtagagggttataccctgtgaattgaaagtccctccgctggattgtgaggcagaactgcctccgttggtgttgtcgatcggtgcaccagctccagctcccgctcccggcgcgccatctccaggcgcggcagacatgggtgatgcagacgaacggtcgaagacgaacagaggacgaggagcagtcgtgcagaagcactccccaaaaacctgatcacccacctacccggtgcagatctcaggcgaaggtgtggttccagaggccctgctcgttccgatctctcgtgcacgcaagcgattagaaccggggaagcagtagtagcagcacaggcagcggcagcgcgaggaggaggaggaaccagtgtttggaaagtaaccgaagagatctgatcgggttgcctctttccctatagcgcaggagagaaatccgcccgttgtcgcagtaacgacgcgatcaataggtattgaattgcctacccgttacagaggcaatcacacggggttggattccgatccgttgcaaaaggataaagagagagagagagagttgcaacgcacgccacgcctctccctcgcccttgcccacgcccatggcctaggcccggccccgcgcgcgcgcgcgtgtggctttctgatccccacctcaaccggtcaacagggagcctctaataactccctatttaagttgagatactcctcttttaattcctagggtggtattattatccttaacatttattatgggcccttgagatttaatagaaaaatcgggcctagcccatttattctaacaatccccaccaaatttcatggcacataagaaatgttctcaaagttgtgcctatttgatataccagtgttttggtggagactgttaagttgaacttccacctaggaaatgagctacatcagaccacaactgaacaatggactatgccttgaattgtcagtcttgtgtgatcaggtttcactcaaacccttgactggtactgggatgccgtttgcatcccctctgtttggagcatataagtcaaactccagccctttcatgagtatctagagatcgcccaaatctcatagactgtgactagcaatcgaactcatataggtgtgttccttctgagatgttctgcaggtcaacacctctgcttagaaaagccactcggatcacattaaggcataagccatcctaccatgcagagtagaagagaagtacatcatgaaaatgagcccttttcaagggtctcttatctcagccacacaatagtttgtttcgccatccaaattcacgggatctccgatcacaatggacaggtttccactattgtgcaaccttaggtgggtatcaagccaatttccctcgatgcactgtctatcacattacgtagtagccccttggtaaactaatctaccagatttttatccgtttagacatagtccaatgctatcactccggagtttttctgctttctgacagatttcagtcttattttgatatgtctagatgacttcacgttgtcctttgaactgttcactttaataatcactgtttgattatcacagttcgttaggatagctggcactggtttttcaaccaccggcaaatccatcaggagttcacgaagccactcggcctcaactgtcgcagtatctagtcctgtaagttctgcttccattgttgacctcgttaagatggtctgcttacaagacttccaggaaacagtgccacctccaagtgtgaacacatatccacttgtggcttttatctcatcagcatcagatatccagtttgagtcactatacccttccagtacttttaggtacccggtatagtgaattccatagctcatagtgccctttagatagcgcattactctttccaaagcctgccaatgatcatccaccagatttgagacaaaccggctcagcttgcttacagcaaatgagatgtcaggcctcgttgcactagccaagtacatcaatgaacctatgatttgtgagtatctcagttgatcccttgctattcttcggtttttccttaatagcacactgggatcataaggagtaggagctggcttgcagtcgttgtgtccaaagcgactcagaaccttgtccacatagtgggattgcacaagtgtaatcccaccctcatctcctcttagtagcttaatgttaagaataacatcagcctctcccaaatccttcatttcaaaactcttggacagaaagtccttgacctcctcgatcacattgaggctggtcctaaagatcaatatgtcatcgacatataaacacaagatcactccttctcccccaccatagcgatagtacacgcatttgtcagtttcgttcacaacaaagccagcagatgtaagtgtggtgtcaaacttctcatgccattgcttaggtgcttgcttaaggccatacaaggatttcaacagtttacacaccattccctcccgaccttctagtgcatacccgtttggttgatccatatagatctcctcctccagctctccatttaggaaagctgtcttaacgtccatctgatggacgagaagagcatgagaggctgccagagcaagtagtactcgaatcgtggtcaaatgggcaactgatgagtaggtgtcgaaaaaatcctcgccttccttttgggtataacccttggccacaagccttgccttgtacttttcaattgtaacctctggcctaagctttttcttgaaaacccatttgcatcctacaggcttggacccatatagacgctcaacgacttcccaagtaccattagacataattgagtctatctcactacgtactgcttccttccagtagtcagcgtcaggagatgaatattgtcacgtcctggtaaattcatcccgaaataaaaaaaacattctctaaaaggaataatagaattaattaaaattcgaaaagaaattggcaaacattaaaatgcgcacaagaaaaattcgaatgtggccggagaatttttgttaaattctccttggtctaaaatgagctctcaaattttacttgaattttcagagcaccgaaaataattattaagcaacaaaaacaattatcacagtttattttaaattgtactttaattatttacttagtcaatttactttttagggtttattcctaactaattattcattattcatgatttataacctccgaaatcaaaattcaataaaataatcgaacaaaattggcatgatgcaactttatttaaaaagtttttgaagatccgtatttttagagtttagattttgtcgtcgaatttttagggtgttacaaacctacccccttaaataaatatcgtcccgagatttcttaccaa

SEQ ID NO: 29454 - DNA, 9607 bp, Oryza sativa
  unsure (1)..(9607): unsure at all n locations
cttgttcttccggcactcgtaagcatttctttaattgagacacatggaagactgggtgcacatcagcgatattctctggtagctgtaactgatatgcgacttctcctcttctagccgtgatttgaaagggtcccacgtatcttggtgctagttttcccttaaccctaaacctttttgttcccctcatcggagaaacctttaaataaacgtaatctccttccttaaattctaggtttcttcttcgggtgtcggcataactcttttgtcgtgattgtgctacctttaaacggtcacggatcaagcgaaccttttcttcggcctcattgataatgtcaggtccaaataccgcccgttcacctgtctcagaccacatcagcggcgtccggcatcgtcgaccaaacaatgcttcattgggggacatcttcaggcttgcttgaaagctgttgttgtaggagaactcggcgtagggcaaacacctctcccagtctttgctaaaatccaacgcacaagctctcagcatgtcctccagtacctggttggttctctccgtctggccatctgtctgtggatgataagctgtgctaaaagcaagataacttcctagggcttcatgtactttttcccagaaatgcgaggtaaactgtgtgcctcgatcggatataatcctcttaggtataccatgaagacacactatcctggtcatatacaactcggcaagtttagcactgctatagtttgtcttgacggggatgaatcttgccgtcnnnnnnnnnnnnnnnnnnnnnnnnnaaatggaatcatatcctgttgcggtcttgggcaatccaacaataaaatccatacctatctcatcccatttccattcaggaatcctaaggggttgcagcaagcctgccggtcgctgatgctcagccttcactttttggcatacgtcacagagtgctacgtattctgccacatctctcttcatgttgggccaccagtatccttccttcagatcttggtacatcttcgtacttccggggtgcaatgagtatgccgattcgtgagcttcctttaaaattaatcccctcagtccaccctgttcgggtacgtaaattctctttttataccatagaacatctttttcgtcgattgaaaattcctttgcacgtcctgcagctaagcgttccttcaactctcggatttcctcgttgtccttctgggcttcttctatttgggttctcaaaagaggttgaatgtccagggtgtttatctgtccatgaggtactatatgtaggttcagctaagctatttcctccctaagctcaaggaccatcccttccattctcagatgattgcaatggctcttacgactcagagcgtcggccacaacgtttgctttgcctgggtgatagtgaacctctagatcatagtccttgattaattctaaccatcgcctttgcctgaagttgagatctgactgggtgaagatatacttcagactcttgtggtcagtgtagatatcgcaatggtttccaattagataatgtctctaaatctttagcgcatgaaccacagctgcgagttctaggtcatgggtagggtagttttcctcatgtggtcgcagttgtcgcgacgcataggccacaacttttccgtcctgcatcagtactcctcctagtccttgccttgacgcatcacaatatataacaaagtctttcctgatgtcgggaagaactaaaataggcgccgaggtcagcttttctttgagctgctcaaagctttcctgacactgttctgaccacataaaatttttttccttcctgaggagttgtgtcattggtcgggctatcttagaaaatccttcaataaaccttcgatagtatccggccaaacctaggaaactccgaatttcggtcaccgacttgggtgctttccattctgtaacggcctctacttttgcagggtccactgctactccaccggccgagattacgtgacctagaaaagcgacttccttcaaccaaaattcgcacttgctgaattttgcatataacttgtgctttcggagtttctggagcaccaatcgtaagtgttccgcatgttcttcctcatctttggagtagattagaatgtcatcgatgaatactaccacaaacttatctaattaatccatgaatactttgttcataagattcatgaagtaggctggggcattggttagaccaaatgacatcactgtgaactcatacaatccatagtgtgttgaaaacgcggtcttgggaatatccttggtcctaatcttcagttggtggtatcctgatcgaatgtcgatctttgaaaacaccttagctcctttgagttgatcgaagagatcatcaatccttggtagtaggtacttgttcttaatagttacttcgttcagtgatcggtagtccacacacattctcatgctaccatctttcttcttgacgaatagcactggggctccccaaggtgacgaactggggcgtacaaatcccttttcttgcaactccctaatttgctttttaagttcttctaactcattaaccggcatccgatatggtctcttggatatgggggcggttccaggtatcaggtcaataatgaactttatgtcacgatctggtggcattccaggtaaatcttctgggaacacatcaggaaatcgctgcactacaggcattccctttaggggtagcatggtaaatatacctccggcacgttcggttagcctaggatcttgatccatggttgctctcatatccgatccccagggtgtggttaaggtcacctctctacgcccacagtcaattacacctctattctttgttaaccaatccatgcccagtatgacatctagggtctgaggtattaagatcataagattggagggaaacaccacgtccctaagacgaattggtacgtctatgcaagcatgactcacagttatctcgcccccaggtgagtgtactatcataggctttctaagtcccactagggttaagttgtgcttttgactagccttcagagatataaatgaatgcgatgcaccagaatcgaagagaactttaaccggggtagaattgatagagaacatacccatgagtatgccctgatcttcctgggcctcttcagctcggacatggttcacttgtccgcgcccaagtccagtggcggtcctgttagattgcggagtcttgaatagacctcgcccggtaacaggggtagtagtgccacgaacagtcattgcattcgtgccggtccggacaggagtcttgcgtggatgagggcagttgttggcgtagtgcccataccccccgcaattgaagcagttcacattcatcttggctccaggggcagccaaagttggtgtaggggtgcggttctgaattgcaactggcctgttgaagttgctaggtgcagcgggacggttggttgccacgatagggggcttccatccggatgaagtggctcccttgagtcgctgaggcactatctgaggtaggcgactcatagcaagcctcctcttgcggttgtgttccaccgtcctttgatcgttctctagcctgacgactttgttgatcaggctctggaaactctcgtgatcctgcccgatcataggtccacgcaattcatcattcagcccttctatgaacttgtcgatcttttcttcttcatccgctaggtctccaattgcatagcgggccaactgagtaaacttgttcagatattcttgcaccgttgtattcccttgccgcagccatctaaactcgttcttcttcatgcgcatcactgcagcaggtacgaagttctcgcgaaatgctgcagtgaactcctcccaagtgggttctccagcatcgttttcccgagcttccttgtaggtgtcccaccaatcactagcgggtccttccagttggtttactgcgaagattactttgtcggtttcgcgtaccctgacaagagtcagtttcttctctatgatgcgtagccagtcttctgcctccataggctcatctgccgtagcgaacgtgggtggcttggtcctcataaactctccaaagctcgatccgccgcggttgccttggttattcgcaatggcttgtaggagttgggtttgagtggccataattccggccagggtggttaggtccggtgtctgagtttcttcattgctggtcgacgcccgacgtcggcttgccatcagtgatgtctggcttgatctctgactcggtgttggtcccctctgtctcggagtcgacctggatcggagtgtccaaactggaacccagctgcggagaaggtgtagggatcagtcgggtgtgcacaatctccggggcaggtggctgtgtcgctgccgggtccactaggtaaggtgctgactcggtagctagcatactagcctctcccaaaagagcgtggaacgccggtgggtacggcggggtgaggaagaagtagcggtcacggcctactgctgtggaagtagaagcccctgtggtgctgatcttggctgctcgaagctgctcctctagctggctgacgtgctcctgactctctctcagctgctcctcaagagtatccatcatcctgcggcgatcgttatactggttagataactgctggaactggtcgccgtggacctggagctgtgccttcagtgagtctatctcactgccccaagcctggtgctcctcctccaactgaagctgctgcactgagaggtcagtcaactcagtctccagctctcccatacgtctctggtggtcgtcaatctccaacagagcctcctcgtagtagtcatctactgcctcagcccatcgtgacaaccgagtcaccatcgggttgtagcagcagggcgtgtcctgaactgtgcaaactgagttgctctcctcccggaacgggtggtgagcaaactcggtactcgctaactcagctcggtggatagagctgagtcggaggaaggcctcccgggctgcatcctgcatcgcggtctctggcaggtctcggtggtgacgtgtctgaaagctgtagtccaactcggaagggactcgggggtgaacctcgaccagagcctcccaaactgagccacactgtctcactcggtatgacgggaacccagagtatcgcagacgcctcaacatccgatgcagctcaatgacatacccctctgattgaggtaagctcaactcccaggtagcgggtgaatccggatctgccatctaattttaagaaaaacccaaagtcagttgagagtaaaacttgttttgtaaagaaaatagttaagagtaagatgaaaatagcgtttttatatagcgtttttatttttgaaagtattactaaatgggaatttctcccttagccaacttagaaaaggggtggggcgccttttggtcttttcctacagtcgtatggctctgataccagctctgtggacccccgtttttataacaggaatcaatcgtgtaaacagtaccatttccctggatcaaatagtctggtacacacgaattcatagctgaaataccaaatacacatacacgaatgtctagtacgaattattacatcataagcctgcaggcatagtcttaaatcatcggaccgagcggtccggaatacatccaaaagaagaaataggtaaggcaacagaatttaagcaacggcatgccattgccacaggcaacgaccgtactaagacctactgggcgccttcgtcttcatctccctcctggtagtaggcatagggatcctccgaagcttcatctcccgcttctgataaattttatatttgcaagggtgatgagtaccaaccgtactcagcaagccaccacagcaatgatgcacatgacagaggatttcaaaggatggctatggttcatttgcgcaaagcaagttttgtaattcttttcacaagcctaagacctagcaaagactaatcaagttttaataccattgttcatattaaacaatgacggttctgtccaccatccattgtgatcccaaggatagcttcccgccattgagtcgttatgattttctgaggacgtccacgtttccgcctctcaagaagtggctccatcagcataaaaattatcatgcaatattccatcccactcaagttaaagaatttagagtctagccaagtgtaatacatgtcccggtgctcattaactgcaagcacggctattcgaatagatttagtttactcacactgcagtggatgtacactttacccgcactccgcgactgcccaacacatgagcctcatcccaacacaagagacgcgtcacggcaaagcttttcgataacctcgcattggcagtacccgcttcgtgaactttacatcctcatgcactctaggcgtcatacgtttctagcagtgagaggagttctggcgctcccgggaagggaaaaacacacactcctacgttgcttcttgtcgttgaacccagtccatcatgattgttctcttatgggtatcctcatgtagtattgccaagccagcctctgaccatccggaacgggcatccgccattcacctggccatccgaaccgggcatccgccaacagactgcttgccacatcacacacctaaaagaagaccactacgcatggatactgcctccgctcagctatctactccgctaggtctatacccatacgagaagtgcggttgtacggggggtcgtttcatgcttaacttcatggttcggtccttaattgaccagggacggcactagccttttccggacaccacccaaatcctccagccgccccagtcgaaaacagttgtttaactttattttcctttcacaaatcatgtcatcaatatcatggcaatgtggcgctcatgtctctacatgccgcatctcaattaccttcccaaaggtaattgcccaagcatatagcatttgataaatatgagtatgcatgattctagaatagcatttctaagcaattgtcataattgactagagactcatacgtaaacatggttacgaaggaataaggggtaaacaataatcaaggcatggcataattacaagtaggatgttcataattgcatgcaattttatttgtaaacaaaacaatttcgcaattgggatcaacatgttcaaggaatagtgatgacttgccttactcaaggtcttgcgggtcttggccttcacctggatccgcggctccctcggtctctataattatgtgcgaaagaacaatttgaattcgattagaattcaaacaaaatccaaataaatccaaatgaaagtcgaatgcgaaagtcgattcctttattttaactttattattcgcgaactaaggcaaacccaatttcgattcaaactattttgcgggtataaatgttttgttgtcataagtttttaatttaatctacccgagcattatatccatataataggttagagatttctatcgcgagctaaatatcggacgaaatcctagaaatattacatgatttaatttagtctatgactagatgattaaatataatacacggctaaaatccctaggaattaaatccgaatttctaccgtgaattgattacttatagggattacccaaaaaaataatatataataatccataagaattcatctatttgtttagttattaactacatctaaattattaccgcgaattgatttcttatagaaattgccaagaataatccataatttatattaaattttgcaattctatgactataattaacctataaaattccaattattttaaattttctaaacttccctaatctccctctaattttctatttatttcctttttctttttctccctttctttttctttttttttctttttcttttcctctctttctttttctctctctgccggcctctcttttcctctccctctctctctcggctctctctcccacccgagcggtggcggcggtggacgcgaggggaacgaagggcggctcaccggcggcggcagcggcgacgacggcggcagcgacggtggcgcacgccggcgcgggagtggcggcacggcggcacgagaacggcggtgcgggggcacgggaaaaatggcgcggcaacaccttaaatgcgnncncggtagcggggagatgaagctccgncggcantnnggngnnggcccggtanaaaggnacgtcgcctaggggaatgggtgtggggganaaaanaagggctgggggttttatagggtgtgagagagagaaaaagaggggcggtaaagagggtagcaacgcggcgccgggggggcacaaagggtccggccaaggggccgcgaggcggcgatggtacgcgcgcggcgacgggacgcacgtggcgatgggacggcgcggcgcgacggcgatcgcgacggcggtgtagggctcgaggcggcgacggcaacggcacgtggcgacggcgacggcgcgcggcgcagcggcgggcgatgggacgcgcgcgcgacgagacgggtggtgacagggcggcaacggtggcgcgcggcgcgaggcgggtcgcgacggcgacggcgacaacgcggcagcggcggcacggggcgcaaggcaacgtgacgggcgagcggcgacggcgacggccaaaggcgacggcggtagcggcggtgcgcggtgcgaggcgtggggcgcgggcgcggcgtcggcgcggcagcggggcagggttaggctaggggacctcgtcgaacacctggcggccgacgaatagcgtcgttttctatttacccgatttaagcctatttatttatttaaaattgattctataaaccttaatttttgtacaaatgaagttcactcaatatttgtgttattccaaccaatgggtccacccttgattaattttacccatattttatttttatataatttccttgaatttaattagagttaattcttattccgacacttttcaatttaattgatataaatatagtcgtaataatattttactcatttctatactcactaaatattattttaaattgtactttaattatttacttagtcaatttactttttagggtttattcctaactaattatccattattcgcgatttataaactccgaaataaaaattcaataaaataatcgaacaaaattggcatgatgcaactttatttaaaaagtttttgaagatccgtatttttagagtttagattttgtcgtcgaatttttagggtgttacagatacggaggaactcggcgagtttagagtgttgtgggggtggtggtggagcattatgttgtggcggattttggatgtggtggaggaaagcagccatcatgttggcctgctgggcgaggatttgggtgaggatggagttggtgtctggtggtggtggtggaggcgggggaggaggtggaggtgggctgccatggttgttgtggttgctaccttcgggttggttgccatcaccggtagtagcacttctcctggttgtcaccttctaaaaatcccacacagacccagcaaacagagagagctgactattaaaactaatcacccacgactaccataattcttgaatttattattgctattaaatgggttcattaaggttcaactggcttaagcaaataaaataaagacaggctccga

SEQ ID NO: 29455 - DNA, 786 bp, Oryza sativa
aactgggattcaatatgttcaaggatgatgtgacttgccttgctcgctttcccaaacgtcggcttcaacttccacgaagagcggatcttccgaagctgcagcgtctacacgaccaacggaaaagaaacggcttttactctactaaactccatataacaagcagaaacaaagcacaaaaatgcgttcttgacttcttaaggaaaaattagagacttgaacggtccaattccgagttcaaatggccaagttatggccatttgaagtttatatgctctttaaatggatatttgcgaatttcttcatttaaattttaatttaaaatcggatttattgcgtcagccgaggggaggaacgcgcggaccgggtccacgggagtggggcccacgcggcagcctcatggtccacggtggaccgggcgcacgcggcttgcgctggccggcgccgtgggtcccacgcgtcagccgcacccgaaggcgcgggcggctgacggccgggccccacatggcagccgcggggcgcgcccgaaggcggccttgccggcacggtcgacgggaggcggcgcgccagcgcccctatggtcgccggcggcggccataagcacggcggagcggcggccgaaagaagggagggaagggggaaacgaaatgggcggtccacggctcaccccgggtcgacgacgacgacgggaacggcgactggagcggaagaaagcggcggcgcggcaccggtcgactgggacggcggcgttccggcggtcggcgggcgaaacggaggggtggacgaggt

SEQ ID NO: 29456 - DNA, 18143 bp, Oryza sativa
catgttggtgtggagaaattttatgttgtctgtacttatttatggcctaatgtcacgctacacttacatgtttgttaaagggagttaagaacgaaagtttgccagaggtggtgcacaatgtgaagactttagctgtcagtgtgcttttgcttgatgtggataaggttgttgacatattgagatgctttccttgcttggagaacttgtacttcaaggtattctttactgaaggtttattgtataacttggagtagtatttattaccgctcttctaaaatagttaatttttgttcttcatgtcctttttcagtcatgtgaattgacctcaaaagttgtgtggcgtaaaaaataccggaatcttaccaagagccttgacattcgtctcaagacagtagtgttggaagattatcggggcatctgggcagaagttcattttgcccaattttttgtactgaatgcaaggacgctggaagctatgaaatttttcgtaacatgcaagattactataaggggtttgctgcagaacagcgaaaggtgcttcagctggacaaaagggcttcgagtggtgctcgtttcatatttaccacaaagggatgtttccacgatgctgcatgtattgagcatgtccaagatttgtcatttactgatccctttgaatgtagatgttgaaatcggtttggtcctcgggggacttatccttgattatccccatcttgtgtttcttccaacatgaatcatgtattggttctcagaagtacatcaatttgacattatgttgtctctgcttgggactaggtgcaaaagatggtattagaatttggtgtttcaaaattggggaaattgtctttggaagttctgacatttttagtgcctgtcaattgttactaagcaaacctggttgatggacagaacagcattgagaatttcaagctaacccggtacctaatatcaggtgagttattatataaaatatggctgcttatattttagtgcatgcttggcttagctgtggattataatctgatgctgatactaaattttagaatatattctacggttttgtttattttcccttctgttgcatggcactctttgtgattgttatagaactatacctgaattcattgtttgtaagtaaagcatgtaagtaactactagtatatgcaattcgccaattcccatgtcatagtttgtagaaactagaaacggccacctgtttatctgcgctggaggctctatttgcttcgcatgcgttggccgtaccgtagacatttggaatgaaatctttggtatgattgttcaatcagtcgtgctgaagctgataatgatgtttattttttatttttcactccaatacttctgatgttattattttcacctcagtacttctgatttgtactctgtcaacatttctatgtgtcggcctagggggaaaatcatccgaaatgtggctcgcaatagttttactaaatcccccccccccagtcaaaatattccacgatcttttactggaatttacatgacacgtgaactaattttaatcaaacgtaaccctgttaagagtttttcataaataaaactatttgcctcctacatccggtacacctcctattcgtcatgttcatggcgtctaagctttcatggcctcacggccacttgctattttattttcaaaaatgcaaaaatttgtgagatatgtatgtactccctccgtcccaaaaaaaagtagattaatctaggaggggatatgatattttctagtaaaatgaatctagacaaaagatgtactaggagatgtcacatccttacctaggttgagtttttttttacggagagaatatattagaagcacaaaacaatttcttatacaagataggcgatgtaccgtgccatccgcaaagcaaaggggccattttggcatgagataccagatttttttcgatgtttggtgtcactggcggtctacttcctccgtcctaaaaaaaggcaacctagaagaggatgtgacccctcctagtataacgaatttgtacatatctacagaaaaaattatggagggtgcattacaaattacttctttttaaatagtaataaaatgttaaagtttaaaaaattaaagaagttaatccgagggagagggggagagggaacggtgcaccccgtggggaaaggagaggatgaaggggaaaggcggcaccctatggggggaggcggcccgtggtgtggggggatgaatctagggttagggttttttttttggtactagggttttgattgattcggaaccgatctgagccgtccatcaaaacgaacgactcagatcgattaagtgtcaggtcgacctccattgccgtacagcaacactgctggctgcgtgcaaaacgtggttagattttcggttacagctcacatggcaagtgaaaggaggagtagtgggaggttaattagactttggttgcttcctgggccggacgcttggttgcgacctgaggaaatcgggccgactcggttgcgtgttgaagaagaaaataggctgaaaatggcccatagagaaaggaggatttttatttaaataaatgctgaaatgatgtttgtactaagatttaaaaattccaagaaaatttcagagtgaagctaatatggacagtttaataaaaattaaatccaaccatattattttatttgttacacttactttagttgtaaattaatttaactatatacctaactacttaagaaatacccaaataattccaaaaatttgtatttgaattaaatagataatgtaaatatttctcatccctttgtcaattttctcgtcttttcatctcattgcgacacacggacactttttctaatataatactccagtataagtctaaataattgtgtttgatctttttttctaaatcggaggcaacctaggaacgctcacatatctctattaccgatttctggatccaaaccctggattttcattgggtcacgtgactctaccagaatcagccagaatcagcggtacctcttctaaaattcgtgccacgtgggcttctctcccttcggcgggttttgccgcatcctcgtaaaaacaagcgagcgtaaaatcctttgcctctcctttaggccttgtttggttgggccgttcccggccaggattggggtccaatccccgtcgatcaccccggcgaggaaacaatccaggcccatccgaaattgtgtgttcggttaagcccagtctgggttttaccccggcctatcccggcctttccccctcacccaggcccgggaaaaaaatcaacttctcgtgtggcgtggaaaaattcctcacgacgggagccgggaggcgacgcgcaacacgcgtagcggcagcacgacgtagaggcgattcgaggtggtgcaacggcgggggcggcgcgacgcggaggcgatggtgacggcacggcgctctcctccggccgccatcttctctccagtgagcacgcagccttttcccctctcccctcctctttcaaagctagggttagggttttcttcttttctccctttcccgtcgtcgccgcgattcgtcgtcgtcctcctcgtattctgctcgatctggtgagtcttgatctgggtgagaattagtgagttcttgatcagatggggaatgagctttttttcttggttgggtgaggatgagttcttgattcaccaccaccgccgccgcacgtcctaaaccatatcattagttcttgatttgggcgtggtgagttcttgattgctgcatttcccggagagtaagatcggagctgcgaaggctgtacatggcaatgcagaatgtaataactctctggaggttagaagagggtaacttgggctttaaactgtatgatttctctgacataaaagatgcaactaataatttctcaagtgaaagtttgcttgaaaaaggtggttttggatctgtctacaaagtaagttcagatttcagagtcacactctattaccagtagctagcaagcaagtgtttagtgttttcaaggctgaattgtacttccacacgttctaatttctagagagagaaactagaagaaggttgaggtggtcatccttttctacatttacgatatatcagttatacacttgagtctgaaactttgtgcattataatgttcactggttttattttatgtatgtacagcaagaaatggattgttgcattagttcagttcaacatgttttcataagattatacttcttgtcatgtgcaacatgtttaagaacgctgaaagttgacaagatattaatttttgtgatgtgaatataataattcctctgtcaatttgtttctgtctaaagtgttattatgaatattaatcatgcgtgatgaagatgatcatttacaactagcttatatgctatttttagaagaaaaaaaaatcattttttgtttgtgtggcatggcaaaaggcaatgcttgcataagttcctcgaagtactgtagattaaagttaatggtatttgtgtataccaatgtcaccatatggatgcatgggggaataggagcatgttgcttaatttttggatcattattctgaacatggttaaacttcagaaaattgcaattagtttgtatggtcttccatacaactatattagataatgcttaatttttagttgttataatctacctctctttggggttacccacaagtagttgtcaattgctggaattttaaattaccatatacatatcctcaatcagctctattatggtcttaaataatttttcgtaattctcctgtgatgatagttggagaagatgctgatgatggtgtaaattatggaactggaaggctgtaaggatctttttgttgcaggggcactgaaggatcaattatgcatctgcactgcacttctttcactatgtctaaaatatttattaagcatagactgtagaagctaggactgatcgatattctaacatattctaacttatattagataatgctatgtttcgactgaaaagcaaaagtgacatttgatgttcattggagattacagtaagagtaaattgcacccatggtacaataactcggcaggtgggtgcgatataatgcaagatcttgcgaattgaacatttgagtacaataacttgacaagtgggtgcattctagtacaagaactacaatttatagtattttggtgcgtcaacttggctaagcatatgctaggtgagttttttcacgatgtcaatatgccattacacaatattcctacggatattaccttataatattgaatttaatcttcaagaattatactgcatatacaatttaatcttcaagtttttttttttttgctttcttcaccatctcaaatatcaaccgaaatataataattctacatccaattttattaactttcagttatcggttattagaataaatatataaatatgattatacaaatccatgctagaatatggtcaaaataaaaactcaaaaaattaaaatgctccaaataattaagttgtcatgtaacttcttaatttattgtatcaaaatcgtacctacttgcaagttgttgtatctatacgatcacttataaagttcttatactaaattacacctttctaccaagttgttgcactagaacgctcatttctcaagttattacaccaaattacaccacctatcaagttgttgcatgtaattactctacggagtatattttgtttgtacgataagatattatcaaattccgttgctatgtttgataagatattatggagcgacaggcctgtcgctccataatccccatacctaaacagagaaaagttcgcacttctccccctctcgcacgcgcctcgccgccgccgcatcgcatcccctcgtcgtcgcagccgctacctcctccgcttagtcgccttccccccaccccggcacccccaccttttctctccgcctcgctgttgcctcttccatgatgtccctagtgagagcacggcgagggcatctcctcagacctcacacatgccggcgagccgccatctgctcctcgtcgttgctggatggggaggaagaactcggtgacctcctcggcgcccacgccgtcgccgaacgccgatgaggtccagcaggagatggccgtgggccgctcggcgtcggccaggatccgcgaccgggcgtctcgttcgctgctggggcaggagccatacatgacaatgtaacttattcttctcatgattttgctgggtgaatagcaaatgattttgcttttttgctccagtaaatgggaaaattgctctggttactgagcaattagggagttgatctggttgattttgttttggtggaacatagaagaagctgtcggtggaagagaagtgcttttcactgcatagtagctgatttatgctagatttatgagcgcgcagctgttcttgagttttggccctcttgttcagctattcattcagaagctgtcaccgaagaaagttgttgagcttagactcactgatttataagcacattgctctgggaaaatttataagcacatagcgcctcctctgctcctcacattgctctggtaaaatttataaacataaaatttataagcttcctgtttagcaagcagactcatcggtgtgtcacattcagaagataccagcacattccaactggaacctagatctgttggcctattgcatcatgtacaggcaagtctgaaaactaaataagggtaaaaccgtcttttctcctctagttaacaccatcaagtgtaaaaactaatggaagtgctacatagggaagggaaattttgagggtgcatagatagagaacttttgaagtttgggtggtagagatagaagaacaactttttttttatactacatagggaattttctctacaatatatcagtttgcgaggggtacggcgacggagatagtggcaggcctgctcattggaggacagcacctcaccgtcgtcagagctcatcgttgctgcccagctcctcctactctctaggtcagcccaaacggatgattatcggctctgggttctctattcggaggcaaatgctggccaacattcaaagattcatctgctcggtaggcatttattttccatgtaaataaatcttcaaactctcttcatcgttgattgttaattgctttactgctttgaatgacacaaccagatttggagtacgaaaccacctcgccatcacaggcatactgcctgccatgtggacttcgattataaatctacctcgccatcgcgcccatactgttcggtgtggtgtcgatgctcctgttgagaagtagcgcaattggttggttgcttacttaggcttaatattgggttaatgtagatatgaccctatggccttttattgtctttattttaaaatatatatatatattctgaaatacaggaagtatattttgtcccaaactaaatacatcacagtaacagcatggttgccttttttcttagattattttttcttcaactcaacattagggaactacctgttggtattaaaattttacactaataattaaataagtcaacttataaagcgattcatataaggatgtaatctaactcaatttatttaaagattgttttgtgttgctcaaacctacaattatgatgcattaataattttgtacaagatcatcggcttcatgatatacacttatgtaagacttgtacatatcaatgtagtttttaagacatttatgaactgtgttttgaaacaatcatgttttcaaattatcaccttgcaataaataactattgctacctagcaaggtgagaatgtatagccacctcctcaaggatggttaaaaaaaagatcctttttacggttcttgtagagctacacatctggtttaaatttgtggtatctgctatcatccaggaggtatgatactatgtacatcttcgaggcctgtaaaaaggctttttgtttgtaaataatcaccttttctctatagaaatgtgatacatgccttaatttgtgtttacttgtactgatgatatctggtctttgtctaccaggattttatagtaataatggttaattatttgatgatttcatgtaatgatggacttagtcaattgcgagctataataagatgccaaaaaatccctatttttgaaaattcatgaggaaagcactttctaatttctgactcttaacacggtatttgtgaaatttcagctttgatctgtttgagaccaattaaactctactagcaaatttcatgcctgatgtcgacatcaagcttccatctgcttttggtatgccaacatttccttggatatttattatcataacatcatctcttcaagctcttaacaatttgatcaataggttataacttctatatagaatttacatttatcttttatttttgaattatattatattactctaagttgtatatgccaactaatataatattgatatccaattgcaggttatattattaattagaactatccgatttacctcatttctttattttgatttaggagtaactggtggtcttttctgagcacgactgaacccaccatttgataattttgaaatcttccctatacatccgtttgtggaagcaaatgctgaggactccagtgttggtgctggatcaaaggaatatgtgcacacgctcattcagtgtggcacaacggaagaaaaagactgattattgttcaaggcttgaagagagaatacagccagaacaaaatattctaggatctagaaaaggaatttggctgtaatgttactgtggtccatgattcagagctaggaggtacaaaatagcacgtatattgtgttgtatccaagttgtttggtgtgaatgtgtataataatgaatggtctgctatatatgtttgtaggtcattcagattcaaggtgatcaacgtaaaaatgttttgatatttcagtactttgaaatacatttccttgcagtacaatttgacaagtgtaattctctgcctttctgcatccatgttgagtcctatataaacggcaactttatgagttgactttgaaatttatagaactgactcatttgaatggtataattccataggtaacctgcttaatgatgagaaacatagatatcaacagttgatttcaatggtgtcacgtcctgataaattcatcccgaaataaaaatcattctctaaatggaataatagaattaattaaaattcgaaaagaaattagcaaacattaaaatgcgtacaagaaaatttcgaatgtggcccggagaattttcgttaaattctccttggtctaaaatgagccctcaaattttacttaaattttccgagcaccgaaaatatttattaagcaacaacaactattatcaaagtttattaaaaagaaaaacctaaaaataatcctccttcctcctttgggccaaatctggcccaaaatccactctctctctctcggcccacgcccaaagtccttccctcctccctctctttttccttctctctctcttgggccgccctccctccttcccctcggcccagctccctcctcctccctctccctcccgggctgcctctccctcctctcctcctgggccggctccgggcccaagccgagcggcgccctcccgcccgtgccgcgcacgtgcgtgcgctgaccgcgcgcctggccacgtgggtcccacgcgccgggtcgtcgtcctcctcccgcccggcctcctctctctctcccgaaaacctagcgccattcctccccaaaatccacgcgattcaaaccgggaattccaaaattgattagggggaattaatcccctttccttcctcttcaattccaccccaatttcccccttgattcgtgcccccaatcatcgagaatgcccgcgccaaccccggccaccttccatggccgctggccgccttttccaccgtcgtttcgccctctcccgtggccggctccctccccgcgcctataaaatgaaatcccctcgctccgttctatcgttttagccccctcccgcgctcccccgtcgcctcaccacccctccccgcctcctccctctctctctccgagcgccgaccacctccagccgcctctgctgtcgagcccgtgcgccggccggccgcgccatctcctccctcagcgtcgcacctgcttcccctccaccggcgtcgcctccgtttcgcgcggagaccaccggaggcgtgttcccgctggcgtccaatggcatcgccaccactgcaccacctcccgtcggccgttcgccgcgcctaaagcgttggccgacgctgctatcccctccctcggcacggtgacatcgccatcaaccccgaccgctgcccgtcttcgtccggagaccgccgccgccacgccggcctctccttcctcctcgtcaacatcggcttcggcagccacttccgccgtgcccatgcgccggccgatgtcaccatctccacctctggcattacagcggcaaggtcgccctcagcctcgcctccccttcgaccgaaccccaccggtgttcgtcgtcgtcgtctccgtccgacatcgccatcccctcctccggtcggccgttcctcctcgccggctcatcatctcgcggcgccaccctccgtcgtcggatttgcagtggcgtgttccgcgccgtcttcgcctccgtgcagctgctgccggaagcctcgtcgcctcctcgccggccccggtcgtcgttgcgtcgtcctctcgtcgttcccggtcgtcgtggtgttcgtccctccgtcaagctgttcgcgttcgtcgtccgcgttccgtcaagtgagccgctgcagccccgtcgttgtcttcgtcatcgcctccgcgtcgccaagcgttgcgccggccgcgtctcgccttcatgcaaggatcgccgccgaagtcgttccctcgccgttcgcctccgtcgtccccgagccgtctccgccacgctcgttcatcgttgtcgttcccacgcctcgtcgcgtggtggtaaggatccgtcctctcgctgccccgtcctagtcctttcggtgtcgcccgtgcccgttgtgcggttgttgaccccggtacccgtgtactggtgtcggtagtcgttcgcttgtgcgtgtggtgaccgtgttagtgtgcctgctcggtagccgcgtggtttccacgtgtgcaggccgtgtggtgtctcgtggagtccgtttgtcggccactcgcctcagttgacacacgggatccgcttccgtcgacccgtggaccgtctctgtgtacttggtctactgtggtcccttaggttgacttgtggggtccacatgtcaacggcgcagccttcttgtcttttccaggctagcgcttatatatgttttataattgcaaaacctaatcacaataatccgtaaatctccatgtaacaacattaaacttcggatgatcatatcttggtcatacgaacgccgaatcaacccgttcaagtctcctaatatttgttataacctaaagaaccgtgtgctttctttttatgtattgttattgcttctttataggcttgtagcttgtcttgtgtgcttcgcgtagcttctgtcgtttcgaaggttctcgaagcatggtttgcagtcgtcgccgaaggttcggaaggccgttctctctgagcaaggcaaatcgcatcatccttgagcacattgaatcccagtttataaaattattttgatttaaattaatgcattatcgctttatttaaattcccgcgttatcattgttttatttagccatgcctatttatctttggtacgaccttattattactactatcattatttttaccttgttcaccctaggaaaataaaaccccaactagtgggtactctatttatggttccactagtatgaatttaggtagatgcttcgctgtttaattaggcaacactaggtggttttataactttagactttgggaattctcatatcacttggatactatggaatggttggcttatggtggaattggacatacccctcttttcctctttcaaaacccctaaaacctgttttccggtggggtttgggtgcattccagttgtgggaagtagcaccccggccaatataaggattaagctcgggcctctattgcaaagcactaccgtactaaccacatgtctaatgggtaaggcttaactcggtactcagtctactcctgaacaaaaggacacgtatagagatggatgaagtcgttgcgacgatggatatctctgaggcaaatgaaggctacacgagctgtggctcggtaatcgagatgtctaggcaaatgaagactacacgggtcggtgcccgttagtcgagatgccatggcactggactagtacgcgggtggtctcacccctatgcgtgtggcgcacccggtctagatcctgttgctaggggctcaatcctggcctgcctgtcccgggataccggccgtaggcagggttgggtcggtacttttgttcacggctaggatgggtgaagggttatgtcacatgtttacgacgggttccaaggccatggaatgcggagtaaagatgtgtcttgtgggtaaagatgtacacctctgatcagagtaaatctattcgaatagccgtgccctcggatatgggcaatcctagcaatgtacccaagttagtggtttaattcttaaaatttgcttaacaactaaaatatggaatggttggcctgggttggcttgggacgagctgggacccagggcgggttgccagttcggtctgaatcatcgtaggccttgggttaaggcaggttcgtgtgggtccacggccttgattaataatactgtgtaactctaggatcgtctttataaaatagctttgggcaattaattgacttttaaatgctgtttactgccaaacttaacccctatattattaccccttgtacccccttgcattaatcatgcatctcccggtgtgacttgctgagtatggtggttgtactcattcttgctctatctttccccccttcagtaagagaagctttggagaagaagtcttaggtggagtcctggcttataccccagttgagcgcctgtgaagatggagccgtaggcccgctagtccgctgctgtttatttttgattgtcaggcctgaagtgcctttgtaataatgtaaatattatcgatataataaagatgtgccttttgtatcatatttgtttggtgtaccccggcttttcctgggacggggattaatacactagcgttcgggaaaaggcaattttctcggtcgcgacaagctggtatcagagccatctcgactgtaggataagccaagtggataaaacctaaggacatattttataaatgaaactatttgcgaaagttcctttttttttctccttccctaatgctatttgcaaaatgtttactcctttctttcttcttcggatttcaactagtactagttggtcagctttgtgaagaagaagatgtcgtcagttgtctgctgaagctctagaaggctgttggatccgttagcaaagcaaaggaagcagtgaagccagatgtgaagcaagagtgaagatcttggagaaccagtcacagaacctaagccgccctctagggtagtgtggttagtcgtgtgttcttttgcttgtgtgtgtagtgcgtggtttgcatcggtgggttgtgatgtaaccatgctaggttgtttgcttaatcaacttgcagaataagtgaaacaaacaacacatcaacaagaagagttagttcctttaaggtcttgtccctagttctggtctattctttccttgtatgcttcccctctcaacctctaccttgtgacagatggataacactggtaacaaaggctatgggaatgatggatccgatgactcaagaacccaagccaatgggaatgagaaaagcatcaacgaaacctcgccagagctaatccaaattgtggttaaccaaaccaacatcttggcaacagcatttcaactattacagaattggtacaacccagcaggggcaaccaacgttcaagtacctacagtccagcaacagtacaagttatcagaatttctcaaaactgagcctccaacctttgccattaccgtcgatcctatggaagccagtgattggttgcgcacagtcgagaagaagctggggttgattcagtgcacagaccaggagcgggttgtcttcgcaactcatcagttggttggaccggcttcagaatggtgggatagctacaaagcatcacgaccagaaggacataccatcacctggggcgagttttcagctgtattcaagagatcacatgttcccgcaggaatgatcacactgagaaaacgagagttccgctacctgaagcaagaagatttgaccgtcacagagtacctgcacgagttccatcgtttggcttactatgcaccagaagatgtggaaacggatgaagacaaacaagagaagtttctccaggggttaaaagatgagcttgtagtgcaactactcctagaggattatgaagattttgagaaacttgtggacaaagccatgcaactcgaaagtgagcataatcggatgacgaactgcaagagaaggattgtcaacatcccagtatttccactgagccacttcagatcaccggatcttctgttgcgcatcaagagttcctaccccaagaagatggacacaatgcagacaacaacattagcaatactaatgctgatgataccaccaacaaccatggttcttgccccattcatgaccacttggatcaagagtgcaatgtcaacagcattcaccaagatatcgatgatagtatcaatgaaggcacccagaatgacaaccctagcaattttgactctgagaaagactccaatggtgatagcaactatggtaccactgatgccaatgttagcaaggatttccaaccaccaattccaactccaagtcagaatgatcgttcccagacggacaactcagtaaagaagacattaatttgttacaactgcaaagaaccaggtcatttctccagagattgtccacaaccgaagcataacctgcgtcatcactctggccattatgcaagaagaagacaagtcactcgccttgtggtcactagagcaaacgccatacctgtgaggcctcgtgttaatcataacccatagcagaaacaatgtaccgatgctaagcacctttcctttttttaggcagtgcttagtattcatgtaataagggagaaatgtgtaatacagacaagatctatggggattcttttggaagatgcggatatgtgattatgtgcgtaattgtttactgacaaaggagacctagggtctcatatccgtaagctcataatctatgataaatcaagtaacctagttgttgatagaaaagaaaatgaagcgatctgtgttagattaaaaagccaaagagacttttgtttggactaagagtttcagatgtgtcttctttggatcaaaggcaacaaccgccagtctagcttttgacgaaccacttgaaggtttctctgaaaggcagcaggctcaagtaccacatcgtcaccagaatcatccacaactctcggagtgaagagtacttaattgacaaaggtcaaaagatgattgatagaagatatcgaaaaagatgtttattaccgggcaaagaagtaggtcgaaaggtgattgataagagaaatcgagaaagaacacatcaaggtaaaaggtgtaaaggaatacgttaaatgctaactgaggacaacatgaagagaatagtgggaagtgaacccaatgtaaagaaagtgaatccgagttgcttgttcgtgagagctattcccagttatgaaccaagtgatatgttcaaagataatctacagagtcaagattaaaaatcacatccaacaaagaagtttcagatttggcaggtcaataatcagaaaaatacaagtccagcagtaaagacatttgggaagacatcaaagcatgtcgagtgggataagttggttctcttgagaaacataattcaaagttagaatggtcgaccctcgcggcgattagcagaagtttctagcacccggagaccaggaaagctaaaatgaggcagttagtggcaagttgtcaatcttggtacccttggtaagtgggatatcatagtcgaaagcatttggtggtaagctggaaggaaacgccaagcatggtattctcatgatgacaagcatggtatcctagtaatgacaagcaggtatcgacgtataacgtgaagtgggtaacttgtatgaggttgacaccaaggatatgaactatgagaagttctggaacggaagcatcattaaactaccgcaacctagtctgagtcagctaaaaggtgcgccctggttcaagtcaggtgaagagaagattccatctgcaacaaaagatcgagccaagcagtccagagtggagaagttttgctgggtaagtttgttatagaagacgcaacggaagaagtcagaaaagaagagaaaaccgcccaacctatcttcttgctagcctcctcgaatctcggggacgagattcctataaggggggtggatttgtcacgtcctgataaattcatcccgaaataaaaatcattctctaaatggaataatagaattaattaaaattcgaaaagaaattggcaaacattaaaatgcgtacaagaaaatttcgaatgtggcccggagaattttcgttaaattctccttggtctaaaatgagccctcaaattttacttaaattttcagagcaccggaaatatttattaagcaacaacaactattatcaaagtttattaaaaagaaaaacctaaaaataatcctccttcctcctttgggccaagtctggcccaaagtcctctctctctctctctcggcccgcgcccaaagtccttccctcctccctctctttttccttccctctctctctcttgggccgccctccctccttcccctcggcccagctccctcctcctccctctccctcccgggctggctctccctcctttcctcctgggccgcctccgggcccaagccgagcggcggcctcccgcccgtgccgcgcacgtgcgtgcgctgaccgcgcgcctggccgcgtggatcccacgcgccgggtcgtcgtcctcctcccggccgggcttctctctcttctcccggaaacctagcgccattcctctccaaaatccacgcgatccgggaattccaaaattgattagggggaattaatcccctttccttcctcttcaattcccccccccaatttcccccttgattcgtgcccccaatcgtcgggaacgcccgcaccaaccccggccaccttccatggccgccggccgccttttccgccgccgttccgccctctcccgtggccggctccctccccgcgcctataaaatgaaatcccctcgctccgttctatcgttttagccccctcccgcgctcccccgtggcctcaccacccctccccgcctcctccctctctctctccgagcgccggccacctccagccgcctttgctgtcgtgcccgtgcgccggccggccgcgccgtctccttcctcggcgtcgcagctgcttcccctccaccggcatcgcctccgtttcgcgcggagaccaccggaggcgtgttcccaccggcgtccagtggcatcgccgccactgcaccgcctcctgtcggccgttcgccgcgcctaaagcgttggccgacgctgctgtcccctccctcggcacggtgacgtcgccatcaaccccgaccgctgcccgtcttcgtccggagaccgccgccgccgcgccggcctctccttcctcctcgtcgacgtcgccttcggcagcccctaccgccgtgcctgtgcgccggccgacgtcgccatctccacctccggcatcgcagcggcaaggtcgccctcggcctcgcctccccttcgaccgaaccccgccggtgtttgtcgtcgtcgtctccgtccgacgtcgccatcccctcctccggtcggccattcctcctcgccggctcatcatctcgcggcgccaccctccgtcgtcggatttgcagtggcgtgttccgtgccgtcttcgcctccgtgcagctgctgccggaagcctcgtcgcctcctcgccggccccggtcgtcgttgcgtcgtcctctcgtcgttcccagtcgtcgtg

SEQ ID NO: 29457 - DNA, 3965 bp, Oryza sativa
atggagccgtaggcccgctagtccgctgttgtttatttttgattgtcaggcctgaagtgcctttgtaataatgtaaatattatcgatataataaagatgtgccttttgtatcatgtttgtttggtgtaccccggcttttcctgggacggggattaatatactagcgttcgggaaaaggcaattttctcggtcgcgacaaatggtcaaatcaaactcaaataaaaaggtcaagctcccttcgacgatcctcgttgatcagccgtacaaacatcatacatggattaggaaaccgttgcgccgctcagtttatccataaaaattagcatatatggggacaatattgtctaatagaaaatgtctaatagaattcaacttttcttgaggaaaatgtctaatagaatagaacaaatcactatagatatcatcgaaataatctataaatattacgtgcatgcacaagctgtaaaaaatatcaaccctgctatccgtccgacgcaaatcatccgactagcatccgactgaaacggcgacaacgaacaacatgacggcgtgagacgactctattatctatatatgaatcggtccaacgccatgcaagcagcccattcctgcacggctacaccatatgcaagcccatatacaagtctagactccaagcccaaactcaggaagactccacgacacttctgccggagttttggtcgatctgaatcactgcgtgctaacttcaatctcaacgttctcttgtaatgttttcacagctgcagctgctcattttccagacaagtttttttacccttttaatatactcctctgtttcaggttataagtcgttttgacattgatcaaagttaaactgtttgaagtttgacaaagtttgtagaaaaagtagtaacattttcaacccaagatattgtaaatattactatatttatctataaacttagttaaatttaaaatagtttaacttttaatcaaagtcaaaacgacttataatatgaaacaaaaatattttttttgaagcaaatgacagcaggagatctgctggatatattagaagtattagaaataacaggttggtatataccacagtttcaagttctatttttatgcctataacaggttgcatttaacaaaatataaggctgtgtttagatcaaggggtgcaaagttttggcgtgtcacattggatatgtaggcatacatttaaagtataaaacgtagactagtaacaaaaaatttacataatccacttgtaaattatgagacgaatttattaagcctaattaatccgtcattagcaaatatttactgtagcaccacattatcaaatcatggactaattaagcttaaaaaattcatctcgcaatttacacgcagtccgcgtaattagttattttttttgtctaaatttaatattacatacatgtgtcaaacgttcgatgtgatagggtgtaaagttttggcattagatctaaataggccctaaatgcagtgatgtccaaaaccacaagcatagtttctaatttgtcacgaccggaaataacccaacgggcattccttacgtgcgtgcattattccttgtcccaggaggcaaggtacaccaaagttgatacaattcagagtttaacaagcggaagcgtaattaattaatttattacatgggcggcgaagacccagcacacacaaagacaaacgaaaaacagcggaagactagggcgacgaccacaggcgcttgacggcaggcacgagctagacaccaaagccttcatcttccaggaactcctcttctgggtttgggaaaaattgagcaagactgagtacaaccaccgtactcaacaagacacacccacaagtgcagaataaatgcaagggagtacaagggggttataatataagggttagggtttgcagtaaacagcattaaaagacacttagttgctcaaagctattttgtgaacatggtcctagagctatacaatattattaaccaaggccgtgaacccacacgaacctgccttaacccaaggcctacgatgattcagaccgaactggcaacccgaccctgggtcccagctcgtcccaagccaacccaggccaaccattccacattttagttattaagcaggttttaagaattaaaacactaacttgggtacattgctcggcttgcccataactgagggcgcggctattcgaatagattatactctgatcagaggtgtacatctttacccacaagacacatcttcctcacgtgtaaccacgtgccacataccaccacggtatacggacggaagacatgacatagtttccaacccatcctagccataacaagagtaccgacccaacccacctacgggcggaacccccgggacaggtaggccaggactgagcccctaacaacaagacaccggccctgggccatgacatttcgactaccgggccgcagctcgtgtagccttcatttgccctagagatgtccatcgacccccgacttcgtccatctccatccgggtacttttggttataaccagactgagccacaaactaagccttacccactagacatgtggaagtacagtaggtgcttttttggggccaaacagaggcccgaagaccggtccttatatggccgtggtgctactatggccgtggtgctacttgtaacaccatgcaccccgagcccagcctaaaaccattttgagggttttgaatagaggggaaggtgtgaatccaattccacaataatccaaccattccatagtgtctaggtgataagagtattcccaaagtctagagttgtaaaaccacctaatgttgcctaattaaccagcgaagcctctacctaaaatcatactagtggtaccatgagtagagtgtccactagttggggttttgtttattctagggtgaacaaggaaataataacaataacaataataaggtcataccaaaggtaaataggcatggctagataaaacagtgataacgcgggaatttaaataaagcgataatgcaataatttaaatcaaaataattttataaactgggattcaatatgttcaagggtgatgtgacttgccttgctcgctttcccaaacgtcggcttcaacctccacgaagagcggatcttccgaagctgcagcgtctacacgaccaacggaaaagaaaaggcttttactctaataaactccatataacaagcaggaacaaagcacaaaaatgggttcttgacttcataaggaaaaattagagacttgaacggtccaattccgagttcaaatggccaagttatggtcatttgaagtttatatgctctttaaatgaatatttgcgaatttcttcatttaaaatttaatttaaaaagggtttattgcgtcagccgaggggagggggcgcgcggaccgggtccacgggagtggggcccacgcggcagcctcacggtccacggtggaccgggtgcacccgggctcacaccggccggcgccgtgggtcccacgcgtcagccgcacccgagggcgcgggcggctgacggccgggccccacgcggcagccactcggcgcgcccgagggcggccacgccagcgcggtcagcatgaggcggcgcgcccgcgccccgatggtcgccgccggcgaccaccggcatggcggagcggcggccgagagaggggagggaagggggaaaggaggcgacggccccacgactcaccccggggcgacggcggcgatgagggaggcgcccggaacgaaggtaggcggcggcgcggctcgggtcgacggggtcgacggcgttccggatcgggtcgatggggtcgacggcgttccggcggtcggcgaccgacacggagaggtggacgaggtgggcgaggatgcggcgaacccgtaggaggcggccccgaggtgggaggtggttcggggcgacgacggcggcggaccggagctcggcggcgacggcggagaga

SEQ ID NO: 29458 - DNA, 652 bp, Oryza sativa
cagttgtaaacttggtttattatactctcacagaagtagacaaactgcataccattctgctgtcccgtaacataattattactttggtacaagaaaccaatgcttctaaacatagaagcgctacaaacacaaccgcgatctgctacgtgtatcgtatgctgatcgcggattgttatggaactggagatacagattacagaccggctacaataacacttaagatgcccccgtgcccacatcaactctgcaccttacgggaggaaacgacgcctggtgccgcagaagcgtgcctatctgccatggatattaccttcagcaatttgaccgggcacttatctatgcaaatatgcaccaggatttacccatgcatctatcgactacttaggctcatcttgatttattaatctccaaataaagtagtgagcagcaggtcttgcacaaatgttgctctgacactcgcttgcttccgtttctgttccctttcttcccttgtgagggatgagtcaatactgcaaatgaaaaaaaaaaattagcagatcattcaactgccaaaatttgaaatttataatgtatacctcccaaatagtcctaacatgcaggaagccatacagcagcttgttgctacacgctactcatcagtcaaacaacttgc

SEQ ID NO: 29459 - DNA, 11996 bp, Oryza sativa
atcaaccccggatttgtccatctcaatccgtgtacttttgtttataaccagactgagccacaaaataagccatacccactagacatgtgaaagtacggtagtgctttgcaccaaaggcccgaagaccggtccttatatggccgaggagctactgtcaaaaccatacaccctgagcccagcctaaaaccattttgagggttttgaatagagggggaggtgtgaatccaattccacaataatccaaccgttccatagtgtccaggtgataagagtattcccaaagtctagagttgtaaaaccacctaatgttgcctgattaaccagcgaagcatctacctaaaatcatactagtggtaccatgagtagagtgtccactagttggggttttgtttattctagggtgaacaaggaaataataacaataacaataataaggtcataacaaaggtaaataggcatggctagataaaacagtgataacgcgggaatttaatgtcacatcctgatttttgtttcaggatttataaatcatttaataaattattattagaatttatattaaatgttctttaatttacaagtgaagttaaatgtgggaaataaaattttctaaatttaaagcatggatggatttaatttttattaaattctccatgattaagtcaactctctgaaatattctcggatttttcagagctcaattcctaaatgatacaaagaacagttcagtaattatttgatcattaatgatctaattagaattgttaagagcttttcttgtttaaaaaaaatccttaatttataaatttttgtttaattggaattattagaatttattttaaaagcttagaagagaagatctaattttaattaataaattccaatataaaatggggccagataaaatttcattaaatactttgcttaattctataattcctagatttttctgggatttatttgagctaaggaagtatttttaataaatggaattgcatttcatgaataatttaaatagaaaaaaggttttaaaatcctccttttggctttgggccgaaagtcagcccaagtctctctttccttctccctctctcctccccggcccagtcggcccagtccgccgcgccccttcctcctctctctcggccgctgacaggtgggtcccacctgtcaggttcgtcttcctcgctccgccgccgccgcccgaaccctagtcgagccgcgctgccgtctccttccaaatttggccgcgcctttccttctccggtgaaatctttagaggggaaatgatctccgggatctcctctaccttttctcttttggaatcgtcggctaatttcctttggaaataggcggattcgagtttgattcggattcgtgtttccccaatctttccttccgatgccggtcgccgtgggctttcgccgccgcgccctagcccctttaaaaggacccccgagctcccctctatccgccgtcaccctcgccgtcggaagagccctagcgccgtggacctcgctccgccgtcgtcgccgtcgctccagccgtgcttcgccgccgttccggtcgtcgtcgtcgctcggggaggtcgccatcgtggtcgccaagttgtcgccgtcctcgtccgcctcttcgccgtcgctgtagaccgccggagcaccgccgtcgtcgtcaagccgaaggtcgccgccgcttcttcctcgtcgccgtcgtcgtccgttgctcctccgccgttgctttggtcaccggtgagttcaccgcgatgcccgcatcgtcctggtgccctccgttcgtgccgaagcgccgtcattcgccggcgagcttgcgcgcccgagccgccgagccgccgccggtggtgacgtcaccgctgacgtcatcgtggccgtctgccgtgagccgccgtagacccgatcgatctcggccgtccgttttggatggatcgatctcggccgtccgtttccgtgaaccgctgccgtgcgcccggtccaccgcaaaccctagccgctgacgcaataaaccccttttccttttcaaaaataattcattattgcgtcataattcaattaaaatccatataagtgttttaatccgatttaatctttaaaaattcataactaattcattgtaactcagtttaatgtggttcaagttgcaaaagttgtataaaataaagatctacatattaaaattatccataaattgaattaaatttatttaattctttttaaatgcgctttaattagatttaatcttgtaaaattcataataaattcatttgaagtcagaatgaggccgttcaagtctcataattcatctaaaattatgatctacatgtttgtttactttttatgtattgtttatttggtttttattagtctttttcttcgttttgtgtgttagcttgtcgtttccgtcggtcgttgcgaaggttcgtgagtgcgccggaagtattcaagaagattaattgaagaccgattattgcaaggcaagtcacacagatcctaaacacaatcctttgagcatgttgatcctatatttaaattctctatttatttcaactgtgcatttattttcgaatgtcactgggtggtgtgaatctattcctttgttatggcctgtttgcattgattactttattccttgataccttgggatattataacttgactagttgagctatatatattggttcagctagatattagatatgattgcttagccatgcttagaaacattagcacactattgggattacttatgactcattattatttaatgatggcttaatgatagttcacgatggtcaatcgtgattggttaaataattacttgccaactaaaatatgataaaggtgggttgtgagcacatggttttgagagtcgtgctcatggcaattaaggaccggttcgcgagctactgttgtgaaacattaaccgtgccaaccacaagccagcgtgggcaacggctttaccttttgtatagcatggttcattgcagagcaccagactgagaagtggcggagataagcccacgggggtcgctagggagtccatgccttgtttataagggggtgactatgatccgggaacggtgcactgtggtgggttgtgttatgcaaggggtaatgtcacagctcctttccgaggtaccgtggtggtactgaggcacatgctgacatgttgtgggactgtgtcttgtgggtacagtggtacacctctggccagagtaaaactattcgaatagccgtgcccacggttatgggcgggttgagcaatgtttttcgtgattagtcccacacctctcacaataattatggatgttatatctggtaataatttgcttagctcctggtttggagttagatctgtacagccgggtatggttgttcaggatggttgggcctgtgcagcatgggtgtgttgttcagtgttgattaaaatttctgattaattactccactgttttacttctcttaaatgttttgataaaagctgcttttgcaaatgagcctatattatgccatcctttggtatccttgtgcacttgcatatttgctgtgtggcttgttgagtatgtcatatgctcactcttgcaataatcaatcaacctcagttgaagaaaaaggatccagaaggagaagacgtttggcttataccccagttgagttgcctgtgggagtggagccggagcttcgctagattttattttccgctgcagttttcttcatggtgaggactaagtgcctctgaagtaagtgtttattgttttagttaatttgatgaatctgtatattaaattgtcagtttgtgtacctcggctgattcctggacgaggattttttgcacaaataagttcggaaattactagtgaatttccgggcgtgacaagttggtatcagagccatcttgactgtaggataagccaaatggtcaaaccttaaggactaattttccgaaaaaatgatttgtgaaaatttctcctttcttccttatctagaattctttgcaaattgtttcattgtctactcccctctctctttcaacttgagttgttctaagacattgaaacttgaagacgccaatgaggtctacttatggaggttaagaaaagtggatcgaggaaggaccgaagtgccaagtggacaagatggaatgaagtttggatcctaccttagaacctatgccgccaaactatcctcgaagaatagttagtagggtagaacgtttgttgtttgctttgtgtgtaggtatggttgcattcccatcattggagtagttcattgatgagtgtgtaactatactaggttgcttgcttaatcaacttaaacaatataatggtctatacacatcagatcagtgttaacctggttaaggacttgtctttagtgtaacccctctcctcctatcttctctaatctgcaacagatggtaaacactcacgccagtggaagtggaaacaataacaatgaagggaacccaactcttgctcaagttcttgctcaacaaactcagttaatgaacatgatgatacagcagatgcagaaccagctcaaccaagggaacaacaatgctccaccgccgcagaacaagtcaactgattttcttcgtgtgaggccacctaccttttctagcactaccaacccagtagaagcaggtgattggctacacgctgttgagaagaagttggaactgctccagtgcacggatcaggagaaagttgttttcgcttcacatcagttgcaaggatctacttcagaatggtgggatcatttccggatgaacagagcagaaggacaaccaatcacttgggcggagttcacggaggcattcaagaagacacacatacctgcaggagttgtttctttgaagaagcgtgagtttagggcattgaagcaaaaggatcataccgtggcagagtatcttcatgagttcaatcgtctggcacgttatgctccagaagatgtgcgtactgacgaggaaaggcaggagaagttcttggaaggtctgaaggatgaactgtcagttacgttgatctcccatgactatgttgattttcagcagctagttgacaaagcaattcgacttgaagacaagaagaacaggatggataaccgtaaaaggaaaatgactgtattccaggaggcacaaggtagtagccagaggcagcgtatcaagccactccaaattggtgaatcttcttccgctggtccaggatagtcgcagcagttgaacatcggtggtgagatcaaatcagagactaatgaaagcaatgaggttaacatcgagcaagctaatcatccggtgccagttcagcaggatcagtctcaagagaataacagtagtggaagggagcagcaggtatgtttaaactgttacaagccaggccactttgcaagagagtgtccgaagccaaagcatcagcagccgcaagtcaacaacattgtcgtcacaggagccaatgcagtgccagttgcgtcttcaagagttgcgtcttcaagtgttacaactcagccaccagtttcaaagcggcagtagttttctttaaagccttagaataattatcggagttatggaataagatagactgcagtttacctattccctttttctttctagccgttccgaatctcgggacgagattctttgtaaggggggtagatctgtcacatcctgatttttgtttcaggatttataaatcatttaataaattattattagaatttatattaaatgttctttaatttacaagtgaagttaaatgtgggaaataaaattttctaaatttaaagcatggatggatttaatttttattaaattctccatgattaagtcaactctctgaaatattctcggatttttcagagctcaattcctaaatgatacaaataacagttcagtaattatttgatcattaatgatctaattataattgttaagagcttttcttgtttaaaaaaaatccttattttataaattgttgtttaattggaattattagaatttattttcaaagcttagaagagaagatctaattttaattaataaattccaatataaaatggggccagataaaatttcattaaatactttgcttaattctataattcctagatttttctgggatttatttgagctaaggaagtatttttaataaatggaattgcatttcatgaataatttcatgaattgctctttaaatgaatatttgtgaatttattcatttaaaatttaatttaaaaagggtttattgcgtcagccgatgggagagggcgcgcggaccgggtccacgggaatggggcccatgcggcagcctcacggtccacggtggaccgggtgcacccgggctcacaccggccggcgccgtgggtcccacgcttcagccgcacccgagggcgcgggcggctgacggccgggccccacgcggtagccactcggcgcgcccgagggcggccacgccggcgcggtcggcggaagccggcgcgcccgcgccccgatggtcgccgccggcaaccactggcgcggcggaaaggtggccgagagaggggagggaagggggaaaggaggcgacggtccacggctcaccccggggcgacggcggcgacggaggaggcggccggagcggagggaggcagcggcgcggctcgggtcgacggggtcgacggcgttccggcggtcggcgaccgacacggagaggtggacgaggttggcgaggatgcggcgaacccgaatgaggcggcgccgaggtgggaggtggtccggggcgacgacagcggcggaccggagctcggcggcgacggcggagagagagagcgacgtcgcgagctcgaatccggcgaggaggaagggcggcgagaggcggaaacggacggaggaggtgcggggagggtttaaatagggttggaagggggagagagcggccggaggggaaggaaaccggcgcgggaggtccggccgccatcaatggcgccggcgagatttgcgggggcaaatccgcccgtttgaacgcgagagagagagggaaaaatggggggaaagggagaggggatcacggggagtaattccccccactttattgcacgcggggacggcgagaggcggcgggattcgcggcagcggcagcgctagggcgcgggggaggcggcgggagcggctggaggaaggggatgacgggtgggccccacctgtcagcgagggtggcgggcgggcccgcccgtcagcggcgtgcgcgcggggagaggccggatgggccgcggggagaggagagagagaggggggggaggagagatgggccgggccggcccaagggagggaagggggacttttagggtttttctttttataaaatcattttaactttgtttatttcttaacaattattatttgtgctctgaaaattccactaaaatttatttacgcattttaggcttttaggaaatatacaaaaatcctctaagccttatttgacttttaaatttgcacattttaattgttggaggctttcacatgaattttaattattctcggcacaatttcgaggatgtattttagggtcgttttgggacgtgacaaacctaccccccttaaacggaatctcgaccccgagattcggaagaactggcgaagagaccgggatgggctgccttcagctcgtcttcacgctcccaggtagcttcttcttcggcatggttgctccactggaccttgcaaaaacggattacccggttcctggtcctgcgctccatggtgtccaggattttcactggcctctccacgtaggtcaaatcttcgcgaacttcaatttgctctgagtcggcctgctcggatggcactcgaagacatttcttgagttgtgacacatgaaacacatcatgcacgttgcccaaggaggcgggcagctccaactggtaagcgacttctccgcgtcgggcaatgatacggaaaggacccacataccgaggtgcgagcttcccttttgtctgaaacctgtgtacacctcgcaatggcgtgacccgaagatatacaaaatcgtccactgcgaattccaggtcacggcgacggttatctgcataacttttctgccgggactgtgccacctttagattatcccgaatggttctgactttaccttcagcttctctcaggatatcagtcccgaacacttggcttttccccaacttgatcccacattagcggtgtccggcatttgcgcccatacaacgcttcgtaaggtgccatttgtatgctggtttgatagctgttgttgtaggagaactcggcataggggagactcttatcccaggtcttcccgaaatctaatacaatgcgcggagcatatcttctaggatctgatttagacgctcggtctgtccatctgtctgcgggtgataggcggtgctgaaattcaatcgagtacccagctcttcttggagcttcttccaaaagtgagaggtgaattggcttcccctatcagatatgattttcttgggaacgccatggagactcacgatcctagcgaagtagagctcggctagcttgttccctccataggtggtcttcacaggaataaatcgagctaccttggttaatcgatccacaactacccatatagaatcatatccaccttgggtttttggaagtccggtgatgaaatccatcccaatttcatcccatttccattctggtacttggagaggttggagaagtccggccggtcgttggtgctctgccttgacacgctggcacacatcacaaagggccacgaactctgcaatttcccgcttcatactgacccaccagtatttctccttcaagtctaagtacatcttcgtactgccagggtggatggaataaggactttcgtgagcttcctgaagtatcagctgtttaagttctcggttatctggaacgcatacccgatttccgttccatagggttccgtgttcatcctctgtgaaaccagcggctttaccctgtttcatattcttgaggagtccatgcatgtccgggtcgttcttctgagccttgcggatttgatcgagcaaggtgggcttggcttccaacgcagtcaagaatccacgactaactatgcttaggttcagggcttccatctgttgattaagttcgagtggaatgccacggacgttaagagtgttgcagtggcttttccgacttagagcgtcggcaaccacgttggccttaccaggatgatagtgaatccccacatcataatccttgatgagttctaaccatctcctttgccgaagattcaggtccgactgagtgaagatgtatttcaaactcttatgatcagtatatatttcacagcgattcccaatgagatagtgccgccagatttttagagcatgaaccactgcggctaactccaagtcatgggtagggtagctgccttcatgaggccgtagctgacgtgaggcataggccaccacatgaccgtcctgcatgagcacgcaccccaatccttggcgcgaagcgtcacaatacaccatgaagtccttgcgagtatccggcaagattaacactggcgaggaaaccagcttttctttgagagtttgaaacgccttctcgcattgtgggctccacacaaatttctcttctttcttcaataactgggtcatgggtcgagcgattttggagaagttctcgataaacctccggtagtatcctgccaaacctaagaaactgcggacttgagtaactgtcttgggttgcttccaatcggtgacggcggtcactgttttagggtccacagcaactcctttagcagaaatcacgtgccctaagaatttgacttcggacaaccagaactcacacttgctaagtttggcatacaattgatgttcccgcaactttcccaataccagacggagatggtgctgatggtcttcctctgattgtgagtatattagaatgtcatcaatgaaaaccacaacaaacttatccaagtattccatgaacactttgttcattaagttcatgaagaaggcaggtgcattggtcaaaccgaacgacatcaccgtgaattcatacaatccgtatcgcgtggtgaatgcggtcttaggaatatcttcttcacggatacgtaattggtgatatccggaacgaagatcgatcttggagaatacagtggcacctttaagctgatcgaacagatcatcgatccggggaagagggtacttgtttttgatggtgacttcattgagagctctgtagtcaacgcatatcctcttcgtcttgtctttcttctctacaaaaatcacaggagcgccccatggggaagtactcggacgtatgtaccccttttctttcaactcttccaactgtttcttgacttcggccagttcatttgctgccatacggtagggtcgcttgtacagaggagtggttcctggagcaagatctatccggaactcaatctctcgcttaggcggcataccgggtagctcttccggaaacacgtctccgaactctctgactatggggatttcggatagtcctatctgatgaagttctgaacttctgacagaggttgggggtgcaaagaaaacaaccggttgttccggcccttggtacagagtgacagtgcgtctcgcgcaatccactactccttggaattgagccaaccaattcattccaaggatcacatccaagttcttggtgtctagcagaatcagatccgagggaaagggaatcccttgaatttctatagggacggcagggctataatactttgctgtcataacccctccaggggtggtgatgagtagagggtttctaagcctttctactcccaactgatttctccccacgaatagcacagatataaacgagtgggaggctccagagtcgaacaaaatggtagcagggatggaatgaatgaggaacgtaccaacgatgacgtctggagttgtcagcacgtcctcggccatcacgtggttcacacgaccccgaatgacatccttcccaccgttgttggggcggggaggcgcttggccttgctgacgccttggcttcgggcatttatccgcaaagtgcccgggctcgaagcagttgaagcacagacgctgctgaccttgagcgtccctgcggccttgaccaggctgcacagtttgcgtaggaggacggggcgcacgagtcccttgttgattctgctgttgctgcggctgtgggacgcgcaccacgaattgaggtcgaggcgcggagcgaggttgctgctgctgctgttgctgctgcgaggaggatccccctggatagggattggtgtagcggaccctttggttagcaccctgttggttgcggaaattcgccaagcggcgcttgtgcgactccagttccttgtgcttggcttccaagcggatgctcttgtccaccagacgttggaaatccggataatccccagagactagacggacggacagctcggggtccattcctgccaggaacttctcttgcttctcctcatcttcccgcacatcctccggagcgtaacgggccaggttgttgaactcatgcaaatactccatcacggagcggttgccttgcttcaactctcggaattcccttttcttaagggccacgactccagcgggcacatgggtcctccgaaaagcggcggtgaagcgagcccaagtaataggctgtccctctggctgcgtagcctggaaatggtcccaccatagagatgcgggtccctgcagctgatgggcggcgaagatgactttctcctcatcgctgcactgcacagtgtctagctttttccccacggcatgcaaccaatccaacgcatccacggggttgttggagctagagaaggtaggtgggcggatgcggaggaactcggcgagtttagagtgttggggaggtggtggtggggcattctgttgtggcggattttggaggtggtggaggaaagcagtcatcatgttggcctgctgggcgaggatttgggtgagaatggcgttggtgtctggtggtggtgg

SEQ ID NO: 29460 - DNA, 8080 bp, Oryza sativa
cagagaaagagctaacaattaaaactaaccacccacgactaccataatttttgaatttattactgctattaaattggttcattaatgttcaagttgcttaggcgaataaaataagacaggctccgacacagttatgccacacaccggcataaccatgccccacacgactcaaaaagacaaacgagaaagaacacacgcgcaagcctactaactgctcgtctactgctgcgacgggccaggacggaaggtgagcaacagcgcatcctccgtgctaccgacgccggaggcttccccctcctggggaaccacgggcgcgggctcggcacgaggggtctcgatgaagcaagtccacgccagggactgacgaacaagctcgggcctggaggtgctcttgcgggcggtgatcttctggctgcggcagacgcggcgacgcttggggcgacagacctttccctgggcgatcttgagctgatgcagctgcgcctccaccgcgtctaggtccttcttgagctgcaggttctcctggcgcagttccaggatcttcatgttgttctcgaccatcccgcgacgtaccatctggtggaagtcgatacgagccgcgttgtacgcctccaccatccgcgccaggtgcacgatggtagcgtcatcctctgagctagcatcccggaaggtggcgtagtcgcgggctcctccgcgacgagggtggtagcggtagggcgagtgttgcaactcgtccgggtagcgctggtgaagagtgccgatggcgaggagagcggcgttctggcaagcggtggggaaggaatctccacccgcggtgactgccagcgaagtccgctcgggagagccagagaggatcactgcagtgacctcccaaccagcgtggggctctgcatcgtcaccctcctgctccggaagcggcctggcctggtagtccactccgtgtggataccccagaaccacgcacatgccccgcaactccaagacgaagccagtcatgtccaaaccacgacgggtgacgctgccggccatctacaaacaaaaacaaaaagaaaagcaacattttcaaaggtcagattttggcgataaatgaagcagcaagacagagagagactagaggattttcacaaataacaaaggatttttatttttgaaaatattgctaaggcttgggatctacggctcgtcctagggtcaaaggtggctctgataccaacttgtcacgaccggaaataacccaacgggcattccttacgtgcgtgcattaatccttgtcccaggaggcaaggtacaccaaaagttgatacaattcagagtataacaagcggaagcgtaaatagttaatttattacatgggcagcgagggcccagcacacacaaagacaaacgagaaacagcggaagactagggtgacaaccacaggcgcttgacggcaggcacgagctagacaccaaagccttcatcttcaaggagctcctcttctgggtttggaaaaattgagcaagactgagtacaaccaccgtactcaacaagacacacccacaagtgcaggataaatgtaaaggagtacaagggggttatgatataaagggttagggtttgtagtaaacagccttaaaagacacttagttgctcaaagctattttgtaaacacgtttccagagctatacaatattattaatcaaggctgtgaacccacacgagcctgccttaacccaaggcctacgatgattcataccgaactggcaacccgaccctgggtcccagctcgtcccaagccaacccaggccatccgttccaccttttagttgttaagcaggttttaagaattaaaacactaacttgggtacattgctcggcttgcccataaccgagggcgcggctattcgaatagattatactctgatcagaggtgtacatctttacccacaagacacatcttcctcacgtgcaaccacgtgccacataccaccacggtatacagacggaagacgtgacatagtttccaacccatcctagccttagacaagagtaccgacccaatcccgcctacggccggaacctccgggacaggcaggcaggactgagcccctagcagcagggcaccaaccctctgccatgacatctcgactaccgggccgcagctcgtgtagccttcatttgccctggagaatgtccatcgacccccgacttcatccatctccaatccgtgtacttttgtttatgactagactaagccacaaactaagccttacccactagacatgtggaagtacggtagtgctttgcaacagaggcccgaagaccggtccttatatggccgaggtgctaccatcaaaaccatgcaccccgagcccagcctaaaaccatttttggggattttgaatagagggggaggtgtgaatccaattccacaatagaccaacaattccaaagtgtccaggtgatgagaatatcccaaagtcttgagttgtaaaaccacctaatgttacctaattaaaagcgaagcatctacctaaaatcatactagtggtaccatgagtagagtgtccactagttggggttttgtttattctagggtgaacaaggtaataataacaataacaataataatatggtcataacaaaggtaaataggcatggctaaataaaacagtgataacgcggggatttaaataaagcgataatgcaataatttaaatcaacataattttataaactgggattcaatatgctcaaagatgatgtgacttgccttgctcgctttcccaaacgtcggcttcaacttccacgaagagtggatcttccgaagctgtagcgtctacacgaccaacggaaaagaaaaggcttttactctaataaactccacataacagcagaaacaaagcacaaaaatgggttcttgacttcttaaggaaaagttagagacttgaacggtccaattccgagttcaaatggccaagttatggccatttgaagtttatatgctctttaaatggatatttgcgaattgcttcatttaaattttaattaaaaactcatttattgcgtcagccgggagagagggcgcgcggaccgggtccacgggagtggggcccacgcgccagcctctcggtccacggtggaccgggtgcacgcggctgtcgccgaccggcgccgtgggtcccacgcgtcaaccgcacccgcgggcgcgggcggctgacggccgggcccacctggcagccgcggggcgcgcccgaaggcggcctcgccggcacggccgacgggaggcggcgcgcccgcgccccgatggtcgccggcggcgacctccggcgcgacggagcggcggccgagagaggggacggaagggggaagtgaaacaacggtcctcggctcaccccgggtcgacgatgacggcggaaacgacaaccggagcggaggaaggcggcggcgcggttcggatcgacgaggacggcggcgctccgacagtcggcgaccgaaacggaggagcggacgaggtcgacgaggacgcggcgaagccgaaggaggtgacgccgagtcgggaggaggtccggagcgacgacggcggcgaaccggagctcggcggcgacggcggagagagaggaagacggcgcgggcacgaatccgacggggagagtgagcggcgagtggcggaaacggaggagcgaagcacgaggaacgattatatagcgtcgggagggagagagggcggccggagaggaaggaatcggccgcggaaatctcggccgccattgattgcgccggcgaggattgcgggagtaaatccgagcgaatccgagggagagagagagggaaaaacggggggaaagggagagggaatcgcggggagtgatttccccctctttatggcgcgcggggacggcgggatgcggcggattcggcggcggcggcggcgctagggcacgggcgggcggcgggagcggcgcgaggtaggggatgacaggtggaccccacctgtcagcgagggtggcgggcgggcccgcctgtcaacggcgcgcgcgcgggggagggccgatgggccgcgggggagaggagagagagggagggagctgggccgagccggcccaagaagggaaggggggggaaaagaagacttttagggtttttctttttataaacctttttaactttgtttatttcttctcaattattatttgtgctctgaaaattccactaaaatttatttacgcattttaggcttttaggaaatatacaaaaatcttccaagccttatttgacttttaaatttgcacattttaattgttggaggctttcacatgaattttaattattctcggcacaatttcgaggatgtattttagggtcgttttgggacgtgacaggttgcttccaatttagcactgactcgacattgcttggatccacagcaactcctccagctgagatgacatgaccaaggaacttcacttcgggcaaccaaaattcacaattactaaacttggcatagagctgatgctcacgtagtttctctaaagcaagacgaagatgctcttcatgcttttcttttgtcttggagtagatatggatgtcatcaataaacaccatgacaaacttatccagatattccataaacactttattcatcaagttcatgaaaaaggacggggcattagtgagtccgaacgacataacggtacactcgaacaaaccatactgtgtggtaaaagcggtcttaggtatatcctcctcacggatttgaagttggtgatatccggaacgaagatctatcttggagaaaactgtagcaccggaatcaaaaagcacagttgcgggtatagagttaacaggaaacgtacccaaaaccacatcaggtgcattctgggcttctgcagctacaacatgattaacacgagccttcggtgctggagcattggagtcattctggacaggagcattcttcacacgtcgaggatttggacacttatcagcataatgtcctggatcaccacaattgatgcacacccctggcttgcttccttgttccttcctgacagactgattctgtgttggagctgctacaggacgagtgaccacattacgattgttgttgctgcgattaccagtgttgttgttgtagaactggcgttgagggcgaacaactgaagaggatcctccctgtgggtatggtgcagcttgaggtcccatagcaatgtgcggcctctggctactaccctgttgagccttgaattgagcagccctacgcttcttctgttccatcctattgtacttgtcttcttggcgactcgccttgtccaccaactgctggaaatcccggtactccatagccatcaatgcataagacaactcatcattcaatccctctaaaaacttctcctgacgctcttcatcagtgcgaacatcttctggggcataacgagctaagcgattaaagtcatgaaggtactctgtgacagaacgggatccccgattgaatgctctgaactctctcttcttaagtgccacaacacctgatggtatgtgtgtcttcttgaaagcagcagtaaactcccgccaagtgataggctctcccgcggctctgtttagacgaaagtgatcccaccactcagcaacaggaccatgcaactgatgcgaagcaaaggaaaccttctcctgctcggtgcactgaatcaaatctaacttcttttccacagcatgcagccaatcacctgcctctactgggttagtggtgcttgagaaggtaggtggtctcacacgtagaaaatctgccaacttgttttgtggaggtggtggttgattgttgttatttgcctgctggttctgcgcttgctgcactaatagattaatcaactaagtttgttgagccaagacttgggcaagtgtgggatctccttcattgtgaccacttccacttccacttccagtgcgggtgttcaccatctgaagaaaagcatgggcaaaaggaaagaacgacagagagataccattagaacggagaactttaattaatttcaattctatattgctcttaactgtgtatgattacatttaaattgaattaacactatctcaccagctaacttactctctgacaagcaaaagaagtaaactcatgtagttacatcccaccaatgatgtaagcaacacgctaaacccacacacacacaagcaaacttaagcaagcaaactaacacagcgaactacggaaacggtctaactaggcaactaatcttgccttgcgtcggaacgaagagatggatcttcctcctctggagtagctggctctctttcttctgggtcttcctcttcttcctcatcacttaagacatggatgacaggttcagcatgatcaggcacagcatctcccaccacatgagtctttgaagctaactggagacgaggtggtggacgggttctcttccttgcggcgaggcgaagcttgggtgctggcggtggtgcttctcccttaagctcagctagttccttctgcagacggtacaccttgctctccaacttgcaaatcctggcacagttccagttttccctatcatgagctgctttctcccgctccacgcctactgcatccatggcgctaagcatatacacagcatgtatcagagtggcactaccttcgccttcaggacagttgtaagttccatagtcttgaccatgaggcttgtgtggatgatactggaaagctaatgactctaactcctcatcaaagcgatgacatagctctccaatggccaccaaggctgcttcctgataagcatggctgtactttcttcccccagcttcaaactttatcgacggaaggtcttcatgatcactagccaacgtcacgcgaacacgacacttctccttgttggggtcatggggaatctggcgatactcgggggcaacctcatagcctacttcaaatgccatcaatctcagctccctgacgaatcctagcacatcgatcaagcttttcggtggatggggcggcatctaaaggaacatagaaaggaggaatttatgcatatatttaagttagctgcacatactagacttaattaatttgacccaaaaagaaaaagaaaagaaaaggaggaaacagaactaattaaatttcgaatttttcttttctgaccgaaacataaattttcagaaaccaatttgtttttctgaattttttttcgaaaatttttatttatacaggagcacagacttcggaagtaaacaaaaagaagcaaatatattttcttcctgtacagtactcgtggaaacggaactaaacaaagtttttgtttggaaaatgaaatcaactttggacagagacaaattgctttagacaaatgaataaaacaaaactaaaatacttaggatctaccataagcacggtatagtgtcaccattaacagggatgagtagtgctggtgctatcttgattgaatcgataccataatagatgtacagtgccgactaaccaatgaaattcagaaaattaaactatttaataccctgaacagtaaagtttttttttaaataaaagaacatgtttctgttttggtaaagtaggatttagtaaatttggtacataaccttgcatgtgctgccaacttaattaatttgtaagagaatagagaagagcagtcctatttttcaaaatattttgaaggctacttaaggtttaccatttggcttatcgtaaggtcaaggtagctctgataccaacttgtcgcgcccggaatttctatccaaaattccaaatgcttacacgtgcgttaaatcctcgtctaggaatcagccgaggcacacaataacaaattgataatagagtactatcaaacatctaattaatactcgcgaaataaataattattacagaggtggatagttcctctcaaaagaataaaattctacgcagcggaaataaaaacaaaagatggaacagctatggcgactccactccacaagcaacttgacccgaacaaagcctaatcctccagatcatcaccttcaccgaagtactcctctgatgaatgaatattgcaagattgagcatatgacatactcaacaagccacacagcaaatatgcaa

SEQ ID NO: 29461 - DNA, 6932 bp, Oryza sativa
tccccgtcaaaaccagaggcaatggacttcccagcgactcccacggacttctcgccgcttctctattttcatctaatacagaaaattattacgaattaaataaaagatttatgatgtcacgatgacatcatcgccggccatggcacgggacgacgcgaccaccggcgatagagggctcggttgggctatccgagaacacccacgcgaagaggacgacgacgtgaactcaccggcgcaagaaactacgacggacgacgacgaacgacggccggcgacgaggtccgacggcggctcggctcgggtcgacatcgacgacggcgctctgacggtcttcagcggttgcgaaggggcggacggggtgctcctcttcctcacgaacccggtggtggcgacggaaggcggcggcgacggctacagcggcggcgcggcgcgactggaatggcgtcggtagcggcggtgctagggcaacgtggcggcggcgctacgagcaacggtggagcttgggacttgagggcaaacgtagaggacgacttggggatgctttatataggcttggattagagagatcggactccaatcgagaggatttgagctggaaaaatctagggttagtttggagagataaactaaaaacgaattcgattcggtttatccgggcaaaattgatctccgaaactttaggggaaagggagaggataaggaggagatgatttcctttcaagcaatcgaactcggagatggccggctggggcggaatcgaaggggaggcggcggcgctcgggctcggctcggccggccggaggtggaagatgaccccgacatgtgggccccacatgtcagcggcttgaaaggagagggtggggcggcggctcggcttgggccggcttgggccgcacggccgcgcgcgaagaggagagttgagccggaaacggcccaacggcctaggggagggttttaaagactttttcaattaaaataattcgtgaaatgatgtttcatttattaaaaatacttcccttgctcaaataactcccagaaaaatctagaaaatagataaacaagcaaagtatttaatggaattttatctagctcaattttatgttgaaatttttcctagattattagagtttaacttgtaggcttttaaaaataatttctaaaaatgcattaaaaattgaattattaaattaggcgattttgagggcgtgacattctttttcctaaatgttgataaaatcatgttctatcatgttattgtgttcttactgctattattttggccatcttttcttttgactttgttttatgaattaaaaagttgaatttcaaaaaatggcaacttcaaataatattttgaagcagtaaataatttcatctaaaaaagtaataaacataaatgtcgtagaactcatcaagatgtacaacttttatttggtcatttcttcatccgacaaagtgatagtaacattgttaacaaaatttacatatttctcttatagtttataaaaccatatgagagagatgtaaaattcgtaaacaatgttactatcaatttgttggatgaagaaatgaccaaaataaaagttatagatcttgatgagttatacaactttgttgttgattgatttttcttatttgaaaatgttgtttgaagttgtcatattttgaaattcaaattcaaactgttcaaacaaagtcataaagaaaaattaccaaaacaaagttgtagatcatgcgttatacaactttgttgttgataatttttctatttgaaatcaattacaacccaaaaaattatttgaatttcaaattgttgatgggtgatacccgtagaccggatgaataggatattggggtacgttggtatgaggatctacgtgatatgacatcaagcaaacaaggagacaaggattttactggttcagtccccttatatggtattgatatggaaaaccacagagatgggaacagatgaattcgacaatcacacaagtcttttctgcacactttgtcctcactcgtgggaagaatttcccggtcggtcacttatcccaaaattgctctaggccaagcatgcttaattcttcccggtcacacttcacgtgctctagctttgtaaactatggtgggtgtgttggcagtgagattcgatgatctgaatccctcagggggtgtcccttttataccgtggatcaccttgttctccaagtagaactcggagacatcggactccacactacatagaaaagaccccatcctctccgagtagtactctgctaatctctttacccgtgagaatattttctacaatatccagtaaatttccttaacgcatacgaaaacaaatcgtatgcgcaaaggtataccgtactcgtatattccgtaagtcattggatagaaggtatgccttattcgtacccatgacagttatattttaaaattcaaattttatatagttcaatcaaactcgatggagaaaagaccaaaagaaaaatggtagatctcaatgagttctacaactttgtttttgacaactttttcatatgagttgatttagtaccataaaattcgatttgaagtttaaagagccacatgcaaaaaatcgatttttgcatgcggacctcttaaggatcagcctatattaggtgatctatactaggtgatttgtctataaatgaaacgagtaaggagacatgcatattagataagatcgattgaaacccgatgctacccctattggcaatcaacaagtaggctagagattatggttctaaggacggcttagtagatcaaacttaactgatgaagcactaagtatgaaaagaaacataatatctagacaattaagcctttgactgatttttttacgtgacctttgactgatttttagggtggtagatgttgtcggactcggctgcggaacgaggagatcgaaacagactcggtgccacatcttggttggattcgtaatctaaaagtgcatcggctagaatcacattggttgaaggtgaagattcgaggtcagaaaagccagagtcaaattaagccgatacatcacaaccagggctcgtgtgggccaaactcggaatatccatcattgccaattagagataaaagctcgtttgtaggcaattgtatctattaattaggatagttaagtcggtgtgttcagttttggcaagaggcggccatatatggtcttgtttgtatcttagagttttagaatgttttgagtcatgtcggtaagggccatgttgttttttgagtctgacaagcaagaccgtacctcctttcgtttagctcatagatttcctacccgtctccggaggttatggagcgggcgtcttctgcttaacttgccacaccttcttcctcttaggtgtggttggcggcatctttggagccgtcttctatggttttttggccggtgtaatggattgtaccgatgtcttccaataacgggtcctgggaacagatgatcccttttccaggaagttttgcataaactttaccaggctatccatcttgggttgctccacttagaccacttgaatgttctgtgggtttgccctgtattttatcctcaccatggagcattgctctgtcctcggctgaaactcaaacttctcctccttcctgttgataggagacagatacttcccgcccccacatcaaagttggcgttcgcggtgctaaggaacggatgccccaagataagtggcgtctccttgtctgaatccatatccaacaccacgaagtcaaccgggatgaagaaatcccgtatcttaaccggtacgtcttccgctatcccagctggaaaatagaccgaagaatcgactagctgtaggcgcatcggtgttggtgccaacaccgtgaagttgagcatgtcgaaaacgtctttgggcatgacgcttatgcttgctcctaggtcggaaaggtcttggtcaaatctttgtgtcccgatcgagcaagtgattgtgggacaccccggatccttcttcttttcagggagtttgtcgagtatcgcattgctgcattcctccattagtttaaccacttcggtcgtcggaagtggtctcttgttattgagtatgtccttgaggtaacgcgcgtaggtgggcacttgcatggcgtccaacagtggcacgtgaatatggattttctggatcacctcaacaaaacaagcgaactgctagtccaccaatggcttgttgtatctctgggggaatggcagcagccttgtgtcgcagtactcctgcggcatggtcttctcttgctaaaccttttcttcagccgcatcgctagatggtgcttccctattgttgttgccagctcctacaaggttaggatatgtcagatcgcaagtggacttacctcccctcgtcgtgattgccttaacatttttaacggagggttcggttgtccaagaatcctcccagattcattagcaggtactaaagcagctaattgtgcctgctaggtttcgatcattttattaaaactaagctagttttggaatgcataagcaaaaccatctagcttaacatttatattttccagggtcttgtcattagcagctagctttttgctaagagcgtttgtagttttggcttgcgcaaaaacaagatccttcaaggaaggctggttagaaaagttgccgttattgttgcctccttggaaatatgggcgtggctggttccacccctgagcctggcgaacggaacccgttgttgttgttattgcccatgtacatcgcctcttcacgggtttctaggcaatcgttcccagaatgacccgtgcctccgtagacttcgcacgtaacgtgggagtccaaggccttgacggtgccttggggttttttctcgtggtcgttcaaacgattcatgaggaggtccagttttgcagcgagcaactccatctccttgacggtgtgcattcctcgctgatgggtctatagtcgttcctcgctccagcccatgttggagaccatcttttctaaaagatcgacgactcctctgaccgtcttagaaatgaaggctcctctagctaccgcgtcaaggtgatcatgtgacgtgggagtgagtccattatagaagttttgcaggattaactagtcgtccattccatgatgaggacaggcggccacgtactcctgcagtcgttcccacgcctcgggaatagactcgtctctcgtctgctggaaacttgaaattttgccgcgtagggcgttggttttgcccatcggaaagaactttgataggaatgttgttcagcatttgtcccaggtgttgatcgtagcgcggttggcatagaaccactgcttcgctttcccaatgagagaaaatggaaacaatcagagcctgacgccgtcaggactgatgcccttcatcgtgtacgtgctacagatctccaagaactgttgcaaatgtgagttggcatccttgtttggcttgccacagaacgggctagcctgtgcttggtctagcaatgctagcaggctaggaaattgaagtttcaatttgatcaggatgagaggttgatgctccaatttcaacaggctgggaactggaagctacaatgttgttagctcctcccttcatcaatgttgctagccggctctaagcaatggttgttcaataaattagtaaatgccccatatccaaagtatagtgagggttttttagatgatcaccttcttgtgattcttcttgggctttattcaagtattgtctgcatagctagtcttttgggactaggaatatctgaagtagttggcagtgttcctccttggcttcctcttcctgcaaaatactagacaaaataatgcattaaggtcatcaaactgtattattgagaacagtattatggaggtcaagcagacttgcctttttttggttccattaagggaacacttgtagcttgtttgaatgtggcaaaatttccacaacccttacaccttctcttgcctcttaccagcaccctcttccctgaatcattgtcaattgaagcagttttggatttggacttcctaccaccttcaaggcaagttttggtcctaagctttccgtatcttccatttgtcttcttaggtaaaggtgcacctaacacccttggcaattcaacctatggccagtatgggttgtcacccaatggctttataatcccactataggccttcttgaacaaaatcctcaatgttcacatccatattttgttgggaggttatcaaagccaatgcatgctaacatggttttccagtgtgctgccagtactggttgtaagctttcaccacatgcttaccattactgttgttattgttaacaacttctgcacaaaagctatcagatttcactactgagaggtgacccaaacccgtagttcttgccttcagctgctgtgttacagcaggcaagatcttcctactcaccttctctacaattcttctcctcttattccatagaaccataaccaacgctctgtaaatttccgcatggtcacaaattagcaatgccttgtaatccttaatccagttgttaaaactctctgcaagattgttagtaatgtaatcacactttattgttggattgaaaccactcctcatccacttcaatggatgataggtttcaagccaaggaagcacatcactgcaagcttcaataacttctttcatgtgctttttccaaatctccttcctataagccgtttgctgctaagtgcacacatcaccaccaaacctcttcacaaagttcttcattagatggcagaagcattccgtctactcagcatgctcaaacacagtatgtgcaaccttttctaatccttacatgcataggtacaaacagctagtgggttaacatctcctatagctttatgaagttgtctcataaaccactctcaattatcctcagtttcagcatttatgaacccaaaag

SEQ ID NO: 29462 - DNA, 18540 bp, Oryza sativa
  unsure (1)..(18540): unsure at all n locations
aatttatactaatgtatggcctacattcctctaagaaaccatctatacagagcctcagagcacaaaaaaacctatgaaaatatactttcccacaaacctccacggtatctatctctatcacactccctggtgaagttctcggtacctaagccctccacctataaagcatatgcaaactttcttcccaggtccaatagagctcaaccatagccttttgtctacccctaaatattgtgtcatagttaattgtgcacttctgatcttcttgtagttggctccgcaaggctttagggcccatacctatattcttcctaaggtttggaattgcctttgcagctacccaactgatgtgtggtaattattctcctactgctagaacggcatgtatggaagtctattaacactttcacattcaaaataaatgcaacaatccatcaatttccaaccattatgaaaatatcaaaatgaaattactgaaattcaataccatcactatcttctaattaattaggttgcttatgtccaaccatatgccaagggtaaccatcaaatttacaaccacctatattttcagggtcagttttcaccaacttcaactcaaactccttgattatagcacattgtctcatggctagactaaactccttcatgttaggatacatagtgccaaccttcatgcaaggattattagggtcataagccatgaccatctcccctggtacttcatcatgtacaggtattgatgccccattaatatcttcaacattagtagtaggagctgcagctgctactgcagtaacaccagcacccgtagttccagcaccatcagcagctccaacttcagcagcagcatgtctagccatctcagcctcatcctcagcactcaaaccctatagctggtagaattgctcatcccaatcattttgacaatatctagcctcccttcatcatcattttgagcaagaatctctagcctattccaatcgacaacatcggtactagctgggtcaaaagcaccgtagactggaacttgttcgactactcattcaggcacaatgaggaaaacgaaatcgacggcatgatcagattcgggttcgaccacagctaaaataaccttaggctcttctagcctgaagaaaaataatttggaacacttgttagagtattctctaacaagcaaaaaaaaaagacaaatcaagcttcacaaactaaggagaaaaacatattcttaccccatgactagctcatacctggtacacccaatcaattccaccttattcctagcaccagcattccgtcgggaagtaattaagatgggaacaacggcttcgagaggctgcccttggcgtcggcggcgaggaggggaagggggagggtggcagcagtgagtaggcagaggcggcggcgggaatggcgatggtgacagctaaatctggggcgccgccacgagctataacggagtacgataggggaggagcgactgcatctcgatcccttttcattcactgacctaaagaatgagccaagggcaatttggtcagaacacaactcatttactggcttaatcgagtgaaattggaaaaacgacgaagtagcatgttgcgcgaaggtggcgatggcattttaacaaaacaagttcgcggtgtggcattacaatgaaacccagccttgaatgtggcacaatgtcaattttcttgggcaggcccacactgcagaggcgaggcaacactaacgacgcggcctctacaagcaaactcgagttccaccactggctcacctccgctcttgatgtcaagctgcagccatggatctagagcacgtgaccggggagtcctcacctccggagagactggatgctcattctcaactcgtcaccggctgggtcaccagccccaactagcttctctgagaccaactcctccagatccactgcgtgtgatgccacaatgatggggtagccggcgttgccactcttgcctgtgtcgctcggataggctaggtccttcgctgccgccatggaccaaagaatgggagaaaacaaagaaagtggcatggtggatgacatgtgggcctagttagttttttttcgattggattgccacatgtgctggctcggatcaaaaccgctcaaaacagtgcttaggtggttatttgtcaggattgaaatgttcgggctgtagaatatccagttttgttgtttagaaaagtaattcgtaatgttgcgttcagtggcggaggactcagtaggataaggttttgcttgagccatacctcgctttgaccacaagtaaccccatccactcctcgccctgctccagcactgcagcacgaccaccacggcggcatcgccgatgccgagatatgtaagcgcgaaaggaggaaacaatgctctagcagtaagagcttctgtatttcattccatatgctgtaattttgggatttttggtcaaaaaccgtatccaatcgattccctactagcgctcccaatagatcgagttcccttattcggattattcgttccccacttctagccactcggtttcattcccaaacccttccctcgccgctctctcgcgcacgtccggcgaaatgttcccgcgcagcttttctcgcccacctcgaccgccgccaccgtcctctttctcacagccgtcggtgttggctttgctccagggggcgacacatggtgtggcaatgccgaccatgccgattggtggagcaggaccatcgctgccaccgcaagccccaccgccatctcgattcggggtgcttccacgatatagcaagaattggtccaacgccccgcaccgccgcctggccgtcgcgttgtaacaccccgaaaattttgactctaaaatacaaaaacgaaattcagaataataaaaataatcttttccaaaattcatttatgctggaatttgttgttttcctcctgtgcttggaacaaaggatgggtgtctgagaatatgcttgtattttagatttcaaaatattatttgttgaaagaaccatgattatgaaatatgttaattaagaaaatatttgcaaatactaacagccttctcacaaatccttttctatggattaaaacccatgggttgtccttgttttgccaaatagtttctatttggagaaaacccttcttgaaggttaactccctaaggaattattttaccaataaaatgtaatattgattatttcctaagaatcctttcctttaaaaggattacgtcatttggcagttatttttcaaataacaattattaataaagtatttcctggaaatcctatttgcgaagtaaatcccaaaaaggttatattaaaagaaaagactttctcagataaagtctagattaccgccttaaaggcctaaacgagcctgcataatagaatttcttatttgagagcatttgtgtgtttgtgccaagatatcgattgaatcaatattactaagccccaaaggatgccttttgatcgacatccttccttgtcctctctcctctcgtctgttttatttagcacttcggtgcaaaactaatccaagttctgaaactctttccttctatcgcgttgtgatatctctctcgagctcatggaattctatgattaaatcgaaacccactccgttaatttgaatcggcctttcccttgaaaacctaaaatcgttcgacggatttatttctcgtgcatcgacccgaatatcctcggttctatctctaaacttgaaacccaaccacgtcgaatggatttgtatgccatacaccgctcttaaacccctctttgttattgtcatcaattcgttctagtgatcgcaaaggaaattctaaatccaatcctcgaacaaccaaattagccaaataatattcgaaagcctaatcaaatgtcccatcatagagtccttttacaagtttcgaatacaattccaaattccaaaccccctagcaaattataaagttacctagcaattatccaagtcccctattacagttgggccacccttctctcttccagccctacccattccacaacacaagtccattatccctctctctgcatgccgagctctctctccctctcagcccgcttccaggccagcacatcgagccgccgtattcatccaaaatgcctaattggtgaacagttgcacgcctccctcttcacgcagcaaggccacgtggtgcgcgcggagagggggcggcggaacggcgcgggagggaggggtccaggtatgatttttttttcgttttttcttccatatgttcttcagttttcgtgtttttttatgtttttttctttccgtatctttttttagtttttttcgtttttaataagtacgtatacaaactatgtatacgtataaatacaaactttgtatatgtgtatataaactttataacatgtatttttttggttggtatacgtatgcacgtatacaaagtttgtaaacacgtattttttgggcttttatacgtatgcacacaaactttatatacatgtgtatattttctatgcaccccgagacatgggcaatacagtgagggaaatccacaccccgagttcacaaaaccatgcttaccttgcccttcccctcctgtggcgatgtcgacatccaggttctgcgccgtcgccgttcaacctgtgggcgcgtgccacatagcctcagccctgtgctttttcccccatgcccatgccgctctgtgccgctacacttggttcaccaccccgggcaccccgcttcctcgcgctctagccggcgcccttgttcgtccacgtcgaaagcgtgagccgagctcacagagctgcgtagccgtcctctactttcctgtgccgcagccttctccttgaaggaaggaagaaccaactcagcaatctccctcctcgccgtggatataaagccagccagcacccctccctcttnctcctttcccgcgtacattcgccgacgaccaccgccgatcccgtcatcgtcatcaccacacccgagtccagctcgagctcgtngncgaactacaaccgccccgcacagncaagtctgctgcgcgggaagccgctcagcgtacggccaagtcagccgcgcgagcatcgtccgcagcggtttccacctagcttctggccagtgcccagccgagcatggtcgagccactggcactagtacactagtacagaaccttccatttgtgacggcctctaacatgcttgaaattagtggccgtcacaaggaagtcatctcaatcgggccgaaaaagcgcccgattgagataacttaggcccgtcacggatgacacatatcagtgacgggtgccaacttggggcccgattgagatatgaaatgttatctcaattgggcctaaactacggcccgtcacttatatgtatcatccgtgacgggcctgagttttatgcccatctaacatgccttcgagaccatatctcaataactaggcctgtcatagatgactcatccgtgacagactctatactaatgcccgattgagatgacttagtatttttccattttcatatgaaatgtttatatttgtgagttgacatgtagcaaaataattaactgcagtataataattcattttattagtcaaaaataaaatgatttcaaatgaaaaattgtcaacaacaaagttgtataacttatcaaaatttacaagttttattttggtcatttttctatataacttttttgaacaatttaaatttgaattagaaaatatgacaacttcaaacaatattttcaaatattaaatgatttcaaatggaaacaaagttttataactcatcaagatctataacttttattttggtcatttttctatataactattttttgaatagtttgaatttgaatttaaaaatatgacaacttcaaaacaacattttcaaatactaaatgatttcaactaaaaaagtcatcaacaataaagttgtataactcatcaagatctataacttttattttgatcacttttctatgtaacttttttttgaacagtttgaatttgaatttaaaaatatgacaacttcaaacaacattttcaaataataaatgattttcatctaagaaagtcatcaacgacaaagttgtataactcatcaagatctataacttttatttttgttatttcttcatccgataaagtgttagtaacattgctaacaaaattgacatatctgtgttatagtttataaaacaaaatgagagatatgtgaattttgtaaacaatgttactatcactttgttggataaagaaatgaccaaaataaaagttatacaattttgttgtgatgaccttttcaattgaaatcatttaatatttgaaattgttgtctgaagttatcatattttcaaattcaaattcagactgttcaataaattttatatagagaaattaccaaaataaaagttgtaagtcttgataagttatacaactttgttgttgatgacttttctatttgaaatcatttagtatatgaaagttataaaagttatatcttttataactttcatattttcaaattcaaatacaaatagtttaaaaaatgttatatagaaaaatgaccaaaataaaagttatacgtcttgatgagttatacaactttgttattgacaattttcacatttgaaaccatttactacccgaaaatttatttgaatttcttatattttaaaattcaaattttatatagttcaatcaaacccgaatggagaaatgacctaaataaaattggtagatctcaatgagttctacaactttgtttttgacagttttttatatgagttcatttcgtatcataaaattcaattcaaaatttatttttgcctaaatgtctgatttgactcctcatcatgttaatacttgctaaatatatatttgatccaattaacttggttttgctggtgaaatatgtgaaatatgtgataaaatggatgttatgtgaatgtggttgtgttaaatatattgatagttgtgtatgtgaatgaatgtacaacttcttcttcagaagccgaatcccaaagtgctctgaggttaagcgtgcttagggtggagcaatctcaggatgggtaacccgactgggaaatccttccctagaagagcaatttcgggatgggtgaccaaccgaccagcccacgggcatggctagcaaaggcctaaggctagcaaaaaaataaaatttatttatttttagattatactcatctgtgacgggctataatttaggcccgattgagataagagtcatccgtgatgggctatagttcaggcccgattgagatgagagtcatccgtgacgggttatagtttaggcccgttagagatgagagtcatccgtgacgggctataatgttagcctgattgagatgtgtgtcatgcgtgacggccggatgcccgattgagatattttatcacatcagtgatctttgcttagtgaaggggcgttacctgatagagatgaggctttaggcccgttacacatgaccgaacctgctctagtgtggatgccagcgccgtcaagccggccaccccgtccaaccagtgccccgacctcgtcctgcccggtgccgttcccttcctttcctcctctgcccggctacgccctgactcctcccctctgtgccgcctccctctccctacgcgcaaccgagccgccacgcccgggcgccggccgcgccgtcgcgcgcctgccgcctctcgctcggacgcacacgcacgtgagacgatgggaacgagagagagacataaggcagacaaattgagaagaaaaccatgagagaagaaaaagaaaaaggaagtgggacccacccttttgactcctcaccgtgagccctttttccctctaaaagtctacatcaagtccccctttctcccttgggccacccgattaacaagtctacaaggcattcttcttggccaagcccaggaaatcaattcctacaaaagtctgtattatttccctcctccaaacctcggaccgtagcccatcagcaatcatcacctccaccaaagtccatccctcctccatttcataggataatcttgggaatatttcctccaaattctgggaaatccttttcctccatttataaaaccatttgaacttcggaaatttgtatcttgcaaaccgtaactccgattgggtccattcaacttccaggatttctctaaaatcgacatctatcaaatggcactactgaattgaggtgttttgtactttatttgtaggattttggatgtttatctcttattgaccgcataggtgatatttttgatatttaacgaacgtggatttctcaaagatattggattctaaaagcaaggcaaatcactacacatccctccttgagcatgttgaacctatctttataaatgtggtgattaaaaataaaattgcatgctatttataaactgcgtacctaaacttgaatgtaacccacccttgatattgttacatttatatatttgtatatccttgttgcatgagtctattatttatacgcggtcaattattgacattgctagcattgcattgtacagacaattatagataccatgtttattatatggatatggatgtgagatcactcgatgcgagtgattaatggtttatggctagagacatgagcgccacccgcgacacaaaaaccttttgcgaaaactaaaacttaataaaacaaaacaattttgactggagtggcatggatagaatatgggtggatctatgaaacggctagtcgccgaccctggtcaattaagcaccgagtcaaaaagctatacagtaaacaaaccgagtacgaccgcacttttcaaatgggtaaacccgacggactaagaaattctcgtggggcggcaccctagtcatggtggttctataggacgttggttttgttgcagtgttgtgatttggataatgtcaacgaaaccaaaaatgcgcctaactatatttaaaatgtaactgcctgttatcccgggagtgccaggactcccttcacttctggctcgaggtagggatggtttgccggggtgaaatgggcgctcattgtctttggagcgggtgccgtaacacgagggtgactgaaaaaccagaccatgacaagtctcatgtgtggggactaggctcatgggttgggtatattatggagtgcgggattaaaataatacatccactgcggtgtgattaaaccaatctattcgaatagccttgctcgcggttaatgagcgccgagacttgtattactctagactagccccataagtttttaatactgcttatattaaaaatggaaaggaatgtgtgaccttgcccgatgtgtgggaaggtcgatatggtaaagattttataaaacaggaggcttggggaaggtggatgaaccctcgataattaatgacaacttcaacttaacgacttaacgtcgataatctaagtcatagatttgtgaaatgaattgtgaaaactagctttatgcaaataaaccaagccatccttgaacccctgtgtgcactaaatgcatcctgtagtggtggcttgcttagtatgattggtactcgccattgcttaattaaattttttagaaggagttgttggagccaacatgtatgtatgctatgcaaacaaagattttcaaaaaaaaaacaaagcactgctacaaacctgcgtctaaattgaacatggagatatgtaggttcttcagaaaatagtcattatacaatctccaatgactagccaatctatcctgatcaattactgcatgacctaaaacagacccaccacgcactgtgcactgcgtgacctaaaacagacccatcgtcgaactcactgtgcactatatcaaccgccgaagaaataaattcttcgtcgccattagatgaagactcttcgtcgcatttggaggagggtgctttgatgactcatctctttttttttaccaccaagttggattgcaagggagagacggccaacagagggaatggagaggtggctagcagcagtggggggatatgagagggtgttagtatttcttaacgacattactagaaatataattcccagcaatagcgcagaaatactcctggtatattatggttacagagttcatccgtaagcgcacggatatatcattgtagcatttcacccgagagtattccaagggtaccatatttatttaatcctgcgggaagatcatagtagagaaaacatgactaataatttatatgttatttgtagtaatcatattctaagtagaggttaagaaaatccaagggtagagtgacacacaagcatggaactactcattctcatattaaaatatctaagctaaatgaaaaaaaaatagaaagagaatctattcctatacttctagtatacatagtatacatacatcctagttatctgatatactagctaataccctctatccgatacccttctagtacttcgagaagccacccctaactgccgagtaccttacgacagcccgtcatgaccatacaaccggggctaaatacggatgagtacccgccccaggaaattaacttagaactatatacacgcgtggaggaatacccgtactgacctgtcaccatcagtgacccacctctcatccgtaacatataactccaaataatgatgtcccatagtctagacaccacgcctaaactaccagatactactctaatatcatcgtcatgacatagagtaattgcacaagcaaacactatacccgtaccaaagcatctcttagataagctagcagtataatcagtataacatgaatataatgtaaagttagcattcatatactcggaaagtattccaataccataaatgtttaaagaagagtattctaataaaagtacaaagcttacaaaagagaagagaagagctactagagccatacccgaactcttcccaaggcttccggactccgatttctactctattcctattccactagctttagaacactaaactaacttgagaggatatgaaagaactcttgcttgaggttgtgaagagagtgaggaagtgaagtccttttatagcctcccaatgacggttatggcaattggaatggtcggaaattccctctaaccgtcattggggagaaatcctggacgtccacgccaaaccctacatccaatggagcagatgggctggtccaatccagcccattttcggctggcggcctcctagacatcttctctctgtagacttgtgaattttggctcaattggtcgtgtcatttctgagttcttggcccattcatacataagtctgatcctcgacatcgtccgattgatttatcatctggtttgatgtcgattcctctcccttttatatatggttattttctgcaaaaggttagtaatccaaatattagtggaatattattattctaacatggatatgcattgcaagcataactagttctcatctattttggtaatattgacggtcaaaactgatcgctaatgaccgtcaacagaggggaaggaggaaggaagagctgggcggtgagggtgttgggagatcggcaggagtaatcggcgtcaggaacagaagaaagcgacgctcgcaggaataggaagagattggcgcgccccaccaggaagtcgtgcgtcgcgcgcaagttggagatcgcgcgtgatcgcggacgaggaaaacggatttttgttgttactttaaaggagtgcccattgttagttataggaaatcaaatttaggctctctcttggagatattagttttttcaattcccatattgatgtttaggaaaaccaaaaacttaattttggaaatggatttctgtcattcccttggtgatgctctcaatcccgtcccgcaccgaagcccaatgggattttgccgtgtgaccaatgttaatgactacttggtctctacgtccctatttccctacctcccatattcccaatttccttcgttcttagggctacggccgacgactaagggatgtgcgggcgtgtggggaccgtcgaccagaacaacaacatgcagagcgtgcggctggcacggcagtggcggggcagggcggtgcgacgccaggcttcctgctctgctgcacaggcagatccgcacagtccgcacacaatagctgtatcctgtgttaatttgcagccaaacagtgttacgagcccaagcatttgtttttacatatcttgctcttcgtttcacagattgttgaacgatttcacagattgtctatgctctacaagtttgcgtatttaatgcattgcccaatcttctttgttttatgcttttccgctaaataatttacatattccgttgatgtcctgttgctcctttaatctaattcgagttccataatatcatgacattgacagaacaacaatatttttttctcctttgtgttcattctagcattttcatggccatacttcttatttctctcaccctccgccactgatcgcgacagttggatgggtaattcaaaatttttcctaatacaattgactaaaatttccgatggctgacaaattgttattacagtcgagggatctttttgtgcttttttggttttgtattacaacaaggttgaggagcaaatcaaagcgatgggtcctggcagctccacggttttcacgttgattgggtttctttgtctgtcaaccctagtattatttttatatcttttattggaggtataccacgaggtccttcgatcggacctgccgaaaccgaagcgctagcgaggattcaagccgaagaggtgcggcgaagaccaaggggacgcggttgcgctccacacccaagaaggccgcatgggcgaaagctacgtcgcgaagcacacgggcttcaccggaggtggaccctatcaaaagagggccacatgggcgaaggctgtatggcgaggtatacgagcttcgtgccagccgggccttgccagaggaaggcatggcgggccgtcgtgccctcaaggagccccttcgccatgactgggccgagtctgttggcccactaaaagcccatatatgtaaaagagatagcgtgcccttaataatgtcactatcataagggtaaccatgtaaattcccctgtaagcctaaaacctaagagagggagcctgcaatagagttataatagcctcttatggccatgtaatgggggatccctgaaaaatttttaccaggtaatacagttgtttctactttcaactactattgagagaaccacacccttcgacgtgacgcagttgtcgttcgacaacatctttcttttgaactatctaccactactagaaaaattgtctttccagattttccttggcgaggggaaggtccgcctgcacgcgcggcccgcctgcgaaaatagtttacgtgaacaaaaaaaattgctaccaaaaaaatcgccgccgctacagcccctccccccttcggcctgatctgggagggagggaggctgccgctgggagctggcaccacctggagccgcgttgccaccgccgagagggagggaggagagggaagccgccactgccaggacctgctaccaccttgaccctccgcgccaccaccgcttccctccaccgctgcctccaccgaagatgtgagaggggagccgccaccgccctccggccatatttgggagggagggagccaccggtgccaccgcctcgaccgtccgcgccgcaaccgcatcagccaccctccgcaccgccactatttgtagatgtgctgccttccctcctgcccagggagggaagccttcaacgccgccgccacctccttctccaccctccgcagccgcctcctccaccctttgcgaactcaccgccatcaccggtagccgctgccgtcaccgccctccggtagttgcgctgggagaggaggggagggagagatgaggccccggaggggaaaggagaggggatggagagagcatgaggtgtgaaagtgaatgagacttagccattttggtgggtagatgccgcttttaatgtgtttgacctttttgccggcggacctcttaaggtaccgtttgcaaaaatagaccacttaagaggtccgcctgcaaaaatacctctattttttttggcaggcggacaacgatctcgcttcgcgttgttattttcgcaggcggccatttagctccaaaacgcctacccgccaagaaaaaaaatgccatcgtctagaaaaatggtttttctagtagtgtacatgactctaatatttagacatgccctttttccaattattttgactttagttcgagggatctagggggtggatccaacgtgaattctagggggattcgagtcctctctaccctgttggatcaccattgatagaagaagatagaaggggaaggaagagggagaggagctagagtagaaggagatgattcccttccaaattatattctggatccacccctgcagggagcttatttctatttttttgacattaaaaataacctacagagacaaaggcgcgtgacgatgagaagattatgacatccatacgcaagcactcgtgtcatgtgacacgttacatgcttcttcgccccacttcaatttgttcccactttccaatcttgtcctttctaattaaacggttggattttgtttataaatggtgataccaatatcttgaaatactacttgatggaccataacaaacctcaatttatatttaagtttgattgagcaaggcatactacacatttcttttggaataggagatgattcaagcttcctagcctacaccttgattacatggtcagcttagtgcaaaaaatgggaccggccatcgaaccgatctgaccactaggtcgtccagttcgactatagatggccataaggcccgcccggcacggcccggcccaggcacggataggcacggcccgagagcgatcgggccggcacggcctgattggaatttcgtaccgtgccgtgcctgcccatgggccgcacgtcaggcccaggcacggcccagtagcaatcgggccgtgccgggccgacacgaaggcacgatcagcccattgggcctgggctagcccaggcacggcttaggaccagtggatcagtggaccagtaattcagtggattgacaaattcaatggatcaatggattgaacatgcaaaatttaaatttaaacatgccttagttaacaaattcaaatttcacaacttacttgacaaattcaaatttgaacatgccttagttaacaaatttaaattacacaacttagttgacaaatataaatttgaacatgccttggttaacaaattcaaataacacaacttacacaacttaattgacaaattcaaatttgaacatgccttagttgaattcacagttctagattcacatatcacctttacaaaaattcacagatcacagatcaaagattcacagatcacattgacaaaaattcatagatcacttgactaagatcacatatcacatggacaattcacagaagagtttcaaaaatcacagactcacagttgttgattcaaaaatttcaccaagtcaaattacccaaaatcacaaattttcacccaaactttcacccaaaaaacttgacttagatcacagatgacatggacaattcacagaagagtttcaaaaatcacagactcacagttgtagattcaaaaatttcaccaagtcaaattacccaaaatcacaaattttcacccaaactttcacccaaaaaacttgacttagatcacagatgacatggacaattcacagaagagtttcaaaaatcacagactcacagttgtagattcaaaaatttcaccaagtcaaattacccaaaatcacaaattttcacccaaactttcacccaaaaaacttgacttagatcacagatgacatggacaattcacagaaatcacagttctaagattcaaaagtttcacgaagtcaaaaattacccaaaatcataaactttcacccaaaaacttgacacaagtatttcaatgaataaagtagctgtgtagtgcaatggctgcctcgttaaaaacctttctaggtaaaaactcacacctcgtgagaaaaccctagaaaggaaaaaagagtgcagccccaagcattaatcaaatgttcataataaagtccaagtccaatacaatcatccagtcccagtggcagtggttacttcatcaagaaacaaattgtcaaaagagtttataagctctaaattctccatggtatgttgcatctttgcatctgcttgctcccaatctttgattagtgccaaagcttgcaccatgtcaggagctagacgccgtcgtcgctcctcgatgatcctgccagttaagctaaaagcagattccgatgatatagtagaaacaggaacagtcaaaacatccctagctaatatggaaagaataggataggtgtggttgtgctcatgccaccagttaaggatattgaagtcatcatcgtattggttgacagtgtcactgtcaagataggcaaacaactcagatgcattcatgttagcagtagaagaancagcttgaatcaaagcggtagcagaagttctcctagaaaatgcaccagcaccaagtccagatcctgcactggcaccagcatcaccaagtcagaacctggactggcactagcaccaaatccagaacctggactggcaccagcaccaaatccagaacctggactggcactagcaccagcattaccagcaccaagtccagcaccaagactggaaccacaagcagcagcaccaaaaattttcccccaagctgtctttttcttaccagaaaaagagcttggggttgccctttgtaatgtcacagcaccaaatttacttttcatacttagcatacatgtcagacaatgcagccctaacctcatttaaatatgcagagtaatcaccactaataagttgtcccataatttggagaacattgctaaaacccctgatcttggccctaggatccaagataaaagcaaatgaatacagaaatggaatctcagaccagtatgacaagaacttatttttcatgggaacaacaacatttctaaggttccaatcattctcataagtatttagatgtccagcaatctcaagaatgtgatgcataattaatggagatgttggataataaacaccagacaaaataacagttgaatcataaaattgttcaaggaataaaagaacagtttcagcaattgtccagtgtaaatcagtcagtaatggctgaccatcagccattggatggtgagatgcaataaacactgaaaaaatgaccctatgtggcaagagatgcttaagcattagataagttgcattccatctaacatccatgtccaaaccaaatttacgaggacgaatacctttagcaatgcagaagtttttgtataaagcaatgcgctgattagatgcatttataaatgaaatagcagttctaaaatcttgaagcatgggtttgaagatttctagaccagccttaacaattaaattgatgatatgacatgcacaacgctgatgcaaatataaatcaccaatataaccagacagagcaggtttaagactatccattgcttttgaattagcagaggcattgtccagggtaatagagaagatcttattagtcaaaccatattcttgaacaacagaaagcacacgttcagaaatattttcagcattgtgtgacacatcaattagcaccagtcccaaaatcctcttctctaattgccaattagaattaacaaaatgggcaacaacactcaaataatcctccttagcattaccagaccatatatcagatgtcaaagcaacagagctaacagacttcaaagtatcaataagcatagcacgtctcttgtcgaagaccttaaaaacgtccctactgatagtttgcctagagacaacactaaatctagggttgtgagcattctgaatatactcctcaaaagcagcagattgaccaaaagtaagtggaagatcctctctagcaatcaacctaaccaactcagttctagccacatccggtttatattcccattgactaacagaaccatcagcattaaacctaagcatggactgagacaaagcaccaacatttctaggtttgcacgatttaatatgcctaagcaaatgtccagtaccaccagttgaacgagcagacaatgttttatgacagtaattgcatttagcagaaacgcgaacctgagcgccattgcgctcttcaaagagttcttcaaagtcgtcccatacctcagacctggacctcttgttgctagcacttgagccagacggagcaccgttgccatcggcaccggtaccatcatcgtgtggctccggctgcgacagatctctcagaggtgaagcagtgttgccaaacacctcgatgcgttcctcctccaagtcatcttcgtcatcaccctgcgtccccatcaccctcgcctcgtagttgcatgaggttggatcaccatccatcgcaggcactccggttcctcaacggtggctgccggctgccgctcaacgacctgcaagaacaaatgaaacaacgacgagagc

SEQ ID NO: 29463 - DNA, 6156 bp, Oryza sativa
gggccgggccggcacgggcacgaccccagtcggcccgtcccgtgcctgggccgggccaatttgttgtgccttggccgggccgtcgggccccgggccttatggccatctataagttcgcccccagaaccagattattcatgcatgacttgggaatgaaacaacgtgtataagtggtctagctggcttaattgttgagcatgtaatgaagcaagtagggagcctagtaaaacttacacttgcatgacttgggagcctagtgggcctttctagcctggcccatgtgcttgccaaaaccgccggttttgaggtgtccggttcgccggtttgaaaaccgcccggtttatctgatttttactggttcaattgtatatctagtccttgcagcaaaccgaaccggttgaggagctggtttcggtttttcttggtccaaccgccgggtcaggcccctttttttttactaggatggtcagtgtatttgctacatgataaaatttttaaacacgtggaggctgctgcaattttttgtggcacatggacacgatatgccgtgccacgaaaggacgcagttcacgcaagcatgaaaagattcctaccagtaagaagcaatatgtttctagtactgttggacggtggcaccagttgtatatgtacaacaaccaaacccagtgtgtatgtacagctattgccgccgtccaacagtacttccaaacatgaggttcgaaacttgtacaggcatccaggatgtttctgtgaggtgaatgtcgaattgtcgatggtgctttctctagtaggatgtaccgctgcaataattagggatgaaaatgggagcttctagcttgcaacggtagtctcgcatactaaaattccatgatgaagtgtcctgcaatggtgatgatgatagtagaaaatagggaggcatatgtgtagcacaaatagcaacaattaatgaaccaaataaatagtcaagcagaggtgacgacaatagagatctgaaacgaacctgaatcttgtacgttaacaccggccaccacagaaactataaccataatgaatgaacctgactttagcatcatgtgccttgacgctagagagaatccactcagtacaactgagttttccctacttctacaatctactactgattttatcaagttgaataatatgctatcgtgttttcttgaacctatactacatgccatcgtcatctacaagccgttagttgaacatctgttagagctttagttgaacatctgttagagctgaaaaaaggcctatttaccctaactcatgttttattgtgtgtcagatactacttccttttacttctccgcgctcgctacctttgttttcaaacttacaactgcgttgaaattccactgcctttttctttcgaacttactgctgcgctgaaattccactgctattttatttcaaacttgctactgcgctgaaaacctgaaattcaccacattttgaccccccataatacgcttaacaattccggcattattactacctgcatttttttttcgcagcagcatttcgttcaactgcatcaaaatgtacatggacggatatttgtataacactcagaaaaaaaaaatccattcccatgccactttactcgcgcctcgtgagatgactaatacagattacaaaatgagagatgactaacaaacgttgattaccattcactagcaaagcaggagcaacggcataagtcccatacagccaggttcagagtcaaaaaaaaaaatcacaagaacagtagtacagtcggccggccagccagcggcgcgtcgatgggatcccggcgaccggccgccgccacgcttcgatggggagcccagcgcccggccgcgcgtcgatggggagccgggcgcttggcagcgcgtcggggactggggtagtcagcggcgcgtcggggacttgggcggccggccttccatcgatgggagtcggcaccgcctcacactgggcagatcaatttggggcaggagcacggctacggttttcagccaactagtgctatagtgaaaggatattttagtcattaagaaaaaattcaatacatcaaacgggtgccaactaacggcttgtggacggcgatggcacacagtagaggttcaagaaaacacgatggcatattattcaaattgacaaagttagtggtagattatagaagtggggaaaactcagtggtactgagtggattctctcacgctagagacccaacatctcaatgtcatggttcttagcactaaatactggttataagccaatatctctgacgcttagccactactagaaaaactatttttttcagatgatagcactgtcgacgggggatacccgtagaccggatatagagagtattggggtccgttagtacgaggatctacatagtacgacaacaggcaaacaaaagaaaagaattatactggtttaggccccttggtaggtaatagccctaatccagttgatatgggattatatgatggaaaccacaggttacaaagggaatagcggaactcaatgataccgatgagaccgtagtcgagttggttcaactagatctcctggcgacttggctcctgcacgctccggctccgtaggctgtggtggatgttttggcagtaatattcgatgccttaggtcctgccagggggtcccttatataccgcgggttagttgatcctcaagtaggactcggagatatcggacccctcacgatacagtaaagactcaatctcgaccgagtaggactcctcccatccgtagattatgtttctatcacgtgatagatttgcttaacgtatacggaaactatccgtatacgcgtgggtataccgtattagtatacagcgtacatccaagggtagagggtatatcttatccgtaacactgatagtagccccccgacttctgcttaaatgaactcatgttatcgatcgcaacttttgatgtcgaaattgttatcgttctcatctgatcgatctcggtgtaaaaaaccgtagagacaaagagccatcgacaacaccgcgtgaagttcaatggtcatgagtgaatttaaattgatgtctgaaaactaccgcgcgtaacagacctagaattttccggcggcaatctctctcctttccttgggatacgcaccatcgatagtgcgcttatttatagggatttcgggaatccattcgaagtccgtttgccagaaaactctcttgccttgtagcgctcttcgtcttctccgctccccgcaaagaaaaccctagcttatttccttcatcttattctccagcgatcctttggcggcgatggatcttgagtagtctaccttgaacaccgcattcctgaagaagctgtaggacgacggtgccctccctagtcgcgggactttgcaaagggaggctggaggtacagaacctgaactcatcttgggccccatgtttgtggtcgaggattatatttcttgcggttttctcccttcgccttccgaatttcttcttctagtcttgaatttctacggcctttctttgtttcacttgaaccccaattccttcgcatttcttagcatcttctctcatcttttagaggcctacattggggtagtgccctttcttgacctcttttgcttctattacgaattgcgtttgatggaatccaacagggtgtctggatgcatcggattccgacttcggaatggcctgaagtcgcgttatatccccttccagtgcccttcttattgtagcaagtggcggacgagatggttctatctctagatagaaaactcggaacccgtccttgttgtccctaaggatcagccagaagaaatcccagagtggaccgcaaaaccagccctgactccctccctccaatctttcatcgacatcattgatgatctccgaaaacggcggttgtcgggatacgaagtcgctgtcgacttcgtaggtcggtggattgagccgctgcaggcccgtgcccatccggcctttgaatactctgggccagaggacacgacccgggtctctcctcagggtattttttctcgcatttctaattttgttccgagtgcatctgtttctcctgacttatcgagttctcgttctcgatttataggtctggacagcgacactgtgggacgtcacgttggtcagataatgatcagcgcatcctcgaaggcggacgatatccccatcgcactctgcaacaaggacgcgaccgaacgcgccgccgcgattaatgtaagtgtattcgatgattcctttacatctctcttctcggggtcgcatcgtgacttcacgttgtgcaggctctccctctgacgtacgccatcggacctctcgtggatcaccaggcggcaacatcgttgaaggagggcgttgccaaggaggcatctgacgctgttgctggtggcagtgttccgaagaaagggaggatattctcgtccgtggtcaggacccgctggaaagcgacaagctccgcggtaagcctctctctcgttctttagtgcgtagtcggaatgacttgacctcacaccatttcatcttactcatgactcggacgcatctcctccacctcagcaaagccagaggttggtgacgatcagcaagaagtaagtaaacgttcttgaggtcttttcattctcgaagttttgattgtctaccgtcatgaagtaaaggaaaatcttcgcagaatggcgcaggcgaaggtggcgcaaggtgggactgatgctgcttccagcgtgtcccctgtggcgacttcgactggagtcgtggtcgctactaaggaccaggaagcagcaccgagtagccctgccgtcagcctcgtgcctacccggggcttgtccaccgatgccctcaccttggggggagctccaagcggagatggagcgcatcctctaggtcggtgctcgcggcgtaggccgcgagatcaaggaggtgagggcggcggcgtcgtcggcgaatcagcgtaccgatcagctggcgcgcgatctggcggaggcccgcgaggacctcttaaagatgagggagttggtagccggaaatgagatgcagcggcacggacacgagcaccggatgtcggagctcgagggcgacatgatcgacatccgaggttcgctgtgaatgtcgttcactagcctgcaccaacttgccagggagtgcggcgccatgactaccatcccggcgaacctgatgagttctcactgacgtcatcactcacggaactggctacgacgatgggggaggtttgtaaggagctccgagttccccgtggagaacccgaggagtcagcgactggttacatctcgtggttgaatagggcctgcacacagctcgaagggattggcaagcgcatcgatgaggccctgaagcaggagtgccgtcgagcgagccgctatgccggaggacatgtgatggcctgtatccgagatcaccacccgcagctgcacctcgagttcctttgtgaagggttctcgcattctcggaggacgcccgcggagatcgacggtcttgtgtagtcgatggcgccgcttgccgagaaggttttctgctccatgcattggcgttggccgtcctggtagcttttgtatcctatagaaaaatatctcaaggaagcatgtaatatactttgaagtatttgtgacttgtaagaaatacttgtaaaatataaatggaatctatctaagttttcttactctgggtacgctgtgaacgagtgttttctcactttccgacttcagccagtcacttgagccatacactctccctagctttgtgaattgtcgcgaccgagaaaattgccttttcccgaacgctagtgtattaatccccatcccaggaaaagccggggtacaccacacaaacatgatacaaaaggccaacctttattatatcgataatatttacattattacaaagacacttcaggcctgacaaacaaaaataaacagcagcggactagcgggcctatggctccatcttcataggcgctcaactggggtataagccaggactccacctaggatttcttctccaaagcttctctttctgaaggggggagagatagagcaagaatgagtacaacccccgtactcagcaagtcacaccgggagatgcatgattaatgcaagggagtacaaggggtaataatataggg

SEQ ID NO: 29464 - DNA, 12049 bp, Oryza sativa
ttattaatcaaggccggtggacccacacggaacctgcctttagcccaaggcttacgataattcaagaccgacttggcaaaccggacgtgggtccaagctcgtcccaagccaaaccagggcaaaccttttcacattttagttgttaggcaaattttaagaattaaccccttaacttgggtacattgctaggattgcccatatcagagggcacggctattcgaatagatttactctgatcagaggtgtacatctttacccacaagacacatctttactccgcattccatggccttggaacccgtcataaacatgtgacataacccttcacccatcctagccgtgaacaaaagtaccgacccaaccctgcctacagccggtatcccgggacaggcaggccaggattgagccattagcaataggatatagaccgggtgcgccacacgcataggggtgagaccacccgcatactagtcaagtgccatggcatctcgactaacgggcatcgacccgtgtagtcttcatttgcctagacatctcgattaccgagtcatagctcgtgtagccttcatttgcctcagagatatccatcgtcgcaacgacttcatccatctctatccgtgtccttttgtttaggactagactgagcaccgagttaagccttacccattagacatgtggttagtacggtagtgctttgtaacagaggcccgaagaccggtccttatagtggccgaggtgttactggcaaaaccctgcacctcgagcccagcctaaaactattttgggagttttgaatagagggggaaggtgtgtgttcaattccaacataagccagccattccacagtgtccaaatgatatgagcattcccaaagtctaaagttataaaaccacctaatgttgcctaattaatcagcgaagcatctacctaaattcatactagtggaaccgttaatagagtacccactagttggggttttgtttatcctagggtgaacaaggtaataataaacaatagcaatgataaagctataacaaggattaataggaagtgctaaataaaatagtgataacgcaggaatttaaataaagcggtaatgcaataatttaaatcaaaataatttttaaactgggattcaatatgcttaagggtgatgtgacttgccttgctcagagagaacagccttccgaaccttcggcgacgaccgcaaaccacgcttcgagaacctccggaacgacagaagctacgcgaagcacacaagcaaagctacaagcctataaagaagcaataacaatacataaaaagaaagcacacggttctttaggttataacaaacattaagagacttgaacgggtcgattcggggttcgtatgaccaagatatgatcatccgaagtttattgctgttacatggagatttacggattattgtgattaggttttgcaaatataaaacatgtataagcgctagcctggaaaagacaggaaggctgtgccgttgacatgtggaccccacatgtcaacctaagggaccacagtagaccgagtacacagagacggtccatgggtcgacggaagcggatcccatgtgtcaaccgaggcgaatggccgacaaacggactcctatagacaccacacgggctgcacacgtggaaaccacgcggctaccgagcgggcacactaacacggtcaccacacgcataagcgaacgactaccgacaccagtaaacgggtaccggggtcgacaaccgcacaacgggtacggggcgacaccgaaaggacgaggacggggcagtgagaggacggatccttaccaccatgcgatgaggcgtgggaacgacaaagacgaacgagcgcgacggagacggctcagggacgacggaggcgaacggcgagggaacgacttcggcggcgatccttgcacgaaggcgagacgcggccagcacaaggcttgacgacacggagccgaggacgaagacaacgacggggctgcagcggcacacttgacggacgtggacgacagacgagaacggcttgatggagggacgaacgccacgacgaccgggaacgacgagaggacgacgactggaaccagcgaggaggcgatgagggcagccggcagcagctgcacggagacgaggacggcgcggaacacgccactgcgatgccgaaggtggttgaggtgcggccgaccggtgcacgggcgaggagggacgggcggctgaacaacttcgacgaggcggatggagaggttcgtggcgatgtgcggcggcttccgggcgaaaccgaggggtggacgaggtggagggctacgtcaccgtgccgagggaggggacggcagcgccggctgacgcacgggcatggcagaaggggctgccggaggagacgtcgacgaggaggaaggagaggccggtgcgggcaacggcgttctggcgaaattcgggcgacgccgtggcctggccaggaaagaggacggcgtttcggtgccgggagaggtggtggcgacgtcggccggcgcacaggggacgtggcagaggcggccggaggcggaacagtggcggcaacgccactgttgccggcagggatgcacttctggaggtctccgcgtgaaacagagggcaggccggcgaagaggaggcggctgcgacgctagaggaggccacggcacggccggccggcgtgctaacgcggcggcaggggcggctgaagatggccggcggcacgggagagaggggacgacggcgggaaggtggctagggacctcgggaagactcgggaggaggcaaaaacgagagaacgcaaggagggggttccaatttataggcgcgggtcgggagctggccacaggagagggtggaacggcggcggaaaaggcggccggcggccatggaaggtggccggggttggcgcgggcgttcccgacgattgggggcacgaatcaagggggaaattagggggaattgaagaggaaggaaaggggattaattccccctaatcaattttggaattcccggtttgaatcgcgtggattttggggaggaatggcgctagggttcacgggagagaaagaaggaggccgccggctggaggtcggggacgcgcctgacaggcgggacccacgcgggaggcgtcatcagcgcacgcacgtgcgcggcacgggcgggagggcgccgctcggcttgggtggggcggcttgggctaggacgtggcccaggcgggaggggaggaaaagggagctgggccgagggggaaggggaggcccaagagaaggagggagagaaggagagggagtgaaagagagggaggaagagaggactttggccgcgggccgagagagagagaggactttgggccagacttggcccaaaggaggaaggaggattatttttaggcttttctttttaataaactttgatcatagttgttgttgcttaataaatatttccggtgctctgaaaatttaagtaaaatttgagggctctttttagaccaaggagaatttaacaaaaattctccgggccacattcgaatttttcttgaacgtattttagtgtttgccaatttcttttcgaattttaattaattctattattctttttagaaaatgatttttatttcgggacaaatttatcaggacgtgacaataaggctcttggacccttgacctgctgtagacccccgattttggaaatcggaaatcttctgtgtttatccgtaccaatccctagatcagtagttggtacacacatacatagttggatcacaacatatcacgaatgagttcaggctaaaagagttaaatacttacattagggccaggtaggccaacaactatcagagaacaacagcggaagacaaaatattataagggcccggttaacatgccacaggcagtcgacaaggacttagaacaaaaccgcaatccgatcatcttcttggatacgcaagcgtaccgacaagggcttctcttcaacactctcctaaaagatatataaatagcaagggtgagtaccaaccgtactcagcaagccaccacaacaacaatgcatatgatagaggtatttcaaggaatggcttcaggttcctttgcgcaaagcaagttttgcaaatcttttcacaagcctaagacctagcatagactgattaagttttaataccagtgtttacattaaacaacgatggttctgtccaccatccattgtgatcccaaggatagcttcccgccattgagtcgtcatggttttctgaggacgtccaccttccctcctctcaggaagtggctccatcagcataaaattcatcatgcaatatcccatcccacacatgttaagaatttagagtctagccaagtgtaatacacgtcccggtgctcaataaccgcgagcacggctattcgaatagatttggtttactcacactgcagtggatgtacactttacccgcactccgtgtcacgtcctgataaattcatcccgaattaaaaatcattcgctaaaaggaataatagaattaattaaaattcgaaaagaaattggcaaacactaaaatatgtacaagaaaaattcaaatgtggcccggagaatttttgttaaattctccttggtctaaaaggagccctcaaattttagtggaattttcagagcacaaataataattaagaagaaataaacaaagttaaaaaggttttgtaaaaagaaaaaccctaaaagtcttctttcccccccttcccttcttgggccggctcggcccaactccctccctctctctcctctcccccgcggcccatcggctcctccccgcgcgcgcgccgctgacgggcgggcccgcccgccaccctcgctgacgggtggggcccacccgtcatcccctacctcgcgccgcgcccgccgctcgcccgtgccctagcgccgccgccgccgcggattccgccgcatcccgccgtccccgcgcgccataaagagggggaaatcactccccgtgattccctctccctttccccctatttttccctctctctctccctcggattcgttcggatttcctcccgcaaacttcgccggcgccatcaatggcggccggatcttccgcgccggtttctttctcctccggccgccctctctcactcccaccgctatttaaacgctccccgtgcctccctcctccgtttccgaccctcgccgcactctctctccgtcggattcgagcccgcgccgtcgtcctctctctccgccgtcgccgccgagctccggttcaccgccgtcgtcgccccggaccacctcccgcttcggcatcgcttgcttcggcatcgctgtgtccttgccgatctcgtccactcctctgtttcgcccgccgaccgccggagcaccgtcgtcctcgtcgacccgagccgcgccgccgcctctctccacttcggtcgccgtttccgtcgtcgccgtcgacccggggtgagccgaggaccgttgtttcacttcccccttccctcccctctctcggccgccgctccgtcgcgccggaggtcgccgccggtgaccatcggggcgcgggcgcgccgcctcccgtcggccgtgccggcgaggccgccttcgggcgcgccccgcggctgctaggtggggcccggccgtcagccgcccgcgccctcggtgcggctgacacgtgggacccacggcgccggtcggcgtcagccgcgtgcgcccggtccaccgtggaccgtgaggctgccgcgtgggccccggtccgcgtgtcccctcccctcggctgacgcaataaatccaattttaaattaaaatttaaatgaagaaattcgtaaatatccatttaaagagcatataaacttcaaatggccataacttggccatttgaactcggaattggaccgttcaagtctctaatttttccttaagaagtcaagaacccatttttgtgctttgtttctgcttgttatatggagtttagtagagtaaaagccttttcttttccgttggtcgtgtagacgctgcagcttcggaagatccgctcttcgtggaagttgaagccggcgtttgggaaagcgagcaaggcaagtcacatcatccttgagcatattgaatcccagtttataaaattattttgatttaaattaatgcattaccgctttatttaaattcccgcgttatcactgttttatttagccatgcctatttacctttgttaagacattattattgctattgttattattaccttgttcacccttggataaataaaaccccaactagtgggtactctattcatggttccactagtatgaatttaggtagatgcttcgctgattaattaggcaacattaggtggttttataactttagactttgggaatattcatatcacttggatactttggaatggttggcttttgttggaattggacacacacctccccctctattcaaaaaccccaaaatggttttaggctgggctcgaggtgcgtggttgggttttgctagtcgtacctcgggtactataaggattaagctcgggcctctgttgcaaagcactaccgtacttccacatgtctagtgggtaaggcttagtttgtggctcagtctggttataaacaaaagtacacggattggagatggatgaagtcgggggtcgatggacattctccagggcaaatgaaggctacacgagctgcggcccggtagtcgagatgtcatggcacagggctggtgtcctgctgctagggggctcaatcctgcctgcctgtcccgggggttccggccgtaggtggggttgggtcggtactcttgtttatggctaggatgggttgggaactatgtcacgtcttccgtccgtataccgtggtggtatgtggcacgtggttacacgtgagggagatgtgtcttgtgggtaaagatgtacacctctgatcagagtataatctattcgaatagccgcgccctcggttatgggcaagctgagcaatgtacccaagtcagtgttttaattcttaaaatttgctcaacaactaaaatgtcgaatggttggcctgggttggcttgggacgagctgggacccagggtcgggttgccagtttggtctgaatcatcgtaggccttgggttaaggcaggttcgtgagggttcacggccttgtttaataacattgtgtagctctaggatcgtccttataaaatggctttgggcaactaagtgacttttaaatgctgtttactgcaaaacttaaccccaatattattatccccttgtacccccttgcattaatcatgcatccgccggtgtggcttgctgagtactgtggttgtactcattcttgctcaatctttcccctcttcagtaagagaagctttggagaagatgtcttaggtggagtcctggcttataccccagttgagcgcctgtgaagatggagccgtaggcccgctagtccgctgctgtttatttttgattgccaggcctgaagcgcctttgtaataatgtaaatattatcgatataataaagatgtgtcttttatatcatgtttgtgtggtgtaccccggcttttcctgggacggggattaatacactagcgttcgggaaaaggcaattttctcggtcgcgacaagctggtatcagagccatctcaactgtaggataagccaagtggataaaacctaaggacatattttataaataaaactatttccgaaagtccctttttcctcctttcccctgtgctatttgcaaaaggtttactcccttcttccttcttcagatttcaactagtactagttggttagttttgcgaagaagaagatgtcgccaattgttcgccgaaggtccggaagaccgcagggtccgctagcgaagtggaggaagcagtgaagccagctgtgaaggagtgaggatcttgggaacccgtcgcagaacctaagccaccctctagtgtttcgtttgttgtgtgtttccttgcttgtgtgtgtagtgtgtggtttgcatcggtgggttgtgatgtgaccatgctaggttgtttgcttaatcaacttgcagaataagtgaaacaaataacacatcagcaagaagagttagttcctttaaggtcctgtctctagttctggtctattctttcctggcttgtttcctctctcacctcaatccctgtaacagatgtttaacagagaaaaaggaaagaatgtcagcgggtatgcctcaagtaacccaagttttcaactcaatccaccactggcctcaagagagttaaccagggcatacccttggtccattccaagcatgctgcttagttcacagctaccattagttggaagtcaagaccaaaatcagtatgtgtttgatcgagcatttgccacccaggtcaatgagcttccaatgctagaagaggatgtccccttttgtcacgattgtagagagcaaggacactatgccctgaattgtccatgggtatatgccaaagaagccccttcctttggtttagcagggcagacatcgctaaaccagcctcctcgcaccaagtcaagcttgcagcctagtgtacaaaggagagagcctaatggagagaatccattgaatcccgggaattgctttcctcctagcccttcgtaccacgtggggtcacgtgctaagcaagccaaaggcaagaagagtaagaatcagaagagaaaagcaccgatgcgaactgaagaagaagtacgtaagatgactattaccagcaccgaatggcctccagcagggataactattcctagacgtcaaagaggaaataccttccgaggtgcacgacagttgacccagcaccttctaagccatggtggcagagtatctgatagtgaagggtcagatcaagtctcctcggattatgaagatgagtctctccgacatctcggcgaggaagagatggaatcaaaagcatgcccccgttgtggagaaattggacacgttgctagcctgtgtttcacactctgcccttattgtgaggaagaccatccaccaggtaaatgtcccacccgcaaggtcacatgttttctgtgcgaaggtaccaaccatgtgcccaaggattgccaactcagtgtgttgttgaccaagaccgcagaaatccaacgaacaaccctacgattgtctcatcagctagtcagctccaacatcaacatcgacgatatcatccccagcaccaatgctcctcctgctgcacctgactctgcagtaaatcatagcaataataccttcaacaccaaccattctctgcaccgacggcctcagcaaagaattgtcgtcgatggaagaagttgtgtctctccccgacctactccaggccgagcgaagggcaatcaatctcaggagtgcgataccaagcagaagaccgttattcgcctcaatcagcaatcagaaggaaacttctcttgtgaatgatagcaatatgcagtcctatcacatcatcacagaaccaatcaaggatgcagtcactagaacaatgccagctatgtatccatgtttgtgattttcagttcgctacttatcactgtaatcgggagtttgcagcaatcatgtaataaataaatatattcatgattataaacaatgagtttgttatgtttatggaagattcatgttgaggatgcaaggtaccgatgttaagcaccttccctttttgtttaaggcagtgccttgtattcatgtaataagggagaaatgtgtaataaaaacaagttctatgagggttattttggaagatgctgatatggaattatgtgtataattgtttactgtcaaaggagacctagggtctcatttcagaggaactatgttctaacctcgagttaaaaaccaacctgatgatagaaaagaaaatgccgagtccgggaagatatctgttgcttcaattgtcaaggaatgggtcatttcgccgacaagtgcccaaaaccgagaaacatagctgccagcacgtcagtccacgcaactccttgcaatcagaagcttgctcctcagcgaattgtcatccatgcatcccgaagcagtcctatagcccgcattgcaacagctccaactccagcgagtgcattaccacaaggtgtcaatgctcaatttcagccccagccatcagttgacaagacagaggccagtatcggcattgtacctttggatgttccagcacagcagccaagaaatcaagtacaagatgaagaacccgaacgtaagaaagttattgtctgttacaactgtagtaccggttaaggaagcagacatgccaatcgccaagtggtcactggagcaaatgcagtacctgataagcctaacgttagtcagaagcaaccataatactcttatatcagtgttcaaatacttttgttttatagttgttccccgtcaatcatgtaataacagagaaacatgagataatgaatgagcttgataagcttatgaaggacccatgttaagattgcaagtgctgtgagttgtgcacgttttgttgttgattagggagacctagggtctcattttcgtaaacccatgatctattaggaatcaaatagcctagcgattgatggcgaagaaaatcaagtgatcaaccaaagagacatttgtttggactaagagtttcagatgtgtctcttcggatcaaaggcaacaatcgtcagtctagcttttgacgaactacttcaaggtttctctgagagacagcacgcccaaggacctcattgccccagaagcatcctcaacacccggagcgaagagtacctggttgagaaaggtcgaaaggtgattaatggaagagatcggaaaagatgtttggttactgggaaaagaagtaggtcgaaaggtgattgataaaggataacgagaaccatgatttgtgtcactcgaggaagactcccgatagcaaaacaaccctacaacagttgcccggtcattaaagtaggtgaattcacgagtaagagagatgaccacaggtagaagtacttctatggggacaaggatggaaacttttgtgacatgaccaagaagtcaagaagtaaaacctgaacagtggaatctaaagctcggttcaaccttgggctttgtatcagatgctactagaataaaagcacttgcactagcatcgttcaacgcactttcctagcaatcgatccatcgagaaagaacacatcaaggctgaaggtgcaaaggaatacgttgaatgctaaatgatgacaacatgaagagaatagtggaaagtaaactgaacataaagaaagtgaatccgagttgcttgttcgtgagagctattcccagttatgaatcaagtgatatgttcgaagataatctacagaggtcagattaaaatcacatctaacaacgaagcctcagatttggcaggataatgattagacaataacaaatccagcagtaaagccatttgggaagacgtcaaagtatgtcaagtgggataagttggttctctggtgaagcataattcaaaggcaaagttatcgacccttgcatcaaatagcagaagtagctatcacccggagaccaggaaagctaatatgaggcagttggtggcaagttagaagtaaatgacaagcatgatattcttatgatgacaaacatggtatcctagtaatgacaaagctgatgtcgacgcatgtcacgaaggtggtaacttgtatgaggttgacgccaaagatatgaatgataagaagttctagaactgaagccccatcctcaaccaccgcagcctagtctgagtcagttaaaggtgcaaccagggacaagtcgggtgaagagaagattccatctgcaacaggagatcgagccaagcagtccagagtggagaagtttagttagacaagtttgttatagaagacagagcggaagaagtcagacaagaagagaagaccgcccaacctatcttcttgctagcctcctcgaatctcggggacgagattcttgtaaggggggtggatttgtcacgtcctgataaattcatcccgaattaaaaatcattcgctaaaggaataatgaattaatttaaattcggaaagaaattgggcaacactaaaatacgtacaagaaaaatt

SEQ ID NO: 29465 - DNA, 16114 bp, Oryza sativa
acggcgacgggcgcgcggctcggggcagcgcggggctcggcgcgcagtgatggcgacgggcgacgcgacggcgacgggcgacgtgacggcgacggcggaatgtcgatgggacggcgacgcggcgacgggacggcgcggcgcggtgcggggcttggcgcgcggtgatggcggcatgacggcgacgggcgacgcgatggcgatggggcgtgacgcgcggaggggtggggctcgaggcgatgcgaccggagatggcgacggcgcgcggcacgatgggacgtgagggggcgcggcagcggcgaagtgatggcgcgcggcggctcggggcgcgaggcgcgcgcggcaggggagatgggacgggcgcgcgacggggcaggggcgcggggcgcgaggcgacgacgcgacggcgacgacgatggcgacacgagcggcagcgggcagggggaggaggaggggtaggacggctaggaaccaaatcgaacacctagggggctaatgaacagtgatagccggctatttaaccctattttagcctatttcctatataaattttattctataaatcctaatttttacacaaatgaagtttactcaatatttgtgttattctaaccaatggattcaccctatattaatattacccatatttatttatttatcacacaaacgagttctttttagaataatttagattattggccctaaagtgaacttatatatttttggaagactttggggtaaattgaatttaatataacgacctgtcatgattaatacattagtagattggtcaagtttagttgtatagcaatatattttacacggataggttcaatctatttattctataaatagtaaattgagactcggcacaatattaatctaattgtttaattaaaacctcacataattttataaagcttaatttaattatatgaccattatttcatgtgaattggtttacctttatatagaccattataatttagtaatatcccattaattactcctagtgaaactatgttatagatagagttccactataaatggtcatcatttcatgtgtatttagatgtcatggcacgcaacacatggttcaagtatttagtaattaatccataatttaaattagtaattaaccttccgtttgtctggctttgttttcttgtgcgtaattatttgtagggttaacaattaaatattcacgtaaatttatctattacttaaattttagatccttactttactttctttgtgatcatttacggtttggcaagcaataacaatcataacaaccagcatgatgcaaaagttttaaaaagttcaaaatttttgtgatttttattgtcttgaattttcaggatgttacacctgccttggttgaaaaagcactgaccctagcccccagccgtgaagttggaaaactcaatttccgattacatggatggtgagaactcttacaataccagatcttacatggtcgtttgtctctgcatgatctgacaaggccttatccgctctgggcgtccccagccgaagttcccttaggttcctcaaaggccttgccaggacggcgtaaagggacatgaggataggtttcaactctaggtgtcgtcgtggtaagggatcgtcgggaaggaacactttgacaatattctttacctgaaatcgactttattgaaatcgtgagatgtcttacaaatttggatactattgatttatatgtaaaatttacataattgatcaatgttccaggaatttgctaactcgcgaccctcgccatctgcaatcttgaatgcgctcggccacaagacttgcgtgaccgtgtatggtccttcccacttgggtgagagcttgttgcgccctgcttggctttgaacccgtcagaggacgtaatcgccgatcgaaagtgtgcgtgttctaatgcacttctcgtggtatcggcgaagggcctgctggtagctggctgctctgacggcaactctttctcgatgttcctcgagtagattcacatcgtcgcttcgctgctcctcctactcttcgtcggagtacttctgtactcatgtgctctgatgtcgtagctccgtggggagcatagcttctaagctgtacacgaggaagaagggtgtctctttattcggtgttgtcagtatggtacggacagcccatagaacagaggggagttcttcgatccacttcttattgtgtgacatgagtctgtcgtagacgcgggtcttgatcccttgtagtactatatcgtttgccttttcgacctgtccattgctttgagggtgagaaaccgaggcaaaacaaatcttgactcccaatccaatgccgtaatcctggaagtcggcactgatgaactaggagccgttgtctgttatgatgcggttaggcaatccatatctgtagaatatccctttgataaacttgatagcattgtcagccttgatttcccccgtgggcgctgcttcaaaccacttggtaaatttgtcaatagccatgaataggaatttgtagccgccatgtcctcgtgggaatggtccgagtatatcgagcccccagcacgagaacggccaagtaagagggatagtctggagtgcttgcgttggcatttttgtgtgtttgctgtgaaattaacaggcttcacaccgctgcaccatgtcgcatgcgtctttgagcgcggttggccagaaaaacccttgtcgaaaagcttttcctaccaatgtccgtccgccggcgtgtgacccgcagaccccttcatgtatgtcgagtaggagatgtttgccgtcatcggacgagatgcatttgagacgtactccgtttggcgcctttttgtacagatcgttgccgatcatacaatagatcttggcttgtcgggttatcttcttagcttctgcgtcgtcatcgggcaactcgtcgctactcaggaacttgatgagcggggtccgccagtcgtctgtggtctcgatatcggcaacgacgtgttccgcctctgtagcccccgagctgatgtcggggacaaccgtgctaccttcgtcgtttgcctctttcaccgatggttttgtcaggacgtccagaaaagtgccaggttcgagtggctctcgtctagaagcacgccgtgctacgtcatctggttcgatgttgtccttatggtatacgtgtcccatcaaaccttttctccagcttcctgacttctgcgaggtacttggataactcggggctagagcacttgtagtctttttgcacttggttcgcgactagttctcaatcccctttcacgattagtcgtttggctccaagtgcggctgctgctcttatcccggcaagtagtccttcgtactcggctatgttgttggttgccctgaagttgaggtgaattgcatgcttgaactgatctcctgaaggtgatgtcaagatgaaccctgcccttgctccttggctgttgagtgcgccgtcgaatgccattgtccatgtttcgctgtcggtttgactgtttgacatgttttcaggcatagtccattcggctacaaaatcagcgaggacctgggtctcaatagctattcgtggcacgaagtggacatcagactggcttagctcgactacccatttcgcaatgcggccgacaacgtctttgtttctcacgacttcttcaagggggaaggaggaaacaactatgactctgtgggcttggaaatagtagcgtagctttcttgatgtcataattaccgcataaagcaatttttggatctgtgggtatcttgtcttcgcgtcgtggagagcttcactgacgtagtaaaccggtctttgcactttctctctctcgacaacaatgacagtactcatagaatatggtgtggcggtgatatagaggaataattattcattaggttggggagcaacaagtacagggggatttgacaggtagcgcttgagcgcgatgaacgcgtcttcggcttcctatgtccatacaaatttgtcttgtttcttcaataaggcgaagaaaggttgtcctcgctctcccatcctagcgacaaacctgctcaatgccgccatgcatccagttagcttttggacttccttgagtcttgtgggcgacttcatgttctcgatcgccttgatcatctcaggatttgcttcgatccctcttccggagacgaggaatctgaggagcttgcccgatggtactccgaacgtgcatttctctgggttgagcatgaggcgatatcgtcagagattgtcgaacgtttcccggaggtcatcgatcaatgagtcgctggtcttggtcttgacaacaatgtcgtcgacgtaggcctcgacattgtgtccgagcttgtcattgagtgccccttgaaccatgtgctggaaagtgtttcctgcggttatcagtccaaacggcatcttgacatagcagaatacaccgaaaggcgtgatgaatgatgtcttctcctcgtcctcttttgccatgctgatctggtggtagccggagtaagcgtcaagaaatcttaacaactcacaaccggttgttgagtccaccaattggtctattcgagggagagggaagtgatccttgggacacgccttgttgagatcggtgaagtcgacacacatcctccacttcccgttggccatacgcaccatgactggttttgctagccactctggatggagaacttctttgatggaaccaactttgagaagcttgtcgagctcttctcgtatggcttgcttttgatctggtgcaaatctccgcagtttttgttttactggcttggcatcgtgtcgcaccatgagtttatgctcgatcacctccctggggactcccagcatgtcggacggctgccaagcgaacacgtctgcattgtcgcggaggaaggtgatgagcgcgagttcctatttctcatccagtgacgccccgatcttgacagtcttgtcggggtaggcactggagagcggaatgatcttgattgcgccatctggctttggcgtcttgttggttttgctcactttcttgagcagctcagctgtggcggatgggttgggagtgtgctcgaccatgtcgaggctctgcttgtcgcactgcactgccagcttcgcgtttccctgaatagtgattgttcccttcggcccaggcatcttgagcacttgatacgcatagtgagaagcagctatgaacttcgcgagtgcagtcctcccgatgatggcgttatatgctgtgtcaaactcagcgacatcaaagatgtttgcttggccaaaagtcactggtagcgtgatcatgcccaatggcttggatgatgactgaggagtaatccaatggaagggttgatcagtgggcgtcaactcgcttcgtgggatccccatcgcgtccaaggtactggcgaagagtaagttgatgaagctgccgccgtcgatgaaaacccgtgcgaccttgatattccgaataatgggcttgaccatgatcggatatcgccctggagcgactacagtcttggggtggtctgcctctgagaactcgatcttctgctctgaccacttcatcttggacgcagccccctgccatgtcgaacaaactttgcgctccactttcttgtactctcgctttgaggagtacgccgtggaacctctgaagatatgcgaaacatggaggtcgaagtctgggtacgctgagtctgagtcctgagtagccgcttctgcggccttctcgactacacgtactcgcttgcccttctccaacgccaattgcttcgtgagtgcctttttgaagacgaaacaagtctccagagagtgcttgtccaatttgtgtatagggtaccatattttcttcgtgtcgtcgccttgtgggtatgggtacttgggtgggtcaacaggttctgctgttaggacctccgtttgagctttccgtttcccactcctgcgactgtttttcttgcttgactcaggtgcgtccttggctgatttcttctctcctcctgtctttgccttgtcgttcttgcgtctcagtgcgtcgtccgcgtgagcgcatcgatcgacaatctcgaatagtttgtgagcagttgtgatctgtcttgtcgccaattcctgggttgtgtagcgatctcggacaccagacttgaaagcgcggattacagaagcatcggtgatttcgaggatcgtatttctgcactcattaaagcgccaaaaatagtccctcaatgattcgcccgaattctgcatcaacgcgtgtaggtcatccttaatcgcgtggcgcttgtatgttccttggaagttagcgacaaactgttgccacagatctgcccacgaggaaattgagtagggtgggaggtgaaccagccatgaatgtgcagatcccttcaacgctgccggtaaataactcgccaatgcgttgtcgtctgctccggcagcatagagtactgtggagtagacctgaagaaactcttcagggtcggtgcttccgtcatatttctctattgctcccagttgaaacttctcaggccatcgaacatcccgcagagcaggagtgaaagccctacacccgccgccaggggcagtaggttgccggcgatcatacgctcgtcgtggattgtcacgtcccaaaacgaccctaaaatatatcctctaaattatgcctaaaataattaaaatccgtgtgaaatcctccaacaattaaaagtcaaataaggcttagaggatttttgtatatttcctaaaagcctaaaatgcgtaaataaattttagtggaattttcagagcacaaataataattgttaagaaataaacaaagttaaaatgattttataaaaagaaaaaccctaaaagtcccccttccctcccttgggccggcccggcccatctctcatccccctccccctccctctcctctccccacggcccatccggcctctccccgcgcgcgcgccgctgacgggcgggcccgcccgccaccctcgctgacgggtggggcccacccgtcatccccttcctcccgccgctcccgccggctcgcccgcgccctagcgccgccgccgccgcgaatcccgtcgcctcccgccgtccccgcgtgcaatcaataggggggaattattccccgggatcccctccacctttccccccttttttccctccctctctccctcggattcctttggaaacctctcccctaacctcgccggcgccattaatggcggccgggtctcccgcgcccatttccccctcctctggccgccctctctcactcccaaccctatataaaccctcctcgagctccccactaccgtttccgccactcaccgccctctctccccgccggaattgagctcgcgccgtcgctctctctctcctccgtcgccgccgagctccggtccgccgccgtcgtcacaccggaccacctcccacctcggcgccgcctccttcggcttcgccgcatcttggccgacctcgtccaccactccgtttcggtcgccgacctccggagcaccgtcgaccccgtccacccggtcgccgtttccgtcgtcgccgtcgacccggagtgagccgtggaccgccgcttcgtttccccctttccctcccctctctcggccgccgctccgccgtgcctatggccgccgccggtgaccataggggcgcgggcgtgccgcctcccgccggccgcaccgacgtggccgcctccgggcgcgcctagcggctgccgcgtggggcccggccgtcagccgcccgcgccttcgggtgcggctgacgcgtggggcccacggcgccggccggtgtgagccgggtgcacccggtccaccgtggaccgtggggctgccgcatgggccccactcccgtggacccggtccgcgcgcccctcccctcggctgacgcaataaaccctttttaaaattaaaaatttaaatgaagaaattcgcaaatattcatttaaagagcatataaacttcaaatggccataacttggcaatttgaactcggaattggatcgttcatgtctctaatttttccttaagaagtcaagaacctatttttgtgctttgtttcagcttgttatatggagtttattagagtaaaagccttttcttttccattggtcgtgtagacgctgcagcttcggacgatccgctcttcgtggaagttgaagccgatgtttgggaaagcgagcaaggcaagtcacataatccttgaacatattgaatcccagtttataaaattattttgatttaaattattgcactatcgctttatttaaattcccgcgttatcactgttttatctagccatgcctatttacctttgttatgaccttattattgttattgttattatttccttgttcaccctagaataaacaaaaccccaactagtggacactctactcatggtaccactagtatgattttaggtagatgcttcgctggttaattaggcaacattaggtggttttacaactctagactttgggaatactcttatcacctggacactatggaatggttggattattgtggaattggattcacacctccccctctattcaaaaccctcaaaatggttttaggctgggctcggggtgcatggttttgacagtagcacctcggccatataaggaccggtctttgggcctctgttgcaaagcactactgtacttccacatgtctagtgggtaaggcttagtttgtggctcagtctggttataaacaaaagtacacggatggagatggacgaagtcgggggtcgatggacatctctagggcaaatgaaggctacacgagctgcggcccggtagtcgagatgtcatggcacagggccggtgtcctgctgctaagggctcagtcctgcctacctgtcccgggggttctggccgtaggtggggttgggtcggtactcttgtctatggctaggatgggttggaaactatgtcacatcttccgtccgtataccgtggtggtatgtggcacgtggctacacgtgaggaagatgtatcttgtgggtaaagatgtacacctctgatcagagtataatctattcgaatagccgcgccctcggttatgggcaagccgagcaatgtacccaagttagtgtttttaattcttaaaacctgcttaacaactaaaatgtggaatggttggcctgggttggcttgggacgagctgggacccagggtcgggttgccagttcggtctgaatcatcgtaggccttgggttaaggcaggttcgtgtgggttcacggccttgattaataatattgtatagttctaggatcgcgtttacaaaatagctttgagcaactaaatgtctttaaatgctgtttactgcaaaccctaaccctttatattataactcccttgtactcccttgcatttattctgcacttgtgggtgtgtcttgttgagtacggtggttgtactcagtcttgctcaatttttctcaagcccagaagaggagttcctggaagatgaaggctttggtgtctagctcgtgcctgccgtcaagcgcctgtggtcgtcgccctagtcttccgctgtttttcgtttgtctttgtgtgtgctgggtcttcgccgcccatgtaataaattaattaattacgcttccgcttgttaaactctgaattgtatcaactttggtctaccttgcctcctgggacaaggaataatgcacccacgtaaggaacgcccattgggttatttccggtcgtggcataattcttaaataaaataaaacatgcaaatgctatgtttagttcaccgattgaaatcgcaagactacaaccaagtttgatcaccgattcacaagatatgcaaagcaaacgcttatttagatgcttagcttcgacttgggcttttgcaaggcccaacgagatggataatcacaacggaacacgaatagatcacgtcgcttacgtcgcatacgccgtggtcgtatgacagtcagacatcgtagtcgtgtgtgtagcattttccaaaaaaatattcactggctataacaatgaaggcgcgccaattttctagtgtgttccgaatcggacgtggtgtttgtgtaaagggaaggagacaaattcgagtctgcccatgcgaacgtgtgggcggcagcaataaaaaggaaactcactgtggagattatgggtacctccacccatacccacatggcatggttatccgactagttatagaggatagtttatatctatgaaatatgtaacatatcatgacttgtatattatggaatggcctaaagtattggttaaggtttctatcttgtaatcttgccccccatcctatataaggtgggcaggaggccctctagggggcatatgagcacacatgatcgtcagatctatactacacccggtggattcaaatcctcaaaaaggagtagggtattacctctcattgagagggactgaacctgtctaaatccttgtctccgcatccatccacttttaggtctcgtgcgctacccccttttattattaccgaattcatgtttcgacagttggcgcgccaggtaggggatgcgctgagttttctgtcgacgagtgtgatggaaccaatcttcaaatcgctgggttggtcgttccaatctattgctgttagattaattttttgcatcagattgatccgttttattgtcttttggcgtgcatatactggtgcctgatgcttttgtcgatccaatgaatgacactatcatctacaatcttcacgcacgattctgcgcctgtgtgatctcgcgtcggcctcgtgcatgtgtagatgcatcttgtgttcatgcatgcctgggattgatcagcagagaagcgggcatgcgtgcattgctatatgcatctaatcttcatgctacgtgctaattagattgattttggattatagattattaatcctaattttgctggttatttttgcctgcatgtctacgctggttgacgaggactgatgatcatgatcactgtcgcatcaccttgccgatcgcaggaaccgctgcgagccgctgtacgtcaagaagccgtccacgcagaggacgcgcgagaccaccggccgacagccgccgcacacgacctcgcgcgatttcgcgtggtctggcatgatcaggccgtccgtcttggttgcatgcaatgcaaggcattcagctaacgattggtctacatgcatgacatgaccagtgataatctgggagcaagcaaacactccaagcattctttgactttgcatctacgtatatacatatgtatttaattcattgatgctgctgaaattgtttccccttttttgtttgcacatatactcggggaacggcgccgcatgcccgggggttcatcctttgcgtggctgacgcggcccgactacacccgtggcgcatgagtccggggcatcccgccgcatgctcggggggtctcaccaaccggccgcctcgctgccgccgactggtgtctccacctgcacggctggcctattatgctgccgttgttgggcgtctacgccttcaccgaccggccgcctcgtccgccgccgactggtgttctcgcctacacggtttgatggtcacaccactgttgttgggcatctacatcttcaccgctggcctgtctccgtcgctgccgactggtgtcctcgcctatatggttggttggacacaccaccattcatgggcgttcacgtcttcaccaaccggcttgccttcaccgccgccgactagtgtctccgcctatacggctgcctccgttgctgccgactggtgtctccgcctgcacggttggtcggtcacaccatcgaagttgggcatctacactttcaccgccggccgctgtcatcactgccgtttggtttcttcgcctccatggttggtgttctccgccgccattgctgttggcgaccatgtcttcactaccggctatagtcatcgctgccgactggtgttttcgtcaccattgatggacgattttgtttccacatcggtcacctttatcgtcaccgaggaaaatatcaaaaagctaagtcatcactaattttctttttttatatgatattttccttttcctctgcctcactacgtcaactggttcgccgttgcctagtgagtcggggggctacagatgttatatcatattttttcaacaaatttcataatatttatcttgattgctcgcgacataatctgagtacaaaagtgcctatcgagttatggagttccatcttcctatgctttccgtttggtttgctaatggatagttgcctttgggccgattcctagcacccgggtgctcgttggatggaccgaataatacaaggtgctaagtattattcggataaatcaaaagcatagagataagataatttattttatgctcttaataattgcaaaagtaccagagtagtaaactccgatctgtgaaactttgttccattaatgacgaactcatgtcacttgtatgcatgtttgggaagtgcctatgctgactcccggtgcgcgggggctatgattagtcaggtagagtgtttaaacgtaaggagtcatctgctcggggaaatcaaaattgacaagaggagaatacatatttataaacattttaaaatacttgaattttccttgagtattatatttacatcaggtactactcatcctatatgtttgttctgcaagattcagatccggatatgcataatagggattcatggctttaagcttatctcctacgcttcaggaatagatcagtcagaacaccatcaccggctcaccgtcgtcgccgccgactggtgtcttcgcctatacggttggatggtcacatcaccgttgttgggcgtctatgtcttcacagccgacttgccttcgccgccgccaactggtgctctcgcctatacggatggatggtcacaccaccgttgttgggcgtctacgctttcaccgccggcttgccttcaccgccaccgactggtgtctccgcctgcacggttggcctattatgccgccgttgttgggcctctacgtcttcaccgccggctgccttcgccgttgccgactggtatctccgcctgcatggctggcctattatgccgccgttggtgggtgtctacgtcttgacagccggctaccttcgccaccgccgactggtatctccgcctgcatggctggcctattatgctgctgttgatgggcgtctacgacttcaccaccggcctgcctccgtcgccgccgactggtgtcctcgcctatacggttggttggtcacaccactgttcatgggcattcacgtcttcaccgaccggcttgccttcaccgccgccgactggtgtctccgcctacacggctggcctattatgccgccgtttttgggcatccacgtcttcaccgatcggccgccacgtctgtcgccgactggtgtctccgcctgcacggctggcctattataccgctgttgttgggcgtctacgtcttcaccgaccggccacctcgtatgacgccaattgatgatatagtcttcatggctggccacgtcgccgtcaccgctaataggcgtcatcatcttcaactcaagctatctacgtttgttgccgactggtttcttcacttccatggccgcatgattctactagtgttgattggccttatcgtcttcatcgccggtcgtctcgtctggtgctgactagtgccctcaccactacggctattttatactgcaaccactactgatggatgtcatcatcttcattgctggccgccttgtttgacaccaactggttttttctggagctgaccggagtatctatcttcacaactacatgtctttgccaccggttcgtttctgtcgccgccgactcgtgttcacttcatcacggctatgcaactttgtcaccatggtggagctacttcatcttcattgtcttcggcaccgacaaactttattgctgctacttcgcaagttttgctactttaccagccatgacgtctacaggagcttcgacatctcagaatatgatgccgtaatattttactacaacaagtggtgttccaatattcaagatttatacctggacatcctcaatacatatattcactcaagtgatggctactcgacgatgagaagctacagttctcgactctatgatcaattgctttccaattaaccaaagagtcgggggctacacaaatacaagactcaaaatttgacaagttttttttttgtcaagatgaagcaatcaatcaatcaacgagtcaactttgggagttattatctccgtctgcgcttcagagccggcattttacttcagcgactccaattattacatcggcaggtcaagattaaatttacatgtctgggagtttggagtcatcaaccaatcaactcagatcagattcaatgagttgaacaacagcatatactttcctctaagtgaaccatctgcaagagctatagcaccaagttctactgccatcttcataaatcaagaggcgttgcatcaatcttcgtcgcacacatgccaacattaagaaaatacttgagcatggatttcttctcaacagtttgatggattgttgttactgacatcatcacctgcacatctacttcaacggccctgatgtctccgccattgctaagggatgactacgtcctcaccgtcggttgcttttgtcatcaccgactttcatcactgacttgttatttcgtcttcacgattggcctactacgcaactgccaatagaggatctcatcgttatcatcggctgctacaccgctattgactggatcaccaacatcatcatcttcatcaacatcctgtcaaacctcttcaacatagcccactctactgctattgatgggcaacttcgtcaacatatttgatcatatctattgctgccaatcgtcattaccatcggttgcatttgtcgtcgtcgactatttcatgcattttcatgattggaggatttcgctatcgttgttgatctgtctcgtctgtctccgactgattatttcgtcaccatggctacaaaactctgtcgctattgctgggtgccttcatcttcactgctagttgatctgactgttgccaactgatttctttgcttccatgccgattgcatcaactatcaccgatggacaatttgaactactccaaaaggataagctatatgcttaggggcttatgagctcaagcacaaggatcataccttcaagttggattttgttctagatacaggcaacatgcactcgtagtcctgaaattattttctatgctcgaagactggaccaatcattattccccgtaagggctatcaaccgaatacttgcgccagtcgggattcaatttttatatctatttttgagtatcccataagggataatcactcagatcagaagctattcatatgagctacacttggtctatatcacccggaagatttattactcgggagcatgttacatgcgtcatcctttaaagggtgtcgaaggcctaggcctaatatgtctgcagcccatatgttcaggtgtggcctatcacgttcttttaaggacttagacactttttgattaggccaaagtgcgcgtgatcaagtgcccaataccttaaaatcattttataccgcagttactcaactttttaggagttggtacaatgcattttaaaaggtgcccaacagtgaagtttttcatagctgtcccgctgacttttttatatagtcaaggcgctgtttgggtttatcaagcaattgattggatacaatatcgttactttttgccacgtaagtgtgcatttttattgaccaatattatggcttaggctgattatatattttggtcattttctaggcggttggtaaatcctttatgagtttatttactcggattttataccacatatgccatatattttcaggtgtggtgaaaccatgtgtcttttagggactcaagcacatttgttaaatcagtgtgtgcatggtgtatgcccaatactttggaaatttctttattcacaacattcaagcttctttttagctattttgctatgtgaattttcaatgatgtagtcaactttaggttgcaagcatcatattttacaaaacaatcggtatatcactcggatcatattattcagggattcacaccacatatgctatgtattgatatcaagtcacttgg

SEQ ID NO: 29466 - DNA, 1959 bp, Oryza sativa
tacccacatggcatcgttatccaacctagttataggggatagcttatatctatgaaatatgtaccagattatgacttgagtattacgttcccttgtatattatggaacggcctaaagtcctggtttgataatattgtaaagtagatttaggaaatcgataccgtattggttaaggtttctatcttgtaatcttgccccgcatcctatataaggtaggcaggaggccctctagggggcatatgagcacacatgatcgtcagatctatactacacccgccagattcaaatccccaaacaggagtagggtattacctctcattgtgagggcctgaatctgtctaaatccttgtctctgcatccatccacttttaggtctcgtgcgctacccccttttattattgccgaattcatgtttcgacactcatgcagctcaagtcgttcttgtttttgggaaagctcgattcgatatctccgcggggcgcgccgatgtgtttgattcgaaacgccgccgagtagtttcgtgagatagatctgctggcggccatggcagctgatcctccatgtaaggaggtggagcaggcggtgacgccatgggaggtgtccgctccggggggagggcggcaccatcgactacgaaaaaatggtggaccgcttcggctgcaaccgcctcgacgccgcgctcatcgactgcatcgctcacctcacctcccgcctgccgcatcgcttcctccgccgcgggatcttcttcgctcaccggtgttcttctgcagctaaattggaggagttggcgactgaattgcagatggtttttgtttgttggatagggatttgaggaggatactggacctgtacgaggcgggggagaaattttacctctacacagggagggtgttagtgatatgccctagaggcaatcatagagataattgtatcacacactctgtttacatacttatccgactttgttccttgaaatagataaactcattattggttaatgaatatgtgattctttcatgagactctttatgttgtgtgttgctatttctaaaggatccctgatcaaatatcatatgtggaacaaatatgtttagatgatcagcacatgtattaattgatgatcatgtctcatggatcatggtatagagataccaaattaataatgtggacacatgttagtgaacatgttgttggatagatccaacatgagacactgcaagagccatatgtgttgtgtcatcaatgatctcatttagtgttggtgttgaatccttagacttgagattatcatggttcccaacatgtgaagcagcttacttagggactgctaaacgctacgccgtaattgggtagttataaaagtactttttgggtatgctatgaaacatgtagtgggatatgaataatcaagatgggatttgcccctcctatggagagatatctctgggcccgtcgatgttgtagattatggaagtgcatggccatgtcaaaggtgattgaggagtcaatcacaagttatataatctgtcaacaggtcgagtgaatgattgagctattagaggatggcacatatctagccttgagcttaatcgatatcgtgagtcaaatggttcatacaagtatacactacaggttcagccgatttgatctttatgtatgcctggtgggtcaatacgttctgctaggggccgctgttgacacgtggaccgaaaaggagttttcgggttacagctgaatatacatgaacctacagggtcgcacgcttaatgggctggaataaggggattggatggagatccaatatgagcttaattcggataggcatccgaataggagtcctacgggccttggaggctcgagtgatggatcctatatattcgtgaagggtgtgactggcggaggcattgcatcacgtgagaaaccctagccgtcactgtcacgtcctgataaattcatccc

SEQ ID NO: 29467 - DNA, 10782 bp, Oryza sativa
agccccagagggcggcaaggggctaaatgcaatttttgcagacggcggcagacagcgtcgtcgagccttcatttgccacgttagcttgccgcccaccactagggcggcagggtctatttttgtaattttttgcgccgatagattatttctgtaaatattaaaagaaaaaaatttaaaaatgaaaaaaaaatcgcctccctcctctccttcgagcccctctgcacgcgcggcgcatgtgcacgccttgcgcctgaccggtgggtcgacccacccggtcgtcttcaacctccagccggccgctcctctctgtccctctcccgaacggaaaaaaattctatgcggcagcgtcgcaccaagcttctcgtgcggcactgcgtgaactggcgacgcgtgtccaactgcctcccgcgtgaggcgcgtctatcgcgatttttagtggagccgagccgacgcctatcactatggtggagccgagccgagccgtcgctctcatctgctatggcgacagcggcggcggctgctgctgctgcttctgaaacggcggcggcgcgcttgagtccccctacagcgggcgacggcgcatcggcgcaaggccacgaggcgcgagcggcatggccttgctttcctttcaataattcatttagctgcacttggcctgaataatttcatttttttataaggtctcttttgatgcaaacgttgatgataatatgcatagagatttttcgaacatggctgctcctcctatccatggagactatacaagtcttttgtttcgacttgatcaagatgccttgacttttctgctgctgctccctgcagacctgcttgctcctgcggtgctgctgctgctcggctgctcctgctctcgcgcagcgcggtcccgcgcgcgccgccgccagcctgctgcattgctactcctgctcacgtgctcccgcggctccacgctgccgccggcctgctgctcgcggttcgcgcggccgctctgatgctcggctgcccgcctgcctgtcggagtgtcggttgccgccatgcagccatgccgctcacgcctcgcggccttgcactgacgcgccgtcgcccgctgtaggggggactcaagtgtgccaccgccgtttcagaaacaacagcagttgccgccgtcgtcgctatagcagatgagagcgacggttcgacttcaaggtgtgggcctgcggcttggactcgttgtgataggcgtcggctcggctccaccaaaaatcacgatagacgtggctcgcacgggaggcagctggacacgcgtcgccaattcgcgcagtgccgcacgagaagtttggtgcggcgctaccgcatagaattgttttccctcccgaaccctagcgctgccatccttcgatcccgctccactgcgcaagttccggccaaataaattgcaaaaacggaatccccatcccttcctcattatttcccccaacttttcccctttaatcccgcccccaatcaccaggatttaatccctcttctttgaccgccattgatgccgccggccacgctctccggcatcgttcccgtcccctccagtggtcggcactcccctccattgcctataaaacggagccctagtccacctctccttctgttttcccccttcccgacctccctagccacaccgtcgccgacctcctctctctcctacgccgccggccaaatccagctacccctgccgccgcgtcagcacgccggccagccgtgccgtcgcctcccccggcatcgtagtcgcctccccttccccggcctgctctccgtttcccgcgaacacctccggaagtgcatccccgccggcaacagtggcgttgccgccactgttccgcctccggccgcctctgccgcgtctcctgtgcgctggccgacgtcgccaccacctctcccggaaccagaacgccgtcatcttccccgtccaggcgtcgcccgtatttcgccggaacaccgccgtgccgcgccggcctctccatccgccttgccggaatttccccggtcggcccttcctcctcccatgcgctgtcggccacgccaccaccaccttcagcatcgcagcggcgaaccggcgacgtcgtcctcggcatcgcctcccctccatccgaaccccaccgccggtgtccgtcatcgtcttcactgttcatcctcgccggcttgtcgtcccgcggtgctgcctccatcgtcgtcatcacagcggtgtgttccgcgccgtcctcgcatccgtgcagctgctgccggctgccctcgtcgcctcctcgccggttctggttgtcgtcctcccgtcgttctcgatcgtcgtggcgttcgtccctccgtcaagccgcgttcgttcgtcgcccgcgtttcgtcaagtctgctgcagcctcgtcgttgtcttcgtcctcggctccacatcgtcaagccctgagttggcctcgtcctgccttcgtccaaggatcgccggagaagtgtcgtccgttcgtctccgtcgttcctgtccatctctgccgcgccgtttgtcgtcgtcgttcccacgcctcgtcgcgtggtagtaaggatccgtcctctcactgccccgtcctcgtcctttcgttgtctccccatgcccattgtgtgtttgtcgaccccggtacccatgtaccggtgtcggtagtcattcgtgggtgcgtgtggtgaccgtgtttgtgtgtccactcggtagccacgtggtttgcacgtgtgcagcccgcgtggtgtctagtggagtccgtttgtctgccactcgcctcggttggcacacggcgtctgcttccatcgtcccgtggatcgtctctgtgtacttggtctaccgtcgtccattaggttgacatgtggggtccgcatgtcagcagcgcagccttcctgtcttttccaggctagcgcttgcacatgttttataattgcaaaacctaatcataataatccgtaaatctccatataacagcattaaacttcgtatgatcatatctttatcatacgaatcccgaatcgacccgttcaagtctcctaatgtttgttataacctaaagaaccgtgtgctttcttcttatgtattgttattacttctttataggttgtagctttgcttgtttgcttcgtgtagcttctgtcattccggaggtttcggaagcgtgattcgcggtcgtcaccgaaggttcggaaggctgttctctctgagcaaggcaagtctcatcatccttgagcatattgaatcccagtttttaaaattattttaatttaaattattgcattaccattttatttaaattcccgcgttatcactgttttatttagcacttcctattatcacctcgttcaccctaggaaaacaaaaccccaactagtgggtactctattcatggttccactagtatgaacttacgtagatgcttcgctgattaattaggcaacattaggtggttttataactttagactttgggagttctcatgtcatttggacattatggaatggttggcttgtgatggaactgatacacacacctcccctgtcacgcccggaaattcactagtaatttccgaacttatttgtgcataaaaccctcgtccaggaatcagccgaggtacacaaactgacaatttaatatacaaatccatcataataataactttacataattacaaaagaaaagaaaacagcagcggaattacggtctagcgaagctccagctccactcccacaggcagctcaactggggtataaaccatacgtcttctcctttgcaacttgtcttcaactgaggtttgattgattattgcaaggtgagcatatgacatactcagcaagccacacaacaaatatgcaagtgcacaaggataccaaaaggatggcataatatagggctcatttgcaaaagcagcatttagcaaacatttgagagttgtaaaacagtagagtaattaatcatcaatattaatcaacactgaacagcacacccatgctgctcaggcccaaccatcctgaacaaccatacccggctgcacagatctatctccaaaccaggaatgtaccattccaaaccaggagctaaattaattaccatcaattaccacattattattaatgagtagtgtgggactaatcaagaaagacattgttcgacccgcccataaccacgggcacggctattcgaatagttttactctggccagaggtgtaccactgtacccacaagacacaactccacaatatgtcaccatatcatcatgtgcccatgctgaacatgtcaccattagtgtagttgtgacaagacccctcgcataactcaaccaaaagcagtgcaccgttcctggatcgtagtcaccccctcaaaaaccagaggcatggactccccagcgacccttgtgggcttatctccgccacttctcagtctggtgctccgtaatgagccttgttatacaaagtgtccagccgttgcccattctggcttgtggttggcacgggtaatgtttcacaaccgaaactcgtgaaccggtccttaattgtcataagtacgaccatcaaaaccatgtgctcacaacccaccattatcaagttttagttggcacattaattaaccaatcacgattgaccaacgattgaccatcgtgagctatcattaaatatccatcattaagtaatagtgaaacattagttatcccaattgtgtgctaatgtttaacatctagctgaaccaatatataaagctcaactagtcaaattataataacccaaggtatgaaggaatagagtaattaatgcaaattggccatacaaaggaataattcacaccacacggtgacattcgaaaataaatgcacagttgaaataaatagagaatttaattataggatcaacatgctcaaaggaattgtgtttgggatctgtgtgacttgtcttgcaataacatgtcttcaattaatcttcttgaacacttctggcgcactcgcgaaccttcgaaacgacggaaacgacaagctaacacgcaaaacaaagaaaaagactaataaaaaccaaataaacaatacatataaagtaagcaaacatgtaggtcataattttagatgaattatgagacttgaacggcctcattctgacttcatatgaattaattatgaattttacaagatttaatctaattaaagcctatttaaaaaggattaaataaaattaattcaatttatggataatttaatatgtagatgtttattttatacaacttttgcaacttgaaccacattaaaccaagttacaatgattatgaatttataaagattaaactggattaaagcatttatatggattttaattgaattatgacgcaataaagaattatttttgaaaggaaaaagggatttattgcgtcatcaaaggcggtccacggtaaaccgggttcaaagagacggtctacgaaaccaacggccgagatctaatctaagccgaacggacggccgagatcgatccggtccaccacgggctatggatgacgtcagcaatgacatcagcgatgatgtcatcgccggcggcggctcgagaccacgggctcgacggcgaacggcagcgaggcggcgcaaacggaggacaccaacgggtagagctcgactcggcgaactcaccagcggcttggatgatggcaaacgacgacggatgacgacgttggcgaggttgaagcggcggcggtcttcgggtcggcggtgacggcggcgctccgaagggaaatggcagcaacggaggggtggacgaggtgctgctcctcctcgcgatcctgatggtagcaacggcgaccgaaggcggcggctgcaatagcagtgcggcgcggctgcaacagcggccggaggttgaagacgactgacaggtggaccccacctgtccgtggctgagagagaggagggagggcgcggcggattgggccagctgagccggacgcaagcaggccgaggagagggagggagaaacttgggccgactttcggcccaaagccaaaaggggacttttaaaacctttttcaatttaaattattcatgaaatgatattccattgattaaaaatacttccttggctcaaatagatcccagaaaaatctaggaactatagaaacaagagaagtatttaacaaaattttatctagcccacttttatgttgagatttaacaaattaaaattagatcttctcttttaggcttttaagatcatttctaataattccttttaaacaacaatttataatttaaggatttttaaacaagaaaagcacttaacataattataattagatcattaattgattaactaattactgaattgttctttgtattattaaaattagaaattgagctccgaaaaatccgagaaaattccagagagtataattaaccttggagaatttaataaaaattaaatccatccatgctttatatttaggaaattttatttcccacatttaacttcacttgtaaattaatgaacatttaatataaattctattaataatttattaaataaattataaatcctaaaccaaaaaatcaggctgtgacatccccctctattcaaaactcccaaaatggtttgaggctgggctcgaggtgcatggttctgctagtagcacctcggccactgtaaggaccggtcttcgggcctctgttgcaaagcactaccgtactaaccacatgtctaatgggtaaggcttaactcggtgctcagtctagtcctggcaagagtacacggatggagatggacgaagtcagggctcgatcctgcctacctgtctcgggggttccggccataggcggggttgggtcggtgcttttgtcacggctaggatgggtaaaagggttatgccacatcctttatgatgggttccacggccgtggaatgcggagtaaagatgtgtcttgtgggtaaagatgtacacctctgatcagagtataatctattcgaatagccgcaccctcggatatgggcaagcctagcaatgtacccacgttagtggtttaattcttaaaacttgcttaacaactaaaatatggaatggttggcctgggttggcttgggacgagctgggacctgggtctggttgccagttcggtctgaatcatcgtaggccttgggttaaggcatgttcgcgtgggttcacggccttgattaataatattgtgtagctctaggatcgtgtttacaaaatagctttgggcaactatgtgacttttaaatgctgtttactgcagaacctaacccctattattatccccttgtacccccttgcattagtcatgcatctcccggtgtggcttgctgagtactatggttgtactcattcttactctatctttcccctcttcagtaagagaagctttggagaagaagtcctgggtggagtcctggcttataccccagttgagcgcctgtgaagatggagccgtaggcccgctagtccgctgctgcttatttttgtttgtcaggcctgaagtgcctttgtaataatgtaaatattatcgatataataaagatgtgccttttgtatcctgtttgtgtggtgtaccccggcttttcctgggatggggattaatacacttgtgttttggaaaaggtatttttccgggcacgacaagctaatatcagagacatctcgactgtaggataagccaagtggataaaacctaaggacatattttataaacaagactatttgcaaaagttcctttttcctcctttccctaatgctatttgcaaaatgtttactctcttcttcctccttcggattttcaactagtactagatggtcagctttgcgaagaagaagatgtcgctagtggtctgccgaagttctagaaggctgcaggatccactagcgaagcaaaggaagcagtgaagccagatgtgaagcaggagtgaagatcttggagaacccgtcgcagaacctataccaccctttagggttttgttagtcgtgtgtttccttgattgtgtgtgtagcacatggtttgcatcagtggggtgtgatgtaaccatgctaggttgtttgcgtaatcaacctgcagaataagcctaacatatatcataacagaaaaagattagatctgttaaggtcctatccttagtttctgatctctttctttcctccaattttctctttccccctctctaaaccttgtaacagatggctgacaatgagaaaggaagtaaggtcagaaatcagaacaagggtgccccaagctcccgagtgaatgaagcaccagacaccagttgtgtgacagtggtctaacacctgattaactagaacgaattgcttatagagctaccacagcagcatcagatgccaattctagacccgagtcagatgcaacctcaagtgcagttggaggcagtccaatcactcacaccacaagttagcgcaccgccagcatcccaacaagcccatcgtgccatgccacatgtggactcaaaagaagcaagaatcatttgttttatctatgttgaacaagggcactatgcaaggaactgtccttagcagaaaaaaaaagcaccaatgcgaaccgaagatgaggtccgtaagatgaccattaccggcacagaatggcctccaccaggaatgacaaaacgtcaaagaagaaatttcttccgaggtgcaccatagttgacggaacatcttttagctaatggaggtagagtgtctgatagcgaagattcagatcaagtctcctcacgggttgaagatgagaagtctctccaaggtttcaaccagaataaaaaggaacatatggcatgctctcgttgtggagaaatcggtcactttgccagctcatgtgtcaccacttgcgttcattgtgaggaagaccatccacccgacgagtgtccaacaagcaggattacttatttcttgtgcgaatgagctgatcatgtacgaaaagattgtcaattcagttttctgctgatgaagaagatggccaaccaacccgccagttacaacagacagaagcatcaaggcaacccaaatcctcgacaagactacagtttcagcctaactccaatgccaggacagaggaatcaaaatgggaaaagaaaatgccgagtctggaaagatatctgttgtttcaattgtcaagaagtgggtcatttcgccgacaagtgctcgaaaccgagaaacatatttaccaacacgtcagtccatgcaactccgcgcaatcagaagcttgctcctcagcaaattgtcatccatgcatcctgaagcagtcctatagcccaagttgcaatagctcccactccaatgagtgcactaccacaaggtgtcaatgctcaatttcagccccagccaccagttgacaagacagaggccagtatcagtgttgtacctttggatgttccaggacaacagccaagaaatcaagtacaagatgaagaacctgagagtaagaaagttattgtttgttacaactgcaaagaaccagggcattactccagggactgtccctaaccaaggaaaaaaatcggcctccacattttcgccaatttacaagaaacagacatgccaatcgccaagtggtcactggagaaaatgcagtacctgtcaagcctagtgctagtcagaagcaaccataacactcttgtatcgatgttcaagtacttttgttttatagttgttctctaccaaccgtgtaataaggaagaaacgggaaataatcaatgagtttggcaaatgtatgaaggatccatattgagactgcaagtgttgtgagttgtgtacattttgttgatgattaaggagacctagggtcttatttccgtaagctcataatctgttatgaatcaaataacctagcgattgatggcgaagaaaatcaagtgatcaaccaaagagacatttgtttggactaagagtttccgatgtgtcctttttcggatcaaaggcaacgacagtcagtatagcttttgacgaactacttcaaggtttctctgaaaggcagcaggcccaaggactgcattgccccagaagcacccacaacacccggagtgaagagtacctggttgagaaaggtcaaaaggtgattgatggaagagatcggaaaagatgtttggttgctaggaaaatgtcacgtcccaaaacgactctaaaatatatcctttaaattatgcctagaataattaaaatccgtgtgaaagcctctaacaattaaaatgtgcaaagttaaaagtcaaataaggcttagaagatttttgtatatttcctaaaagcctaaaatgtgtaaataaattttagtggaattttcatagcacaaataataattgttaagaaataaacaaagttgaaaaagttttataaaaagaaaaacccttaaagtcccccttccctcccttgggccggcccggcccatctctccttccccccctctctctctcctctccccgcggcccactcggcctctccccgcgcgcgcgccgctgacgggccggcccgcccaccaccctcgctgacgggtagggcccacccgtcatccccgacctcccgccgctcccgccgttccgcccgcgccctagcgccggcgtcggcgcgaatcccgccgccttccgtcgtccccacgtgcaataaagtgggaggaatcactcaacgtgatcccctctccctttccccccattttttccctctctctcttgcgttcaaacgggcggatttgcccccgcaaatctcgccggcgccattgatgggggccgacctcccgcgccggtttctttcttcccagtcgtttcttccccttccaaacctatttaaaccct

SEQ ID NO: 29468 - DNA, 6513 bp, Oryza sativa
ataacttggccatttcaactcggaattggaccgttcaagtctctaatttttccttaagaagtcaagaacccatttttgtgctttgttcctgcttgttatatggagtttattagagtaaaagccttttcttttccgttggtcgtggagacgctgcagcttcggaagatccgctcttcgtggaggttaaagccgacgtttgggaaagcgagcaaggcaagtcacatcatccttgaacatattggatcccattttacaaaattcttttgatttaaattattgcattatcgctttacttaaattcccgcgttatcactgttttatttagccatgcctatttacctttgttatgaccttattattattgtcattgatattattaccttgttcaccctagattaaacaaaaccccaactagtggacactctactcatggtaccactagtatgaatttaggtagatgcttcactgattaattaggcaacattagggggttttataactctagactttgggatattcatatcacctggacactatggaatggttggattattgtggaattggattcacacctccccctctattcaaaatcctcaaaatggttttcggacgggctcggggtgcattgttttgatagtagcacctcggccatataaggaccggtcttcgggcctctgttgcaaagcactactgtacttccacatgtctcgtaggtaaggcttagtttgtggctcagtctggttataaacaaaagtacacggatggagatggacgaagtcgggggtcgatggacatctctagggcaaatgaaggctacacgagctgcggcttggtagtcgagatgtcatggcacagggctggtgtcctgctgctaggggctcagtcctgcctacctgtcccgggggttccggccgtaggtggggttgggtcggtactcttgtttatggctaggatgggttggaaactatgtcacgtcttccgtccgtataccgtggtggtatgtggcacgtggttacacgtgaggaagatgtgtcttgtgggtaaagatgtacacctctgatcagagtataatctattcgaatagccgcgccctcggttatgggcaagccgagcaatgtacccaagttagtgttttaattcttaaaacctgcttaacaactaaaatgtggaatggttggcctgggttggcttgggacgagctgggacccagggtcgggttgccagttcggtctgaatcatcgtaggccttgggttaaggcaggttcgtgtgggttcacggccttggttaataatattgtatagctctaggaccatgttcacaaaatagctttgagcaactaagtgtcttttaatgctgtttactgcaaaccctaacccttatattataacccccttgtactcccttgcatttattctgcacttgtgggtgtgtcttgttgagtacggtggttgtactcagtcttgctcaatttttcccaaacccagaagaggagttcctggaagatgaaggctttggtgtctagctcgtgcctgccgtcaagcgcctgtggtcgtcgccctagtcttccgctgtttcccgtttgtctttgtgtgtgctgggccttcgccgcccatgtaataaattaattatttacgcttccgcttggtaaactctgaaatgtatcaacttttggtgtaccttgcctcctgggacaaggaataatacacgcacgtaaggaacgcccgttgggttatttctggtcgtgacagaaaagaattaggtcgaaaggtgattgataaaggataacgaggaacatgatttgtgtcactcgaggaagactcccgatagcaattaaccctacaactgtcaccatgtcatttaagcagaagaattcgcgagtaagcaagatgaccataggtagaagtgattctatgaggacaaggatggaaacttttgtgacatgaccaagaagtcaagaagttaacctgaacagctagaaactaaagctcggttcaaccttgggctgtgtatcagatgctaccagagtaaaagcaattgcactagtatcgttcaacgcactttcctagcgattgatccatctggaaagaacacatcaaggatgaaggtgtaaaggaatatgttgaatgctaaatgacgacaatatgaagagaatagtggaaagtaaaccgattgtaaagaaagtgaatccgagatgtctgttcgtgggagctattcccagttatgaaccaagtgatatgttcaaggataatctacagaggtcagattaaaatcacatccaataaagaagcttcagatttggcaggataacgatcagacaataacaagtctagcagtaaagttatttgggaagacgtcaaagcatgtcaagtgggataagttggttctcgtgggaagcataattcaaagttagagtgatcgaccctcgcattgaatagcgttagtatctagcacccggagactaggaaagctaatatgaggcagttagtggcaagttgtcaatcatggtatccttggtaagcgggatatcatagtctaaagcatttggtggtaagttggaaggaaacgccaagcatggtattctcatgatgacaagctggtaatgacaagcatggtatcccagtaatgacaagttggtatcgacgcataacgtgaagttggtaacttgtatgagattgacaccaagggtatgaattatgagaagtcccggaactgaagccccgtcttcaagtgccgcatcccagtcgaagtcagctcaaggtgcaaccagggacaagccaggtgaaacgaagattccatctgcaacaggagatcaagccaagcagttcagagtggggaagttttgctgggcaagtttgttaaagaaaacgcaatggaagaagtcggaccagaagagaagaccgcccaacctatcttcttgctagccttctcgaatctcgggggcgagattcctgtaagggggtggatttgtcacgtcctgataaattcatcccgaaataaaaatcattttctaaaaggaataatataattaattaaaattcgaatagaaattggcaaacattaaaatgcgtacaagaaaaattcgaatgtggcccggagaatttttgttaaattccccttggtctaaaatgatccctcaaattttacttgaatttccagagcaccggatataattattacgcaacaacaacaattaagaaagtttattaaaaaggaaactaaaaataatcctccttttcctttgggccaagtccagcccaaagttcctttcctctctccctcggcccgcggccgaagtatcacttccctccctctctttttcctcccctctctctccctggcctcccctcctcctcccgggccacctcttccctcctcttccgcttgggccgcccctgccctatcccggcctagccgaccagccgcctccctcctttccctcgcgcccctctgcacgcgcggcgcatgtgcgcgcctcacgcctgaccggtgggtccacccaccctgtcgtcttcaacctccagccggccgctcctctctatcactctcccgaaccctagcgccaccatccttcgatcccgctccactgcgcaagttccggccaaataaattgcaaaaacggaatccccatcccttcctcattatttcccccaactttccccctttaatcccgcccccaatcaccgggatttaatccctcttctttgaccgccattgatgccgccggccacgttctccggcgtcgttcctgtcccctcctgtggtcggcactcccctccattgcctaaaaaacggagccctagtccccctctccttcggttttcccccttcccgagctccctagccacaccgtcgctgacctcctctctctcctacgctgccggccaactccagccgccctgccgccgcgtcagcacgccggccggccgtgccgtcgcctcccccggtgtcgcagtcgcctccccttccccggcatgctctccgtttcccgcggagacctccagaagtgcatccccgccggcaacaatggcgttgccgccactgttccgccttcggccgcctctgtcgcgtctcttgtgcgccggccgacgtcgccaccacctctcccagcaccgaaacgccgtcctcttccccgtccaggccatggcgtcgcccgtatttcaccggaacaccgtcgtgccgcgccggcctctccatccgcctcgccggaatttccctggtctgcccttcctcctcctgtgtgttgtcggccacgccaccaccacctccggcatcgcagcggcgagccggcaacgtcatcctcggcatcgcctcccctccatccgaaccccaccgctggtgtccgtcatcgtcttcaccgttcatcctcgccggctcgtcgtcccgcggtgccgcctccatcgtcatcatcgcagcggcgtgttccgcaccgtcctcgcattcgtgcagctgctgccgactgccctcatcgcctcctcgccggttccggttgtcgtcctcccgtcgttctcggtcgtcgtggcgttcgtccctctgtcaagccgcgttcgttcgtcgcccgtgtttcgtcaagtctgttgcagcctcgtcgttgtcttcgtcctcggctccgcatcgtcaagccctgagtcagcctcgtcctgccttcgtccaaggatcgccgctgaagtgtcgtccgttcgtctccgtcgttctcgtccgtctccaccgcgccgttcgtcgtcgccgttcccacgcctcgtcgcgtggtggtaaggatccgtcctctcactgccccgtcctcgtcctttcggagtcgccccatgcccgttgtgtgtttgtcgaccccggtacccgtgtaccagtgtcggtagtcgttcgtgggtgcgtgtggtgaccgtgtttgtgtgtccgctcggtagctgtcacgcccagaaattcacaagtaatttctgaactaatttgtgcattaaaaaccctcatccaggaattagccgagatacagaaactgacaatttaatatacagattcatcaaaataactaaagcgataaatacttacataagaggcacttagtcctcaccatgaagaaaattgcagcggaaaataaaatctagagaagcttcagctcccacaggcagctcaactgggatataagccaaaggtcttctccttctggatcatttttcttcaactgaagtttgatgattattgcaaggtgagtacatgcaatactccgcaagccacacaggaattatgcaagtgcacaaggataccaaaggatggcataatatagggtttatttgtgaaagcaacatttagcaaagatttaagagtagtaaaatagtagagtaattaatcatcaatattaatcaacactgaacaacacacccatgctgcacaggcccaaccaaacctgaacaaccaaccctggttgtacagatcaaacctccaaaccaggaattatccattccaaactgggagtcaaattaattatcacattgttatcattaatgagtagtgtggaactaatcacgaaaaatattgttagacccgcccataaccgtgggcatggctattcgaatagttttactctggccagaggtgtaccactatacccacaagacacgattccacacatgttgccatgccccgaagtaccaccacggcactgcaaagggggaaatcgtgacaatacccttcgcacaacacaactcaccacagtgcaccattcctggatcataatcaccccctcaaaaacaagaggcatggactccccagtgacccccacagacttctcgccgcttctcagtctggcaccctgtaatgaaccatgctatacaaaagataaagtcgttgcccacgttggcttgtggttagcacggttaatgtttcacaacagtagctcacgaaccggtccttaattgtcatgagcacgaccttcaaaaccatgtactcacaaccaaccattaatcatattttaattatcaattaattatcataacacgattgaccatcgtgagctaccattaactataaccataagtaatagtgaagcatgatttatcccattaatgagctaatgtttctaagcatgactaagcaactgtcataagcatctagctgaaccaaaccaatatataaggttcaagctaatcaatttattacccataggaaaataaagtcatattcggccataattaattgggaaaggctcactacccgatgacattcgaaaacaatgcataagttaaaataaaacaatagctttaaacaggttcaacatgctcaaagggttgtgtgggatctgtgtgacttgccttgcgaacaagcgtcttcgattcgtcttcaggaacttctccaacgaacgaacgatcctccgaaacaacggaaaactaaatctagaacgcaaaacgagaaaaaacactaataagaccaaatgaacagtacaattaaagttcataaaaaggtagagcttgaatttacatgaattatgagacttgaacgaccttattccgagttcgtatgaattagtt

SEQ ID NO: 29469 - DNA, 7298 bp, Oryza sativa
  unsure (1)..(7298): unsure at all n locations
tggaaaggaataacagccgctgacgtcagcgatgacatcatcgccggcaacacactggaccacaaggttgatggcactaggaagctcggccgggctatccgagaacaccaacgcggagaggacgacgagacgccctcaccgaggtcggcacgaccacggacgacgatgggagatggccggcgacgagattgaggcggcggcgtggctgtgtccacggtgactgtggcgtttcggcgaggggaggcagcaaccgaggggcggacggtcttcacctcgctcctgcgatcccgagggtagcgacggcgagcgaaggcggcgatggacggcgacgagcggcacggctgaaaacgagtcgacggaagattgcctcgggttgacagcgacgacgaagctccgatggtttgcagcggtggcgaaggggtggacaggcttcggcttggcgttgcgatgccgacgacagcctcggggaggtccggctaccacgggagaagcggcaaagcttcgccggagatcaaaacatggcgatggttcggccttcacagtgacggcgaattccggcggggttcggcgcaaaagaacgggtggccggggtagctctcacccttgcgaagccgatggaagtggcggcgcaagtcggcgacgaccagagaagcggaagacggcggctggaattggtggcggcggtggagagagaaggtaagcgtggcggcggctctagggctagggaaaaaaatcgggaaaaaggaggaaacggaagaggaggccgaggggctgctatttatagccaaaggaggaggagatcggctcggatacaggaagaatcggcgacggattagttagggttcgccggaaaaatggagctcgaaaccgcgtcgaattcacgcgatatacaacggtattcaaaggggtttcttagggataaggtagaggagatcgaggggactccgtttttacaaccaattttggaaacttgctctgtccggaggtagaagatggtactgtagcgaggggacgtaaaacagacttcttgccgggcttttttttctcggcttgattagaagagggaccaaaactggacttccgctaaataagagaaagaggaagagagggctgctgcgggctaaggaagagagagaggagaggagtgggctgaattcggcccagactgaggaagagaatttaattaactttttataatttaaataattgctgaaatgatgtttcatttattaaaaatacttccaatgctcaaataaatccaagaaaaatcccgaaaatacttgggcacataaagtatttaatgaaattttatctagctcaagtttaagttcaaatttcttatagattttattcccacacttactttgattattaagtaatttctaaaaattcctttttcacaacgatttataatttagcgattttcagggtgtgacagtacccgcgtggtttccacgtgtgcagcccgcgtggtgtccagtggagtccgtttgtcggctactcggctcggttggcacacggggtctgcttccgtcgacccgtggaccgtctctgtatacttggtctaccgtggtccattaggttgacatgcggggtccgcatgtcaacagcgcagccttcctgtattttccaggctagcgcttgcacatgttttataattgcaaaacctaatcataataatccgtaaatctccatataacagcattaaacttcggatgatcatatcttgatcatacgaaccccgaatcgacccgttcaagtctcctaatgtttgttataacctaaagaaccgtgttctttctttttatgtattattattgcttctttatagggttgtagctttgcttgtgtgtttcgcgtagcttctgtcgttccggaggtttcggaagcgtagttcgtggtcgtcgccgaaggttcggaaggccgttctctctgagcaaggcaagtcacatcatccttgagcatattgaatcccagtttttaaaattattttaatttaaattattgcattaccgttttatttaaattaccgcgttatcactgttttatttagcacttcctactaatccttgttacagccttatcattgcaattgttattatcacctcgttcaccctaggaaaacaaaaccccaactggtgggtactctattcatggttccactagtatgaatttaggtagatgcttcgctgattaattaggcaacattaggtggttttataactttagactttgggagttctcatgtcatttagacattatggaatggttggcttgtgatggaattgaacacacacctcccccactattcaaaactcccaaaatggttttaggttgggctcgaggtgcatggttctgctagcagcaccttggccactataaggaccggtcttcgggcctctattgcaaagcactaccatctaaccacatgtctaatgggtaaggcttaactcggtgctcagtctagtcctggcaagagtacacggatggagatggacaaagtcggggctcaatggacatctctagggcaaatgaaggctacacgggctacggcgtggtagtcgagatgtcatggcacagggccagtgttctgctgctaggggctcaatcctgcctacctgtctcgggggttccggccgtagtcggggttgggtcggtgcttttgtcatggctaggataggtaaaggggttaagtcacatcctttatgacgggttccacggccgtggaatacggagtaaagatgtgtcttgtaggtaaagatgtacacctctgatcagagtataatctattgaatagccgcgccctcggatatgggtaagcctagcaatgtacccaagttggtggtttaatttttaaaacttgcttaacaactaaaatgtggaatggttggcatgggttggcttgggacgagttgggacctgggtctggttgccagttcggtctgaatcatcgtaggccttgggttaaggcaggttcgtgtggattcacggccttgattaataatattgtgtagctataggatcgtgtttacaaaatagctttggacaactaagtgacttttaaatgctgtttactgcaaaacctaacccctattattatccccttgtacccccttacattaatcatgcatctcccgatgtggcttgctgagtactgtggttgtactcattcttgctatatctttcccccccttcagtaatagaagctttggagaagaagtcctaggtggagtcctggcttataccccagttgagcacctgtgaagatggagccgcaggcccgcttgtccgctgctgtttatttttgtttgtcaagcctgaagtgcctttgtaataatgtaaatattatcgatataataaagatgtgccttttgtatcctgtttatgtggtgtaccccggcttttcatgggacggggattaatacactagcgttctggaaaaggtatttttccgggcgcgatagtcacttctctccccgagcaaaaccctagccgtgcgcgggtgctagcacatctgcgcgtggcgttccgtccatgtacgtgtggataccggtagaggcggcgctggtttgcggtgctgattggcttgggagtacggcgaggagaacgcacgaggaggagaaggtcaagctggtgcgattgactacttcctctacatcgacgcgcgctacttcgcaagagttccttcgacttcttagcgtcttcttcaactgcgcagcgcgtcgagtggtaactatctatgatctaatacttgcatggttcctggtttacgtgatagaaaatttaatttatgctatcgtagcctacgcgtatcccaaccgaggggaccctcatcggaggcgctacacctcggccacctcatccccttcatgttcacaaaataagcattgctcccagtcccggatacaagtgaactgaaatcatttgtcaactagtatttattaacaatcaagatatctcttgtcaggtgctccctccatccacaaaagttacacctatttcacatttgagttttttccaaataagttgtttctatttgtagtctttatgcattcaagacttaaatgaagagataaattaaatgttttattagaacccaaggagtcatctaaatactcattggttgcatgtttacattcactctttgatcttgtaacatccaaggtgatttaatttcttcttggtcttggtgagggagtacttgcaggatgctttcaaggtgccgcaggtgatacagctaaaagctgacgatgaaaagtttatgtggaagaacttgactattgccgaatgtaaaaggcttgcccatgaaaatgccaaagacattatcacctgtggatttgacattgaaaaaactttcatttttacagatttcagttatgttggagggtaagattactagtactccctccgtttcacgatgtaagtcattctaccatttttcacattcatattgttaatgaatatatatatatatatatatgtatatatatatatatatgtgaacatatatatatatatatatatatacacatatatatatatatatatatgtatagaatcgttaatatcgatatgaatatggggaatgctggaatgactttattgtgaaatggaggaagtacttcctaactgtcgattaaaatataaatgtctggctggtcttttttttttcactcagctagcttctattctatgataaagtagtaaccctctatctttttttacagggcattttatgaaaggggcaattgtgtttttgcccttgctttacgattcaattgtgattttacccctgttttttagggtttgtgattttgcccctgtttttttaaatgaaggagccgtctgccccagttttgacagaagtttggtgggtccggaatttcagaattaaacaaagatagaaaatgttattatcatttatgaatgaccattctacccttggttcaataaaagagccaaatccccaatcccttactgtcccgattttcactccaaaaccctagctgggttgcaagcggcggcggcgacgcgcggccagcggcgggcatggaggagtgccggtggggccagctgccgcggaccagcgcccgacggagtcggggcgcgggcagggaggcgctgcggcagcgcatggaggcgcggcgtgncgccctcgcgggtgcacgcgcagggaggcgcggcggccggcggccccgtggccagcgcggcggcggagaggaacggcggctccgtcggccagcgagccagcgagcagcgagcaggtagcttggcggcgggatggcgctgttaaaggatgtaggcaggcacggcggcgtcctcggtctgaagcgcaggctggggaatcagggaggcgcgacttgccgccggcgggctggcgctcctaacttcttgcgggcgcagggacgaggcctaacgctattgcaaatacaggattaggagacataatggagtaaatcttgtgcatggtggaaatctgctgcaaatcccctgttttctttcccattttcatgtcttgtatctgcgagagatttgtttggtgaatggtgatttcttcctggtaaatgtgatgaatctttttggtgaatttttgcacccgatgcaagttctttgaaaatgctgcagaaatgatgttaaattcttccaaaatttgtcaaagtttggtcaaattcgaaatatatgcacattatatcaagaaaggagaggcaaatgtgtaaagggtatacaagtccttctactgctaagttgacgctgttaagtgatgctaacagaataggggcaaaacagggacagaacagagcttcgtttcaaaaaagtgagggaaaaatcacaaaccctaaaaagttagggtaaaatcacaattgcaactcaaagtgaggacaagaacataattgcccctactaaatatgcttgaagtttccaaccgtgtgacatataacaatgtgagaactattctattaagattgttctctgctcttggtgttcttgcttaaatatttgtgaacaccatggagattcattacttatctttaagcgtcatgttttctaatactcttactcttggatgacagcttaaagggatatttggaattagtccggaagatcaaattggcaaggtcagctttcctcctgtgcaggctgctcaatcattctcatcatcgtttccacatctctttcatgacaatgatgaccatctgccgtgccttatcccatgtgctatagaccaggtatgatatctctggtctgattatctcgacagtacaacataattgcttttgtatctacttgctagtatactgataatatatagatttttcagcacaaaatttggacttagtttgtttcttcttgttcttttccatctctaaatttgaatttgacccactcccatacgcaaaagccaagtttagagccttgacttgtaaacatttgcatttaaagataccaaaatgttctacatgtttgtatatagccgtatcatccatgcatcgaatatgactgtcaacattcggaaatatcaatcattaatgttggaaataacccaactagcgttataccacatgtaataaaccagtaaaaagaacttccacgcaaggtggtgtctgagaaagggaatttctaggcagcctgcccttatctgacataattggttgtatatcttcttattggcattaaaatatgtagagagatttatctggcagctctaaatttgtactgagtgcttgtcaagtaaatatttttccaatacttgatttagtgatctactatcatgaaagcatatccgatatttctcattaaaggtactggagtgttggtacatatatgtatttagtttggcatattttgagttgcctatttaatcttaatttatatttatgcaggatccttattttaggatgacttgtgatgttgctcccaaacttggttttcagaaaccttcactgattgagtcaagatttttccctgcacttcaggtatttcttttagggagagcttggatgtaggactgaacattagagctggtgcaatttgacgacttgtaattaacttgctcagaattttttttggttttacttcgaataatcataatttcacgtgcattactttatgtcgattgcttgatttccttttaacagggggagagcactaaaatgtcggccagtgacccaaactctgcaatatatgtgacagataattctaaacaaataaaggcaaaggtttcatctggaatatttactcaatcacacgctttagttcggccatttaaattatggtatcttgtagttctattatttcat

SEQ ID NO: 29470 - DNA, 2272 bp, Oryza sativa
tcagagtataatctattcgaatagccgcgccctcggttatggccaagccgagcaatgtacccaagttagtgttttaaattcttaaaacctgcttaacacctaaaatgtgaaatggttggcctgggttggcttaggacgagctgggacccagggtcgggttgccagttcggtctgaatcatcgtaggccttgggttaaggcaggttcgtgtgggttcacggccttgattaataatattgtatagttctaggatcgcgtttacaaaatagctttgagcaactaaatgtctttaaatgctgtttactgcaaccctaaccctttatattataattcccttgtactcccttgcatttattctgcatttgtgggtgtgtcttgttgagtacggtggttgtactcagtcttgctcaatttttcccaagcccagaagaggagctccttgaagatgaaggctttggtgtctagctcgtgcctgccgtcaagcgcctgtggtcgtcgccctagtcttccgctgtttctcgtttgtctttgtgtgtgctgggccttcgctgcccatgtaataaattaactatttacgcttccgcttgttatactctgaattgtatcaacttttggtgtaccttgcctcctgggacaaggattaatgcacgcacgtaaggaatgcccgttgggttatttccggtcgtgacacaacccaagacggtttcagagattcgtagtttccttggtcttgtggggtactaccgcaggtttattgagaacttctccaagatcgctagaccaatgactcgactgcttcagaaggatgtgaagtataagtggacggaagagtgtgagtagagttttcaagaattgaagaaaaggctagtgactgcgccagtgttagtcttgcctgatccaaggaaaggttttcaggtgtattgtgatgcgtctagacttggtttgggttgtgttttgatgtaagatgggaaggtggttgcctatgcatctaggcagttgcgccctcatgagaataactatccaacacatgatctagagttggcagctgtggttcatgcattgaagatttggcgccattacctttttggtacccgtacggagatgtatacggatcataaaagtttaaagtacattttcactcaacctgatctgaacatgcgtcaacgaagatggttagagttgatcaaggattatgatatggaaattcattatcatccaggtaaagcaaatgttgtagcagatgctctcagcaggaaaagctactgtaatatgtcagaaggtcgacatctaccttgggagttatgccaggaattggaaaagttcaacttgggaatagtcaacaaaggttttgttgccgctttagaagctcaacctactctttttgatcaagttagagaggctcaagtgaatgatcccgatatccaagaaatcaaaaagaacatgagaagaggaaaagccatcggttatatagaagatgagaaaggaactgtgtggctaggagaaagaatttgcgtgcccgacaataaggagttgaagcatactatcatgaaagaagctcatgaaactttgtattccatccatcctgggagcactaagatgtatcaagacctgaagcaacaattctggtgggccagcatgcgacgagagatagcggaatatgtggctctatgtgatgtgtgtcagcgagtcaaggcggagcatcagaagccagccggtctgctacaaccgttgaagataccagagtggaaatgggaggaaataggaatggattttatcaccgatctacccagaacatcagaagggcatgattctatttgggtagtggttgacaggcttactaaagttgctcatttcatacctgtcaaaacaacctacacgggaaataagctcgcagagctatatatggcaagagttgtatgtttacatggcgttcccaagaaaatagtgtcagacagaggtagtcagtttacttcgaagttttggcagaagttacaagaagagatgggtactcatttgaatttcagtactgcctatcaccctcaaactgatggtcagacagaaagagtaaatcaaattttagaagacatgttgagagcctgtgttctagatttcggtggaagttgggataagaatctgccgtacgctgaattcttttataacaacagttatcaagctagtcttcaaatggctccatacaaagcattgtatggtcggaagtgtcgtacaccgctcctttgggatcaaactggtgagcgtcaagtttttgggataga

SEQ ID NO: 29471 - DNA, 5460 bp, Oryza sativa
gttaatcaattttctagatttttctggtaattatttgagcaaggaaagtatttttaataaggcataaatgaaacatcatttcacaaattattttaattgaaaaagtctttaaaaccatcccctaggccgttgggccgtttccggcccaactctcctcttcgcgcgcggccgtgcggcccaagccgagccgccgccccaccctctcctctcaagccgccgacatgtggggcccacatgtcggggtcatcttccacctctggccggccgagccgagcccaagcgccgccgcctccccttcgattccgccctagccagccatctccgagttcgattgcttgaggggaaatcatctcatccttatcctctccctttcccctaatgtttcggagatcaattttgcccggataaaccgaatcgaattcgttttgagtttatctctccaaactaaccctagatttttccggctcaaatcctctcgtttggagtccgatctctctaatccaagcctatataaagcatcccctagtcgtcctctacgtttctcctcaagtcccaagctccaccgttgctcgtagcgccgccgccacgttgccctagcgccgccgccgccgacgccgttccagccgtgccgcgccgccgctatagccgtcaccgccggcttccgtcgccaccaccgggttcgtgaggaagaggagcaccccgtccgccccttcgcagccgctgaagaccgtcagagcgctgtcgtcgacgttgacccgagccgagccgccgtcggacctcgtcgccggccgtcgttcgtcgtcgtccgtcgtagtttcttgcgccggtgagttcacgtcgtcgtcctcttcgcgtgggtgttctcggatagcccaaccgagccctctatcgccggtggtcgcgtcgtcccgtgccatggccggcgatgatgtcatcgtgacatcataaatcttttatttaattcgtaataattttctgtattagatgaaaattgattaaacttcggaaattcataactaaatcatcgtaactcggattcgagtggttcaagctgctaaattcatctaaaatcaagatctacatgttaaaaatatccacatgtactttttatgcttgtttttgtactgttttgttgattttgtttatttgctttagtttctgacattccagaggagagcgtttacgtcgaggaaggttcaggagtggttgaagaagctcaaggcaagtcacacagatcccaaacaaccctttgagcatgttaaacccgtttagacctaatgttttatttcaacttatgcattatttttgaatgtcattgggtggtgagcctttcccaattaattaatggccgaagatgactttattttcctatgggtaataaattgtttagcttggaccttatatatcggtttggtttagctaagtgctatataggtataattgcttagccatgcttagaaacattagctcattaatgggatgaatcatactacattattaattatggttatatttagtgctagctcatgatggttaatcgtgttatgataattaattgataattaaaacctgcataaaggtgggttgcgagcatatggttttgatggtcgtgctcatgacaattaaggaccggttcacgagctactgttgtgaaacatttaccgtgccaaccacaagccagcgtgggcaacgactttaccttttgtatagcgtgattcattatggggtgccagactgagaagcggcgagaagtccgtgggggtcgctggggagtccattacctctggttttgaaggggagagtacgatccaggaacggtgcactgtggtgagttgtgttgtgtgagaggtattgtcacagctcctttccaaggtaccgtggtggtatcgaggcgcatggtgacatcttgtggagctgtgtcttgtgggaacagtggtacatctctgatcagagtaaaactatccgaatagccgtgtccgcggttatgggtgggtctaacaatgtttttcatgattagtctcacactactcattattaatgataatactgtgataattaaattgactcctggtttggaatgatatattcctggtatggaggtttaatttgtacaaccagggttggttgttcagatggggttgggcctatgcaacacgggggtgttgtatagtgtttatttaatattgcttaattacttaactgttttactattctctcaaatgtttattaaatcttgtttatgcaattgagctgtattatgccatcctttgttatcctgtgcacttgcatatttgctgtgtggcttgttgagtatgtcatatgctcaatcttgcaatattcattcatcagaggaggagtacttcagtgaaggtgatgatatggaggattaggttttgttcgggtcaagttgcttgtggagtggagtcgccatacctgttccgtctattgtttttatttccgctgcgtagaattttattcttttgagaggaactatctacctctgtaataattatttatttcgcgagtattaattagatatttgatagtactctattatcaatttgttattgtgtgcctcggctgattcctggacgaggatttaacgcacgtgtaagcgtttggaattttggataaaaattccgggcgtgacaaagaatcatccaatttggagttcatatgattgagataaactagtttatttttgcagacggctccttaaaatgctcgtatggaaaaattgattttttcatgtgggctcttaagtaagccgcatgcaaaaatgagctcatttttgcatgcggacctcttaagaggcccctatggaaatattaattttcccatacaggtgtcttaaagagtcgtatgtgaaaataaagatcaatttttgcagacgctgtcacttacggtccgtctgcaacctaaaggggtccttgtacagaaaattctttttttagtagtgagattattcaaaataacaacgaggataaactgtgttggaagcatacttctaatggcacatgcaacacaaaaagtgcatacaaggagatcattaaaaaggggagaaactgtgttggaagcatacttctaatggcatatgcaacacaaaaagtgcatacaaggtgcatacaaggagatcattaaaaagggggagaatcaaaatctgcagcaggtaagtgctcaaactacttacgtaatcaagaaaatttagaaggatgaactcacccttccaaaggtcaacgtctttgcttggagacttatcagagaggcccttccaacagctcaatggctaaatctcttagaatttctgatattttggctgctgcttgttgtagacgtggtcaacctgaaactgatttccaccttctctttggttgtccctgtagtaaattaacctggagaatttctgaagctaatctatctgttggcaactttttgtgacaagtcgaagcacgatcgcagcaccaaaacgccttgtggtgatatggagtcgccaactacctcgatctagccaaacggccaaatcaagatgggttttgtagaaaaatagctaaaccggcaagcggagccgatttagatatcaaaatcagcctctaggccgatttagatctatatgatgagaactatccgtctcgtgggcaaaacagaaggttttcaggacaaacctacaaataggtgtcgcactctcgcagcggcagcggacgatttacggcgcaaatcgacaaaaatggactacaactagagtaaagtagaaaacgtgattcaagtagattgtgtgttcggggtattacaattgaaccggccttgtcccttaaataggggttggtcttgccctctataggcccttctccacgtccaactcgggatagaaaccaaaggaatcccgaaacatgctttcccgagcaaggaaacccgagacccgacgaaaacagactcagactcggaccctgacagtctgaccggccatatacctacagtcagaccggagttcaggccgcggtcagaccgcctacatacttgcggtctgaccggctctgtgaaggaaacccggcactttccaaactttggcaattttcccctattttgtcgatagatgccaaatttggatgtaaacactatctactgacatctttactgataatttccctctggctcatattattgcttatattgcctctaatagctcacatcagttgggtttaaatagaactctcatcttaatgtggcagatgtggaaagccaggaatgacttgaaatttcagggaaagctgaaagagccaactaaagtttgttttgtatctgaagctatggcaaatacatacaccattttctctgctcataagtctttgcaggatgatcatcaggatatggagcaagaaagaagaataaaaaacattcccaatggaaacagatgctatgtggatgctgcatgggaaaatggcttcaccggcacaggaatcttgtttcacatgttgtcttcacataatgctcttttcatgctttgtggctcattcatctttgcaagccgaactggtgggtttgcaactgacaatgcactactacaatagctatttttccgtgcggttgttttgattttggcgtgcggttgttttgcccgtctggaacattgcgtctgggaaaatcgtgattttcttgtgcaggtggcgcaaccgcacgtgaaaaatccgattttcgcgtgcggctgcttatgcgaaaataaaaatccaaaaaaaaataaattttcaaaaaaacaaaccctaaccctagatctagatccggcaccccaccgccgtgccggccaccaccgccgccggatccgggcgggggactgccgccgccgccagatccgggcggggggcagtcgccgccaccggatctgggcgcggggagggcggcgctgctcccagccctgccggccaccgcctcctcccgctcccggcacacgtcgtcggcccgctcccggccgccgccttgccgccggtgtcgtcgcgcgcacgccaattcaggccaccacctcgtcgtcgtcgtcggccgcgtgcacgctgctccgagccgccgcctcgccgtcgtcgtcatcgtcgtcggccgtgtgcacgctgctcccggccgctacctcgccattgtcgtcgtcgtcggccgcgcgcacgctgctcccagccgcctccccacgtccgcccgccgctgccgtgagcccgccgcgagccctctgcgcccgctagccaccgtcgacccctccgccgagagccgcccggaggagaggaggagaaggtgagagagagagaggaaaatgagagaagaggaaactgagaagataagggggagggagagaggagagaggtgggcggggggagagagaagaaaagtccaattttttttgaataggatgggagggaagtgctattttcctatgcggttagattaggaggcccgcatgtgaaaatagagctttttttgtgtgcggcc

SEQ ID NO: 29472 - DNA, 5458 bp, Oryza sativa
atgcaacaattactgacagtgccaaggatgattttgatacaggtcattggagtcttaggggctgtttggatgcttgcttcagtttaccaaagttctatagctaaggtgtggcatgccacaatttatgtggctaagaaattcttgaccacaagttaggtaaatgttggcaaaggtatgtgcctatgacaagtagggtcacaaaattaaaaagtgtggcatgataaagatgtggcaatcaagcaaacactaggctaaattggtcaaagtagcttgccaaagttgtggcaaagtatggtcaccatccaatcaaccccttagacttctttgaagccaaattaagagtgtgatcccagaaaatcctatgcatgtggtttggatctcaagaaaaatcaacagtgtagctgataaaatggcctaataagctacttcctccgtttcatatcataagactttctagcattgccaatatttatatatatgttaatgaatctagatatatgtgtgtctaaattcattaacatctatatgaatgtaggcaatgctagaaagtcttataatatgaattggagggagtagaactcagcataacactgatccttctcaactgtaacatctcgcacattgcatctcgcacattgcttatcctaatagagattgtcatgctagaaatcttcaaaatgatttcgtttcggtgaactatactattaactatgtactacctctgaaattactattaactatgtactacctccatttcaggttataagattttctagcattgcccatattcatatatatgttaatgaatctagaaatatatatatgtgcctagattcattaacatttatatgaatgtgggcaatactagaaaatcttataatatgaaacggaggaagtactatgtttcttaaaaaaaaaggggagagacgtgagaggtggttgaacatagcttatagctatgttcccaacccctctcccgcattttccgcgcgcacgcttttcaaactgctaaacggtgtgttttttgtagcaaaaaaaagtttctatacgaaatttgcttaaaaaatcaaattaatctatttttgaaaaataatttagctaatatcgctccgttttccgtgtgggagggtaaggttcccaaccatgcccagcaaacacaggcatagacctctagagcgcggcggacgaccccatccacgtggtaggttccatatattgccttaacaccctcagaatgttgggattcaaaagattaaaaagaggtgccgccacacatgattttttatctaacaaggagaacttttacctctaagaacttttatctaataccggcctaattacggtgtaaaagcacaagagaacttttgaagaccgcattttccccattgtagatatatcacctctatatttttaccacgtgtcatttaaccattgggagccatttaaactgcctgcaaacaacttttgcctcttgtatacaatgatatgggaccatactgcaaacagcaaccgtctactatgtacatgccacccctaacaacttatccctaaaccgaacagaatcctatcatataactacaagaatttatttaatctatgacgaaaaaattcgtcatggatcactgaaaattcgtcacaggaattttcccatgacaattatacttatcgtcatctattgagcgtcaaagattaaatttgctgacgttttctccgaaatcgtcacagatcagcacaatctatgatgttttttaaccgtcataaaatgcttatgggctcgtgtagtccagcccaggcccaacctttgtgacgaaattaaacgtcatggatggttgccatgtggcggctaacatggcagttgacgtggtcgtttggacacgtgtgcgatgacatgtcactgatgacgtggcagctgacgtggttgttttgacacatgtgcgataacgtgtcactgatgacgtggcagctgacatcagcaattgttttatacggcccgttatttttttgacggcccattaatttttaaacagcccattaatttttttaactggcctattttaaaataggcccatttcagaactagcctattttgtcaaccaactatcagatcaaagcccactaaacagacccattaaatttgagcccaccaaattcaatccaatttatcatacaatctcagattcaaaccaacacatctcaacaaacatccaatacaacacaaaatttacaacacagttaacagccaaatctagtcacaatccaaatacaatcacagtaaccaaaatttcaccggatgtcgcatgaccaagatcttccaagtgagcttagcagcactgcatatgcacaagataaaacatcaataactgccatatcatcctagtttcttctactgttcaagcacttaatagatgaataaaaaatattcatgcagttactgatgtcacggacatgctgcaatgtcaggatcgggaggagctgtctccctctgtatgttatctccacctgcacttcgcacatttctgaaattttcagttcatctcagttcagcattttgtaacaaagaaactaagcatgctcagagatcaggcaaaacaatatatatatatttaccccttttcactgtggaaataatggttttcacgcatgagggagaggcaccctcaaatttccttactaaagtaacagttataggtgaaaaaaacaaccctacttccgatcctgctaccaaataaatagcccagttctttcgtgaactctgaaaagatattgaaatgcttttgcacttgtacagtggaaaaattggtaaacaaaaagaactgccagccctggtttcttcctattatcccttaatttaaaaggaaaagactgacatcatgctcacaaatttccaaaaattgggtataaactgaggcatcttaaactgcaatgcaactgcttagcatagtataacatgagaaagcacagccaaaagtttgctagatagccaaaaaaaccacttcacatgttaggaagaaacatgccactacagttttgacattcctgagcaccacatatggtggcaaccaatcctttttacatgaataagataaaaggagtcatcagatttgacattcataataggatttcacttattactttctaaaaaaaggtgaccataggactcataggaactcaccaaaagtgaccatgggaaggatgaaagttgaagcaaactcagcaattcgcacaggaaaaacagcctcatttcaatttggagcacatccaaaacctctacacagcacaccaatacatctctagttgcatctgtagcccatctaccgcagcaagaacagcaacaatcacgagggggaaggaagattagggaagcgagtagggtggatataccttgatgtagatgttctctgtttactgatagtttgctattactgtttgttaaaaggaaaaggaaagatggctagtcctgtttttgtagaatatttttgcagcatgcacatgtttaattgctaattgcaaattgcagtacataaaaaagtggtaatcttttatttcaggtggatatgatccagatatatatggactattggagattagtacttttgatttcatcttactgttaacatttatatatttcatattttctgaaagtacgttgaagtagagtttaccattcgatatataggaattgtgaaaactgctcaagtgatggataaataaaacactacataatgcaagtctcttgttcaaaagatcatgtcttacagctatatgatattatattggtttctcattctgcttgcaggtcagatgataattcattgaggttgattgccatagattgataattctacaggttaggagtagtacttataacgtatagatgcaattcagtttcaacagtcatgaagtgttgatgaattatgaagagctcaagcaatacatctctagttgcatctgtagcccatctatcgcagcaagaacagcaacaatcacgagggggaaggaagattagggaagcgagtagggtggatataccttgatgtagatgttctcggcagccttttcctcctcgccgagcaccttgccgccggaggagaggagccgccacagtgtgagccacgccgccagccttgcctgaaccccctcgcattgactcccttgcctgaaccccctcgcattgactcccttccgccgccgtaccaggtcaccgccacctccaccgaccccatccacgccggcccgcctccgcggctccgccaccgcctcgctgccggcctgcccgacgggccctccgtctctggcgcgccgctgtcctccgcctctgcgacggcgccaccagatccgccggagcaggctgtcactgtgcccgccgcccgccgccgagagccgagctccttcctagggcggcggatccggccttccctaggacggcgccgccaaatccaccgccgcaggtcgttgccgccgcgcctccttgctgccaccgccgctcccgctagagttgggacgccggcgagattgccgaagaggggggggacggaggagcggcgagaggagcggagggggaggcggaaggggcggcgagatccgagggggctgtggatggtgggcgaagggaggaggacgatgaccacggcgtggtaggcggcggtgtgagggtggggaaagagaaggtgaagaatggatggctagggtttggatatatgtataagaagctatgttgatgcgattttaccagaataaccctggtatctggaaacctattatacaagttacttggacaaaatggtcatttaacgtggaaatttcaaaattttgaaacttcaaatcgaattttatcataataaatgaacttatgtgaaaaagttgtttgaaacaaagttgtataacttactgagatctaccaattttattttggttatttctccatctgagtttcattggcctatataaaatttgaatttcaaattatgacaacttcaaacaatattttcaaaaactaaatgatctcaaatgaaaagttcatcaacaacaaaattgtataactcatcaatatctataacttttattttggtcatttttctatatgactttgtttcaacggtttgaatttgaatttcaaattatgacaacttcaaacaaaatttacaaatactaaatgatttcaactcaaaaagtcatcaataacaaagttgtataactcatcaatatatataacttttattttgatcatttcttcatccgacgaagtaatttgtaacattgttcacaaaatctacatatctctcttattttttataaacgtataagagatatgtacattttgtgaacaatgttacaaatcacttcgacgaatgaagaaatgacccaaataaaagttatagatcctgatgagttatacaacattgttgtgatgactttttcagttaaaatcatctagtacttgtaaatgttgtttgaagct

SEQ ID NO: 29473 - DNA, 5127 bp, Oryza sativa
tagcatactaaatgaacatatgtgaaaaacttgtcaaaaacaaagttgtataacttattgagatctaccaattttattttggttatttctccatctgagtttaattgacctatataaaatttgaatttcaaattatgacaaatttcaaacaacattttcaaatactaaataattttaactaaaaaagtcatcaacaacaaagttgtataaataataaatatatacaacttttgttttggtcattttgctatatgactctgtttcaataatttgaattgaaccttgctatacacacgaagaaatctatacgaaattcgtacgaaaactacctgcttacgtgatttccatggctagaacactagaagcccacacaagatcacaggcctacaacactctagattattcaataagaaaagcccatatcaaattgacaggttcaatatcatgctactcattcagacttcagagcttcgtttgagtggagatgcagaaagcaaggatagaataaattcaatcagttctaaaaaaaatcaattcaatcaagcatatgagctaggtggcggctatatgtctaggccttaccgcctcagctgccgccacaatcagggtttacgattccgacaggcccttctatttcgggcactggcggaatttggaatttcgcgaaatccggtggaaaaccggtaaattccgaacaaatttcataaaccaaaatttgaatgcaaattccctgagtttgttgacaagttctcgaaaacctgtcggttttagcgaaattctgatcaaaatttcgatctgtaacctgtaatttggaccaactactaactgggcctagtacatgcaattcgggccatgtaagtgttttcttttttttaattctttattcttttctttcctggtgtaagttttagtaaatacacacaatacatcattttttttagaatatttatatcccaatatgttctatgaatatcatagtatttataagattttatttgtttttttcttttttttatcaattcaaatttgaatttggatgaaactcctcgaaatctcatacggtttctactttcgagcctcgtcggaatgtcgaaatttcgcgaaatccgaccggactttgttggaatcgtaaaccctggccacaatacgagcagtattgctttgcttcctgcataataggtacgatctaccatgcccacactaataataaaggcaaattttgtctacaggacactgtaatttcgtggttttagccgtaggacactgcccgaactcacttttggaggaaaacactctataaacatggtaatttggcaatagacatcgtgctgattaaaataataatttttggttgaagaggagagagaaatggcatgaaagttctaaaatacccttgggcccatatgtcatatcttccatctcttatctctatccccgctgcgccgccgcctcgatcgaggacctcagcgctgacgtcttccaggaacagcttgggcatcaccgcgctgcccaccctgaacgacgacgacccatcctccttcctgacgtcggcaaagctcaccatgaccatgagcttggtcgcccggccatggccgagcaggagcagcacggggtagaggctgtacagcagcagcagcagaagtccgcggaagagtcccccgacctccagcgcgacgagtatgaagtacgggaaggtcgacggcaacatgagctggccgccctccaccttgcacaccgtcacgtccgccgccgccgccggcagctcgtaaacgacgacggccgcctgacgacgcgtggcggcggagacggaagatgagcatggaggaccgctgctcgccgacgacacacggctgccgctgctcgccgactacgcgctgctgcagggcgccgtcatcgactatgcggcagcgccggcgacgatggcctcctgacgacgtgttgtggcggtggaggaggatgtgcatggaggaccgctgctcgccgacgacacgtggctgccgctactcgccaactacgcgctgctgcagggcgccgtcatcaacgccgccgcggcgccggcgatgacgacagcctgacaacgtgtggtggtgggctggcggcggaggaggatgggcatggaggaccgctgctcgccgacgacacacggatgccgctgctcgtcgcgctgctgcagggcgccgtagtggacgctgctgcagcgctagtgtccgcggagtggagcgccgggagcagattcaccggcatctccactgacccggccaccgccacggcatcggccatggaagtgtgggaggtgaggatagagagatggaagtatagttggccatatggcccgaggcccgatggcccggcccaagcacggcacggcccggtagcagtcgggcccgtgccggcccggcacgactattgggccgtgcctgggcctatggctgggcacggtgggccggcccggcacggcacggaccgaggtcggcacgatgggccggcccggcacggcacggcccaacggtcggcacgaccacggcccgtaccaacggtaggcacgagcacggcccagcccaacagacagccaggccgcaccgcgtgcgcccgcatatataagccagcgaacgccgcgtcgccgcccctcccctccccagtcccctctcgcctctcgctctccgcctctccgcctaaccctaaccctagccgccaccgctcaaccgcctccgccgatccgcctccgacgctccaccgcccaccagatctcgtcctccaccgtccgccgctcactcgctcagggcctcaggcgcgcaccggtgagactcaccgagtcgcctcccttccactcttccagatccagccttcctcttcgtctccgatcgatgcctcgcctgactcgcatgaggggcgcatgaggatgggggccaccggccacgcatggtcgcctgagtcatcgtccttccactcttccaaatccagccttcctcttcgtctctttcccgtttgttcttcttcgccagatcccttggtcttctcgtagatccgtgagcctatcgtcttcaacggcaactccggtgctccggctgcgcaggtacaagcatggaaccattgtttttattttttttttctccatttccgaccctaaccttgagtgttgttggctgcttgcaggtcacaagcccgttgcttagcggcagccgccgttgagggaccagagtgcctgcgatggatgacgatcctacctctgtcaactacgagttgaggactatggggatgcgcggtgatgacgatgatgatgtggaggaggatcgtgtggaggtgttcggcaatacctccgacatcccgatccatgtgaatgtcgatgacgacgacccgccggtcgacgacagtggcaatgggacgtcgactggctctagtgcgacttgtaccaacaagaagaccaaaacctccaaggtatgggatgactttgaggaactttatgaaacgaccaatggtaatagggttcgagtctctactaaatgcaattactgtcataaaactttgagtgctcgttcttctgctggcactggacatttgcttaggcatattaagtcatgcaaacctagaaagcttgggtctaatgctttgcctcagtccatgcttagatttagtgcaaatggttctgttattccatgggaatatagtcctgaagatgctaggtttgaattgtgtagattgattgctagagaggatcttccaatcagttttggtcaatctcctgcttttgtgaactatattaaggctgctcataaccctagatttgttcctgtctctagacaaactactaccagagatttttataagttgtttaaggatcgtcgttctgttattattgatcgtctcaattctgctagctctattgctttgacatctgatatatggtctggtcatgctaaggaagattatttgagtgttgtagctcactttgttaattctgattggcaattagaaaagagggtcttgggtcttaggcttattgatgagtcacatactggtgctaatattgctgagcgtgtgattgctgttgctgaagaatatggtattactgataaggttttctctattacattagacaatgcttctgctaattctaaagctatgatcacccttactcctgctctgtctggttatattggtgatttatttttgcatcaacgctgggcatgtcatatcatcaatttgattgttaaggctggacttgacaagttcaagcccatgctaaatgacattagagctgccatttcattcttgaatgcatctaatcagcgcattgctacatataaaaatgtttgcattgctgcgggttatcgtcctcgtatgtttggtttggacatggatgttagatggaattcaacttatctaatgcttaagcatctcataccacatagggaaccattcacagtatttattagtacacaacatccttttgttaatgaccatccattactcacagacttacattggacatgtgctgaatctgttttgtgtttccttgaacaattttatgattcaactgttgttttgtctggtgtttattatccaacatctccattaatcatgcatcacattttagagattgctggacatctaaacacatatggcaatgttcaaaacatcgcaaatgttgttggtcccatgaaaactaagtttatgaactattggtctaaaattccaattctttattcatttgcatttatcttggaccctagggccaagattagggggtttagtaaagtgcttcagattatggctcaactcattggtgatgattattctgcttatttaacaactgttagagcttcattgtttgatacttttgctaagtatgaaaaaaagtttggttctgttagattgcatagttccactattccaggcccttccactggtaagaaaaggactgcatgggggaagatttttggttctgttgttgctgctgggcttggtgctggtaatgcaggtgccagtccaggtgctggtaatgctggtgccagtccaggtgctgggcttggtgctggtaatgctggtgccagtccaggtgctgggcttggtgttggttcattatccaggatgacatctgctactgctttgcttcaggcagcttcttca

SEQ ID NO: 29474 - DNA, 40866 bp, Oryza sativa
aaaacaaaaaataaaaaacataaaaggtccatcatgggctcatggcaaaacaattaaggaacctctctcagacatctgctgcttgtcaacatctttcatgagcctgaggggtatgtatatcgtatttagctccactggtttgcctgaaaggaatgaattgagcatgtaaagagtatgctgcaaaatgcttcggccttgagtttatgtaggaaatgatttttgtagtcatggagaaggcatgatgcatacccgtaggtggcacattcaacactttctcatacttcttcatatggtgcatcatggcacagtgtagagggggaggggggaagtgtggtgtgtgcagacgctggatttaggaggggatatgtggcctcatcactaccattatttacggctctactctcatgcaccttgcgtgtacttttttttttgttattgagtacccttaattagcatatttaaccgtttttggtacatttgtcatgttaaattgttattgggtatggacattgggcattgtcatgttacagcaatgctagtgcatgactatggccgtgctcaacttagttggatacaatcgcaacatagtttcccctactcatcactaccattgtcgatgcactacaacctattgaaaatttggtcataattcgttatattttaatccaaaataacaagataataaacatgatatttataatgggatttgatccattgatagtggtgaatgtaatcaacatgagtatgcttaatgtagaataagcatcaacaatcacataataacacaatattgacattgcgatgaacattaatagtaaaacttctaattgaaataatgtaagaaggttataccccaagaatagtcctccgctggagtttgaggcagtattgcctccgttggtgttgacgggagcctccttctccttgtatccagtgttgccgttgtctccagtgttcaacatattggtgaaggtgaagtagatgttgacgaacagtgagtagtcgcgccttgcgctccccaaaaacctgatcgcccgcccgtccgtgcaaacgtcgcagcagcgcgtggtttcggaggcctactctcccaacgcgtgtgcacacactcgtcgcgttgggattaccgtagcagtaacagcgttggaaaaaggatgaaagtgtgtcttcctctttcgcgggagatcaaatccattatcattttataagaggaatggaagatgaagagtaagagtcatggaatagaaagaggaatagagtaattaattctcatcaattagccatcaactatcctccactacacaaccatcaccgatggaataggaagaggaatagagcaactaattgtcatcaactagccataaaccatcctccactacacaaccatcaccaatggaataggaagaggaatatagcaactaattgtcatcaactagccataaaccatcctccactacacaaccatcaaccatccatcaattaggactaattgatataagttaccaattccctaatcaaatggattaattctcaaaactcttcatcccattgatatcccataaaaaaataaattcacatgaattcctagcataatgagccttgaaatttatttgatttaattgatttaaatggatcaattacccaattaaatctaacacaaccatagcaaacccaaatcggactcaagtgctgatatgtgctgctcaggtgcttccttgtgactttgcctgttagtcgccagttcgccattgaatcaagacttaatttagggagcttgtcagctcggagccgctgtggcattgctagccacgtctgcattgcactgcgttgtgtcgtcgcccgtcgccatgtcggtcagcccctcagcaatatgagaactcctccttgctctacgagggccctgagacgaaagcgctggcgtgaaggaggtcgagtcgaagcggttttttttagataatggaataaatattccggcctttgctcattagagctacaattaattattacaaggaatcacacaaacactgagtaaaatggagctacacagcgtaggtgggaccaggggcaggaaggtgaggtcatatttatagttgagctttagaatagggtcaaataagcaattgtcttataaaatatagatgttgttctgtggtgacacatgagagccatatccggtccatcttgacctctagatcatcatcaagtgttactgacgtggcacaccatgtctacccaaatatgatgactcactcgatcgggttctcatatcgcacgctccttttgagcttaatagcgggaaaccacctcattaacacaaacaaataacatgtttaggtagccaaacccttgttcccccacctttttttattcctggtccaccaacgccacaaatcttgcacctgacgtgtccaagtctagagccaatcgatccaggtagacctgttgtcggggcccatggaagctttagttttggagcttaacaagcgtgtcaaaaatctgactttgagcctatttgcttgggcccactccaagagtggcgcttagagtgaagtcgtggagcgacttagagcagcgcttaattgaacttttagctcaccgagatatggagccagagttggagcttaccaaataaaccctttaggagggaagaaactcccatgtgttcttgcatgtttcataaagtttactttctctataccataaaaaattaacctaatagcagatgttgatatatcgtagtattatgaatctaaatatattaggtagttttagctctggttaacccaattaagctttactactatgaaatggtaatacacacacacaaaaaaaaaaaaaagagaagtttcattcttcgtataagagcaaattggtaaaaaaaaatgatgattggctgtgatgggctccaacaaaagacactgttgaaattgggcgatagatagaaacgtttactgtccaacgtgaaacattattaattgggtgtttttgcctaattatgctcaactgttttttgagctatcgttaatattattcgcgaagcggcatacttccatatggaaaataatttataaataaaacttttatatacgcgtacttagcgatataaaattaaaggctaaaaaataatcttcgatagtaaaaatctcaaaatcaagtctaaatatatttaagattgaaaatttaaacttttactaataaacataaacatatgcgaaaagttagaggccagtatacgttaagaacaagggtagatcaattcaaagctgatatgatgattatttggaaagatggttcactttaggtagaagggacagtagcaatatttatttttggtaaaatcgcccagtttatcacggcctcacgggaaaaatttaaattttcaaacgttgttatgaacttgtaattttatttaatataacctagttttcaacatttgattctaataatttcttaagaacacaaatataaaaaaatatttccaaattaattttaatttttagtaaatcaaaccaatgagtctgttggtgcgttacgacgaaatcactacacagaactgttaatctgggcgggctaacaatcagctcattcaaaataactatcaaaagtgtacaacgaggaatggttagatatcgtaacatcgcgtgttcttctcgatgggccagaaatttagtgtgcttgagagcgacgtacaaaaaacaactgcaatttccaccgaatttcattcaattctcttcgaaacttgatttaacttacaaaattgtaattttacatagttggtaggagatttaacattgcaagccgtcaatacaaatgtttttactaatgggcgagtttgtgcagattcagatttcctctaatgggcgagtttgtgcagattcagatttccgtcaagagggaagtccgtagatttgaattcgaatacaccaacggagtttaaatcgcgcaaggttcgaagattcctatttccataaaaaagaaaggtttgtagattagagatagaatacaccaatggagtttaaaccgcgcaaggatcggatattcacataacacagaaaactggattccaaaatagaaagcagatgattgattgaaaaaaaaaggaatggtttttggtgctcagattctatgggtgtataggagtcgatcacgcagatctcccatcaggacgaggaatgattttataatcactgcaccacaaccaaaccatctcccaaatcaatcgcacaagatccaaacagacaaaatgcagcaaaccccaagaatttaaagatagaagagaatttggaggcgagcgtaacccaatatccaactggaaaacccacggatgagggctctaagcgccacctgatttcatctcgggagctttcaaatcgaaacgagaccgagatccaccctagacgacggtggccggcctttgggacagtgctcccatgaacaggtaaacatccaaattcctatccaacgccagatgaaaccaaccccaaaaaacaaaaaacaggagaaaaatcacatctcatctgaatgaaacaagatcgagagagagcaacagagaaggagagcgtgccgccgcgagcgcgaggatgaggagatggagaggagagaggcatggtggtgtttatataatggcggatggacgcgtggaagccctagccgacgggttcggcccatgggccttattctctcttcgtggatagaaatgggccgaatatattaaagatttggaccgaaagtgttgtgcagggtgtccaaatagccggcccactatttatttgtactatattttttctccgaaaacaaatggagagatattacgaaatggagggcatatcagcctctctcaatttacataatacccttctaaaacccatatttatactcctcctaattttcgagaaatttgaaaagaaaattaaggaacttgaaattatacgcattaacttaacactagtcgacgtgacgacggaaaccttcaagctactaccattccttcccatggtgctttctctctttctcctacgtcatcaacgacgccacgccgccgttcgacaactgggccggggcggcgccgccgtgggcgccgttcgccgtcgagcgtaggaggcgggacagccctatcagcacggcggcgttgcgctgcgcctcgccgaggcggcgccggagcacgcccgcctcggcgtggtgccgcgcgttcgcgccgcgcacggcgagcgcccgccgcgccgtggcgtccagcctcgacgccagcgcgcgccgctcggcgcggagctcgtccgcggcgcgctccagctcctccacccgctgccgcctccgcgcccgcgaccgccgcgccgactcccggttcgagatcttcctcctcagccgccgccgcctctcctcctcgccgtcctcgccgccgccgccgccgccgcctccgccgtcacagtacaacaacacatcaccaccaccaccactcccatcgccggcacctaccaccggcgacaagccggcggccgcatccgaggcaacaccatcgtatccgaacgccgccgcgtcgacgccgaacaagccgaagccgacgtccatgtccgggaggccgaagtcgagcggcatggcgtcgtggagggacagcattgcggcgatcagggacctatatgtaatatccgaaaacttgtgggttcgaagcgcgagtagttggggttggggaagagggggggagggaagacgaagaaggcgagggttatttatacacgccaaaggccactcctacccacgagcttcaggtgggcccgcttcaagtggggcccactgcgacgtggacgttgtggcgattcggccgtcactttagtttcggcgcggcgaagccgacctcctcctcgtacgtacgtataagtgtacgtatacgtacgcctccgtggcgggagagcacgtattgtacgtacgtattggaatcgacggctgaggagggaggtcagcgtgtggatggacggcggatgatgtgggtgatccggtgatctctagcttaagagcgaagtaatggtggggatgcaacgggagggacacgtgtagggctctccttcgtcgctgcacttcaggtgtttgctttttagggcttgttttttttgaagattttctttctgtttttcttttcatcgtgcaagctttatatgaagctagctatgagcccatgcaagatggtatatattgctatgtgcattgcgttacttaatcctctacgcattgaatgtacatatcactgggactactttcctaggttttgcaagaaatttacaggattatatcgtacaaattagttcaactcctgtaaaaatttcttcaagatcaccttccattttattttaaaggaggcttcttagtactacctccatattttaatgtatgacgtcgttgattttttgtccaacgtttgacccattcatcttagaaaaaaaattatataattatcatttattttattatgacttaattcgtcatcaaatgttctttaagcatgacataaatatttttatatttgcacaaaaattagggagtacatttttttggtgaccaaagagtataggaatgccgtattgataaaactaaggatcaaccacatttcctagtcaggattcagttggagaaaaatgtagacacacgaaccaaacgtagatcggacttgagcgggtgtgtgcgtatgacggggctatgtccaattatgctagtggagattacaataacttaaagtgttctaaaatcccgatggatagtggataaaactaagcttgtaacaatcatgcgaggacacaaataaataaattgataatattaaaaagaaggttgaaagaccaatgcaatgtaagatatagtttcataagaaatgtttatttagtgaataaagattatatatgtaaaaaatgtactatttaggatcttaagatgtttttaattaatccgatgttgcattctaagtccgataagttgcctctctttgggggggaaagagagataagaaagcgaagaagcgagtcaagttggctgctggttgaatacaggcgggcatgggcgacaacgatgcaaaacgaatatcttcaaaaccagtgaatgcaagggagcgattccctccgttaatttattccgataatatctaacatctcgatccaagttactgtcattttttgttttttgagctatctaacgatcgctaattcgctatatatgcatgtaggggcgctttgttctaatatgacccatcaatctatttctttcatctcttttatgtgttgcttaccagctataaatggctaagaggttcagtgttttgggttataagcttttttccctttctcaaaaagaaaaaaaaaacatgacaacgttagattctttctttctgtgatattaactgctactatgaactttatagtatatatgatatagcaataggttttatctctgtcggctgtggtattatatatgtactaagtgattccccgagttttgcttaaagaattcctaaatattttttttaacaaatgagctaaaaaatatattagttattaacaacaaataaaactgatttgtcaaactatgttcagagagaaatatatttagtacactctgtataagattgtagatgaaaaatgatatcccacactttggttatatatggatgaatatatgtttagtattataaaaatgatggatatatatgttaaaaatattataaaaaataatggaaggaagatgattggatattgatttgtagaattcaatgaataatagatgatgttacatgtttgcataagttttgtatgttactattgcttatggatgatgaggtagaatgtttgcatattgagctttagatttaggagtcctactccggtgctttctactcggagtagaaagtaatctaggccctttatcatatttaattatagggttaagatctagttctactcctaccagaattagtggaagtagaaatgtggaggggtgtttttgtccaagaaaaataattcgcgaaggggtattattgttttctgatccatagatcgatcaccatgtcatcctcgtcggagttggtcgtgcaagatcttaatcgatccatgtaatccatgaaacaacacagtgatcggaaatggcaagaagacgaatgagccgagacgacgccgccaagcaaatgacattgcgtgcgtgcgtgacactgccgccgaagcccaggccagaatttttactaccgccagaactcctgctcaagatcgtcgctcgctcggacgccaccacactcgtctgctcccagacggacgatgcgactgaggaagcagacaaggcggcaaaggcggggaatacggatggcgacggagggggcggacaaggcggcgaggccgggggaggaatagcgaggtgactgcgtgcaacggagttcggacctgatacgatgcgaacagaagaaaacatcccatgccaaaattacccctaaacgatattaggagattacttacctgccctttaaaataaacggtcaagattaattctacttggagtaaaatactgcaagtagattgcaccggagcattactctagatttagtgggttataactttgtagtaagataggactctactccctttatcccaaacttcacatccggtactagatttttatattttaggacagatcaagggagtaagtagtttctttaatcaacctatgattttgttgtttgcgcttattcgatgacctaccatgcctctgtgataattggttatagtttattttgaaacaaagtcggaatgaatcttattataaaaaaaattatatcataacggcatatgtataaatacttgtcaatgatataatgtaggagtacgttgttaacaccaaaagcacatgcatttcgttaatgaacaatcattagccaataataatcagctttcgacttgctgtaatcttcccaccaaacgtatctcaggtaggccatcctgaagccccctgaactacacttggcttaattctattcagagatagctaaagtgtgtttagtttccattagatagcgtgttaagggcccaataactttttcccaaaaccatcccattgaatctttggacatatgcatgtagtattaaatatagataaatttaaaaactaattgcacagttagaggaaaccgcgagacgaatcttttgagcctaattagttcatgattagccataagtgctacagtaacccacatttgctaatgatggattaattaggctcaaaatattcgtctagtggtttccaggcgagttatggaattagttttttcattcgtgtcccaaaacccctttcgacatctggtcaaacgtccgatgtgacacccaaaattttttttttcgcggaggccctaattccctgatggacgagcagcgatatgatggtacatcgatcaagcagaaacttgccacgtggacaaatgaacctgacatatgcatattggcttaattaattgattagttattttgttagattaagtgttgcatgctgacatgatatactgcaaaagtaatttcagaaaaagaaaatgatagtagtacccaaagaaggagacaggaaacaaccgaatggaaagtgccctttaatcaattattatttgtgttcgtcaactaaaactaattaagcaagccgtaagtagtactatatgagaatatatacaaaaagctacagcaaagttgagaattatttgagcaatgggtgcacttggtactgtatacattatggagcagcttcctcttttgggattttctttgcttttttattttctctgaaatcatccaggatccatccgatgcatgcatgaagctttcacgccacaaaattatactatccaataacgaaactaattaaaagatctagctagttaattagctactagcgccgaaagatcgaattgcatgtattgatcttcagttcatcctgaatctgtcaataaatccaaaggaaataattgtactactgatctgttagaaacttaattagaataaactgatttacatctatcgactagatacatatatacattgtttacagaacatggagctagctaggccggcttcaaagttcagattcttcagatatctcatctgaaaaaaggaattttcagtattcctggtcaggtgaaggacacgcaggggctgagctctgctttgcatgcatatgttcgtcaagaaaaagttgtattagtacttgtaatatacacgtgtcctgctcatagatttgtagacttctcacctgtcatctctgtacatggacacactactactgctactgctagctgatctatcctgtttcttctttactggaacttgcagctactagctaacactagtactctgctccattcatggtgtcatcgacatataatcagttcagattgattatgagcatgagcatggaaggttcttataaaataatcaaaaggtaattgctttctaagctactacaacttttgttattatggatcatgcatcatcctttgtgatatcctctctctttcctttagtctttagataacaatagataggagcatgatgttttggagacaatgtatatatgcagagcttaagcagcttagatagatatggccatggaaattcagatatgaagctgcagaaggaaggagacaggaggctggtagctgctgtgcgaaagccaatcacgagggccctagctaccataccataccactgcatgccaatgcaaagttcagcttcagatcggcgtcacagtcagagtatcacttggaaactgatacgtggcaatgcaagaacacgggttcagtacctgcaaatgcattgtgtttgtgacaatttgtggtgcagggttccttggcgatcttgatctcggttggtccctgaatgtataggtgctaggtctctttctcgaggcttttggcattgatctctgcatctgcatgttgacacatgtcttcttgagtgtcttctctttagtgaaacgggaaaccgagcagcatgcatatatgggtgtgatgttgaggaatgaggacgatggttcagatatgcaggttagaacaggtgcaatagcagactattagttagctataaacatattttaatgagataaaagatgagagagaagagcagcgagctacagatctatagccagctgcagcacgaactataagacgcaatgtgtgtatgacatatgggaccatatattaatattatagtaagcaactattgtatgacttagggcctgttcactttgatgccaaaaaaaaccttaccaaatttttggcattgtcaaaattttggcatagttaccaaaattttggcaacttacccgaattttggtaggatttcttatatagttactaaaatttgatagcaaactaaatgtagtcacttttttgacaactttactaaaatttggtaaggttgaaaatggcatcaaagtgaacaggtccttagctattagattggctatagatgaattggagctagtagtgggctatactattaaacttgctcttattgaaatgggacagtgcagaatggacaatgcaccaactgctgcagcaaacagaagagtgcatgaaattgcatacagattcagagatgcagacaaagcagatggagaggagatagatagtagtatgctttgtgggctggaatttctttttagcaataattggaggcccattcgattcacagaaactgttgcatatgcccccaactatgcatgctctttcagtcacctcttgcaacaggtaagcaaacacgccctaagcgaaaggtggctaattggcgcagctgcgctcacaatgtacacacgcttgtgcacccttgtactctcgtgtatttcctcagttccaaaacaaacggacagtgatatatcctaatactacgaatttgaatatgtgtgtcactactagaaaaaagatatttcatggcgtcaccctattattttctttggcggctatacgtaaaaaccgccagcaaaaacataacgaggggtgggaggctacggaccgccagcaaaaatagattttcgctggctgttagataaaacgagccaccagcgaaaatatagcatcttcgctggcagtgcacttaacacaccgctagtgaaatgtacaatcttctctggcggcaggtagcgtgggctgccagcgaaaaaagtgccgacgccagcgaaaaaatccaccctatttaaaatctatccatagctccaccacccaccctattaagaacacgcaagagatatttcctaacacattcactcctcaactccccctctcccgtctcctcttcctcaccacccactcacgtgcagagctcctctcagcaacgggaggctccacagctctcggcgacggcgaaggccacggcggcgacggtaggggggaggcggcagatctgacgatggcggcgacgacgacgtccgcgaccgccaggtgggcggcggcggcgacgccaggtgggcggcggcagcgacgacaaccccaaccgtggcggcgacgacgacgacgctgctgctcccctcccctccccccaaccgaggcggcgacgacgaccccaaccgaggcggctcctcacctcccctctccctctcccagatctaccctcgggggtgaggggggagggggcggcggcacgagaacaaccgtgacgacgacgaccgtgaccgcggcgacgacgacaacgacgacgacactgcgcgctggccgggagtgcggatctggcggctccttcccttccctccttttccctctcccagatctagctagaggggacgaccgcggcgacggcaggtgggcggcggccgatctgacgacggcggcgacgacgacggccacgaccgtggcgacggcaggtgggcggcggcggcggatctgaccgcagtggcgacaacgacgaccctaaccatggcagcgacgacgacgacgctgccgctaccggcggctcgatgcgtggccggtggttgtgatattgatttttgcatgttgaatgcttgttgaaaatgtggtgaaaattgatgtattgttctctgtatgtggatttgagtatggatctgatatcgatttgatttgattttgattttggattgaaaaaatgcagctgctcaggatgtcgattgcttttttttattgggaaaaaatcttttcgctggcggttctcttaagggtccgcctgcgaaaagcgaaaatagattttcacaagcggttctcttaagggtccgcttgcaaaaatagattttcgcaagcggttatattaagggtccgcttgtgaaaatatattttcgccggtcctcttaagcgtccgcctgcgaaaatcgattatcgcaagcggattgcaaccgccagcgaaaatattagatcttcactagcctttactttgtggcggctcggaataccgccagcgaaaacccaaaatgactgccacgaaaaatggttttcctagtagtgtgttcagattcatatatcacatcatgcattatattggtttgttttgggacggagggagtagatcactcatgaaccaaaataggcatgcatgatgtttaaagcatttttttattaagcggtttagaataggttaaaatttataagttgttaaaattttctatttgaaagttatttttggattatttttttaaaaataatagttttaagtcatttttaatacttattaattcaagtaagaattttgcaataaaccttttcaactgaaatttttattttagatctggaattcttacaatcaaatttaggatactatgtataatattgacactaagtatgagttatgactcagatatataaggcctcaaaagtaccaattaacctagacgatcgaagttaaatgaaggcgcaaacgggacttgtaatattgtcaaacaactcaagcgatgaacatgcacatgtgtcaaaagggtcgaaatgtcgatattaaggtttgttcgtatcgacgacttaaacttccgtacgacgtcgaaagattaatttgaagattcaaataagcagaaactaagcatttttctagatggatcaaggaggatagggacaaataaaataaatactatcaactttatagtatacacagagtactcgaattaataattaatctatgaaatgtatagtcatgcgatcgatagacaatatattcaacgttgtactcgaatgcgttaatggtggttgtgccaaaccagattaacgtaaaacagcccggatcaaaagagttgaaaagctaaaatttcttaaaaacgcaatcaattgtgctcaaggacaattaatttaaatcggcgggcaaaaaggtccagattaatgcattgcagagtgcttcttgtagtactttgttgcatcgcgaatattaattaacttaggaaactaaatcgatcgtattcacagtttgaaattaatttgtatacgcaaagcatctcattcattcgccaaactgtttttatcttctccgttttggatagacgatgaggacttatagcacgtacgaacatattctctgatcttggcatgcatgcgcctacgtacaaccttggtttttttactgcacatatcatcgagaattttttactgcacgtactgcacattttttactgctccgttcttaaatataaatatttttaaattatttaacaaagattaataaacaaaaaaaatatttttcagtcgtcttattagttaatttttaaattgcttatattcccttcttaaatactaactagtctgaaaatgtttgaattccccttattaaaagtcggtgttccaaaaatggttatatcatgtcaaattttttgaaggatatgaaataaatccgacctttatatctaacttgatgtgcatggtcaatattatgtttatgtacaactttttttttgctaaaagcttaaaagtatttgtattcggtggagtagcaaagatggattcatatcctacacatgttataccagtacgtgacaacaatattgtcatcacgtcatatagtatagtatatggccgagtttctcacgctaaatcatgcaaatatacatacacacatatagtcagtggtggccacaagctgtagtgtgacgtgcacgttggtccaataatagttataacctggaacggatggagcattaaaatcggtgctccagaaatacttatgtacaaattctttttaaggatataaaatgaaataaacccgacctctatatctaaccgatatacacggtcaatattatgtacaaccttttttaaaaactttaaaagtatttgtattcggtggagtaggaaagatggattcatatactacatgttataccagtgacaacaatattgtcacgtcatatacatacatagagccgagttgctgacgcttaaaacatgcaaatatattgtatatacacataatatgtagtcagtggtggccacaagctgtactgcgacgtgcacgttggtccagtaatggtttatgcttgttgcatatgcatatgtgccaaattgttgccggccgttgtacgcacgtgactgacttttgtagtctgaacgtacacgaaccggccggatcctatattgctcaagccttttcttttctaccatgcatagctggcttggaaattaactgaccggccggtctcccattaaccaatcaacgacttgtgcagttgatttggtccaaaacagagtaaattttttaagttataatttatctatttttactatatgtgcacctcctcagtgtaaacttaagcacccacgtcagcttaaatttggtccaaaacagagtaaagcaaagcatgtggcaccctctctatttcactctagcttcacccctagcagttgttctctggagtagctggtcatataattcgcttataaaagatggatgagatagtgtgctactgttaacttcttcttcttcttcttctttttttgggagaaagggagagcacctcccccgttttcattaacgaaaacgcaacgattacagaagttccagagtaattcaccgcaaaagcaaaggaaaatagaaaacgattatagtgtgcaattgttttataacttcttgatgtagtaatattgttttcgtttcattgtttttctttgagcaagtcgaattagagtcgtatggtagtttggagtctaagtactcgtttatgtcaaacattggttttgtctctctatgtgtaaggagatgaatgttgagtctagaaactcttgtatgtttggttggttgtgtacatccgtttggatgtaggctggtttaatccattatctaaaaaaaatagggaccgcacaaatatataactttgtaaggtttttctttcttttgccatgtacatcctggttgaatgtaaaagtcacgttttaattaatccattataacaaaaaaaatactaaccttgtaatctgaaagtacgatcataactatgtataagtaagtactctaagagtggatcctgaaaagaaattacggtttactagtgtttcggtatcaagatacattagtttcactcggtaaatagtatcactttcattcagttagttatggattttactagagatcgtcgtactgtcgaggcttgttgaccccgctgaatgtaccgtagctccaccgatgtgtaacacatagcgcaaagtgttctactagtcgatttgatcatctccatcgacattacttgagaaacgcccaggggtcttctggctagctccataagttgatgggctagacaacctaggttcaaagcctcacccttctaattatttgatattaggttattccctgatattcgcttccatcgacattacttgtcttggtataagtacacgctaggtaaagtctctatatggcctatgcgtacatatgcagagatgcacgtcatgatctcgatcgtactgatgattcagtgagacactctagaaactagatatatttgcattaaagatttagatatatttcagatatgatcaatatcaagtcataaatacagcaggattttactcttgccttgaccaacatccaatgagatcatcacgaaacaaacacgcccacaacaaagggtggctttaaatcacaaatagaaataaaccacaaacgacacgatctgtagaagtacatcaaacatagcctattacgcatacctaataagtatttatatctatcaacacgtgcgtaaaatcataccttagatagatcacatctttctataatttgttgtcacgtcgcatcctctttgggggcaccgctttggagaaacctcttcgtgcaaggatattgtcattggtctatgcattggcttcgaactttagtcctaggcctggacgaggccttctagctccacattttgttttgcttttctcagtttgggtcatctcttctcttgtttgatgtgttcaacttgtcttcgaactacactctcttctggagtggatctttgtaataattggctatagttctttttgagcaaaggccgggatattatattccattatctaaaaaaatattttgtagtcactaaaaaggaacacaattgatttttcctcccactctaaaaacctcaaaaaataacacccgcgttgtctctcgctggcagcagtgcctatgagactatctcagaaggtaacgggcagccaccgacaaagcgggcccacaccaccctcacgttgggcccacgtgtaggtagcccccatacacgtggcgcgtcgtggaccgtacgcgtggcacatttccccccgcgtggaccgcgcagatgattccgatcgctcgcgtcagaggagtcaacagcgccgtttcgtcgtcgtcggctttaaatacccccgcgccaccaccaccgcttcctcctccacgccattactgctcctcaaacgagaccaagaaatcaatcgttccagcgaagaagaagaagaagaaggaggaatccatggcggcgaggacggtggcggtggcggcggcgctcgccgtgctgctgattttcgccgcctcgtcggcgaccgtggccatggccggccggccaacgcctacgacgtctctcgacgaggtacgtatatatacgcgatctcctcgacctcatctcgtccttctcgttcatcatggatggatgcatgttcgatctgatcgatgattgagaatgaatgaatgaatctgcaggaagcggctcaggcggcggcgcagtcggagatcggcggcgggtgcaaggaaggggaaggggaggaggagtgcctcgcgaggaggacgctgacggcgcacaccgattacatctacacccagcagcatcacaactaattaatcttatcgatcaatcaataatcaatcaatcaatcagtcgcttcctcttcgatctaccaatactagtattggtatataattaaaactgcaaatccgtcatgcatgcatggtatgcccatcgatccatccatgattatctctagttagatgtagtaacaaactgcatgcgcgtgttgtgctcatcagtgttaattttggccgcccccctgttgataaacagttcttgatcgatgagagctagctttcgttttgttttgatttgttggttggttggttgatttgagagttgagacagatcgatctctgcttgaatggtacctgtcccaatttcagactttcagattctaattacaacgcttctgattgatgagatgctttgaaacgtaaattacgtacagtggcatgcttggatagatcgacgaggaaaatccaactgtgtactgcatggttgaacatgtcaaatttggaccatcggtttcgaggaatcatgacagagcagtactactacagtagtaccaggaatttcgcagcatcttttgcaattgattctttaccatgattggactaatttcgattcgcactaggctttactccattccattccaatttggttcttggccaattgctatgtaattttattttttttaagataatgagttgctatggccgagtttatttctaaactttttcttcaaactttcaatttttctatcacattattctaattttagcgtgaactaaacacaccttatataatttctacccctatgtagatcgcacacttactttccacccctatgtagatcacagacttactgccttatgacttcgagagattagcgtatgtggaccccatgattagcggactcatcttagaggatcgtatgtctgggagtccattcgcaatgatttggctattctagcccatttccactctcaagtacaggtgcaactagtgggtcgactcacgattcacaatcccaattatatgccaataaatacccaaaagtatatttctaaaattttgtttttgaaattcctaatttgattctaatatgtagatagatttttatcaccaagagatgtcttaaattaagtcccaacaataaaaagtgtacctaccctaactaacagaaaaaacaaatcgctctgcccatcccctcgtcacgtgcccacgtccaatcctcttgtcacgtgttgccctctccttttatatatggaaattgggagcgagagtatctcctgacatgtggagaggacagagaaggaaaaatagattccaatttttgaatacataccaagagaactgtaggagtaagttttcacaaaagaaaacccaactcactcggggacattgttgatcatgctctaagtgtgttcacgggtagattcacttgaaccactacctaaaagtctcaacttacagcaccaattgtttcccagactgcaacaaaacaaagcaaaaataaagtctttgtgggacggagggagtagtatatagagacaacacgtatatataagcttgtaggtttttttttttgcgccatgtagatacttgttgagtgtagaggccacgttttaattaatccattataaaaaatttataacctttgtaatttgaaagtatgatcgtaactatgtaagtaagtactctaaaagtggatcctgtaaaaaaattacgatttactggtgcatcggtatcaggatacattagtttcactcggtaaatagtatcactttcattctgttagttatggatttccctagagatcattgtattgtgtctaactctaaaacttcttatattctgggacaaagggagtactatcatggtatttatgtctgcatgtacttaattaatttctacccctatatagatcacaaacttagtgtcccttgactttaagaaattaataagttgtgggccccacgactagcggactcatgtatgttagggagtccctttgcaacaatttggctattctagtccatttccactctcaagtaagggtgcaactagtgggtcaactcacgattcacaaaccccacctataggccaacaaacataaaaaaaatctatctctaaaattttgtttttgaaattcctaatttgattttaatatgtagatagatttttacatccaacggatatcttaagttaagttccaataataaaatgtggacccgcatctaactaaccgaaaaacaaatcgctccgcccatccccttcccatgcactatcctcttcccgcgtatctagatatgcattcaaaaataatggattccaatctttgaatgcatatctagagattgggagcgagagcatctcctgacgtgtcgagaggagaaagaaggaaaaatggattccaatttttgatgtatatctagagatctgtaggagtaatttttcataaaagaaactctaattttaaaattgggtttcacttagggatattgttgatcatgctctaagtgggttcacgggtggactcacttaaccactacctgagagagtctcaacttacagcgccaactgtttcccagcctgcaacaaaacaaagcgaaaaacaaaaccatttcaaaatactaatgtacggccatttataaagcatgatatcagatgctccaattactcacaagtaaacaagtctcttgcagagttgcagtactactctgctgatgcaggccgggtcaccggcactacatattctggatggatgcctgaaacagtaggaccggcagcggcgacctcgctgacaagatcatcagcttcaaataactcaaaaggagtttttgtacaatagctaactctgccattagattctggccaaatgaactccatgacaagaagagccattgacattgctcatacccagaagaggtcacactgctgttgcaatataattcagtatagtattacatgacgttgacgacacactgcctgcttagatacgtagtatatatacatacatgcagataagcattggattggattgattgcctcctgtgctacacttgcttgtctaatttattaatccgatgcttacatgttcatgtctcaatcagacttgttcctttttcctgctgcaccaaaaggaattattgatattattatcatcaacctgggtgttagcttccgtacgtcgtctaaattgtaagggattgtcaagtcagattagaagcatcgtctgtaagagagattgttagtttgtaattgattgcacgagccatcggattacctgcatgacagtgacaatggagatgacttgactacttgtgcgtgtgatggccgtatccggtctctagaacggcacacatccatttttccatagcaactcaagaactgcagcttggtggatgaaagattgatcttgacctgcatccaccttcccttatctctgactgatactcccaacacttgtgcggatcatgacagcctgcatgagacacaacggcacagctgatgggtatgcaggtaggaacaggcaacctggttcatccaaggtttatgaaagaaaatgcaaatggcactatggcagtcaaacaatcttttattttgaaaatgaggttggtactgtacaatttcttgcaaaccgaaatgtagggtctgaagttgaggagcatcattacctgtagctagcctgtcgattctgcacggatttggtgttctagagaatggcgcggacctgaaataaaaaaagccagcatagaaaacgacatgccaatctgtgttcaaggattcaaacctgatttgagaaaattctgaagctctccaaatttgacatagcaatcagttgtaggataggttccaacacctctgaaagttctttgctaacctgcagccactagaattttcaatgcatcagttcacgtagttggacaatacaatttgaaaacatgacatgtttggcaccttgctggctgttactccacaactcagcaacaaactgacagatgcgatctagattctagaagactgagaaaagcaatacgaattagatgcagctcagagaggagggaaagaaatgtaagtgtgaaactaatttggaatcggaaagcagagctctctgtcaatcatgtgcccgcagcaaacattaactcaagcttctaaggaaagaagtccactctaacaatttaaaaaagaaatgatgcactccaaaaggttctctaggttcattccagttcaagaaacctgttaccgctacaaaatcaggtttggcatgaacttccagaaatccaaaccaagggccatgacttagggtgtgttctttagtcaaggtttccaactttacctccatcattttccacgcaaacggtgcattttttgccaaaaaaataattctatagtaaagttactttaaaaaatcatattaatccatttttaagttcttttaagctaacacttaactaatcatgtgctaatctgctgctccatttccgtgtgtggatgattagctcccaacctacactaaacacagccttagagaaacataaacagatgtagtgaattagtatggagctgtacaacaattacaaattgcaacagataaaaaatgttaaaaggggcctcaagcccaactcacctagccgaaaatacagtagtatattcctcaataaaaagcagagataaatccaggaagtactaacacatatgactcactgtcaagcaagctgtaagttttggccaaaaagggaagagttacaacctagtgtaaaaaaaaggaaggataataagttacaaacttccattacaatacattgtctatgcaatccacatcagctgaacaagcaatcaaatgacagatgatgtactgaattaggtctgaccaactaaaacaattgccatctcttcactttcactcgaatagtttgctgatctatgcagattatacgtagctaaatgagaagtggggacagttaacaataatatgctcagcagcagttgagcgaaacataaactagcctatctcaagcatcatacacaatatagtcaaacacaactaaacatgtttgtgcaaaagaaaatacatctcaccaaaagatatcagcaataatacaagcaaagttactctttcagaaattttattagctgtatgaaggtcagaattgttacataacgttatcaactgaatcctctctgctccccgtactcccttttacatttacagcttcagtatatcctatactccattttttctgtacacaacaatagatgaaaatcttacagccataaacatcataactgatcaacagaagcaggctcaggccgggtcatgagccatgcgccgttcaacaaatgcaagcacaatgctatgcagattgcagcgataaccatggacctttcgctcatgtgcctcaaggcacacaatccagccccaatcgcggcatcacccccagccctcgcgccttcatgaagtctccacatcacaaagtcgagaaacgatcgcactgcctcaaatgttgccctcccagtcaaatccagcacgagcctccggttgctcggcaccgcaagcacggtcgacaccgtctccacccatccttccccatccccaccattgccactaccactaccactaccattgttactaccattttgattggaattggcattggggttagggttagatagtacactatgggatgtttttaccagtgtctccatggaggcattgcagagtgcgacgagaagctgctgtagcctggcgccataggaggggttcgtggcggcggcgaagagctggtcgtaggtgttgatgtggatggtcttgtctatgaacacccccacggcggtggccgtgaagacctcgacccagctgcggatcgctctccggcaactcccggtggtgaccacatcgacccagctcggcgacgacgagcccgacgaaggatcggacggggcggagtagtaggcgagcacgagctggctcccgaagctgccggcgacggccgacgcgaggcgctcgccggaaggggataggatcctgtcgagcaggcggtccgagaaggccgcctcgtcaccggaggaggaggcggcggcggcggtggcgtaaccgcggatcacgccggtggtgagggccccggagagcgcggaggcggaggcggaggcctcgggagaggaagcgagcttggagagctgcctgaccgtgggggggatggagtcggagtcggagcggaggaaggcggcgaggtcggaggccacgtcggcgacggcgtcggcgagggacgcgagggcggaggcgacgcgggcgatgcggcggcgccgcgcggcgacggccgggtggtggtataccaggtaggcccccgcggaggcgcctgcccacgcgagccagcggcggcggcggcgggagaaggcgagaaggcggtccatggcgcggcggcggcggcggccggagttgggtttcggatggggaactctgctcaagggctccatgagtacgtggcgtgtggtgatgggtagctcgcattttcttttttttcttttttattttttagagggatagtagactcgcaaattggatcgtggaaaataaatttggatccaatttggcccaatacaaacttctattattccatttaggcccatcttggtgggcccattcgagtttttaaagtctagaacgaaatttgcaaagtggttaggccgaattttgaccgcacacggggatttcgtacctaatttggcccgtgacagtttagagtagtgacagatgagaagtgtatctaatccaattcggcccgtccatttttggattcttaataagagtatttgtaatttttaatagtactcattccaaaataaataaataaatagtactattctgtatgcaatttttgtcaagcactgtataggagtatgagatggcaagagatcgggttaaacacatcatgcactaagatgtacacgtggacgcaggggattggtttggtgaacgcatcaacagagatggataatgcaagtgggttctgtgggtggatggcagctgcagctagtaaagtctccgtcactatctgctttgtcaacttaatctcttcttcttttgtgcatggaacaacgcgtggattcattcagtatactggttcgtacactgaagtttgtagtatattttttgcagtattcaacggaagatacacatcatcatcatccatgcgagagattttcttattcttctttttttccgagatatgtatgtgccaaaagtcaaaaacagtttcgagttgttctgttgtttccgatggatttttgttgtttcctcgattagctagtttagccggtgcgcagcaatccacttctgaatctgacagacatgttcgtggtttctgaatgagaatgaaaaaaaaaaagaaacataatgctttatgcttaatgttgaagggtctgacataacataagcctgcaattttctcctctccgtaactccgttactgcaggcaggttcaaaccctctagatggagtagtaatttgtgtgcgaaaatgcagtagaaatgacggtaattagtgcacgattagtcaatcgaatcagcagtattaacggcaggcgatcgatcgccatgtccgaggtgagcggcagcgacgacgaagggcttgttttggagtcccgagccggccgcccggcggcagcgtaggcagatggtcggccggcagagtcaaaacaaaagatctcgccaacaggaaggttaaactttggaatttatctatcactcgtaaacctcgaaaacacaatgcctctgaataagcgagcgaaattagacagccagtcaggcaggtccagattccagcaacgccgcatttacacgggaccagcaatttgagctctttgttttatcgtctctgacagcgtcttccaaaccaagaaaaaaatgcatgttaaggtcaggtcaggccaggagagatgagcagtttatcattttgcatcagactcaacagctcaccagttatcaacatccacaataacgctactagtagtggagttacctgctaagtgtccatcagaaccagatagctactaagagtcctgctccctcaattctaaaaatataagagacaactaccattgatccaaagataaagaaataattattatcatcttattgttataagtataaaacctgtttaaattgtagccaaaataaaccttaccaaatttttgcaataccaaaattttagtaagataccaaaattttggcaggatttcttatgtatttagcaaatttagtaacaactaaacgtagacatttttttataactttaccaagaaaatggtatggttgaaaatgacatcaacgtaaaccgaaccataatgtatggatccaataaaatttagatttaaagataaatgataaaaataataatttagtgaagataagatgctagttaattgattatacgcatacatgtttttattgtagttatgccttatatattttgggatggagggtgtctgttcaggttaagattgaacccacttagagcaggtacaatagcaggctataagccagctgcaaacatattttaaggagataaataaagagagagaagagcagcgggctacagatttgtagccagctgtagcacggactccaagacgcagtgtgtgcatgacaggtgggaccaggtattaatagtgtagtatataactattgtatggatgagctattagattggctatagatgaattggagttagtagttggctatactattatacttactcctactataagcttatgtgaaagagagatgtaacaaaaagttaaggggtgttggctctcatgcaagagctagcttaacacaagctccaagacaaatacaattaatgtataagtgagagatagagagaggagaagaaaattgtagccaaccttataactaatttattatatgtgttggctttaagattaattaatagtaagaagtgagtcctattattatccctgctctcagtgactgacaggcagctcaaccacatcgattcgccacgcagcaacaccacttgcaccaccgcccctcgtctcagctcatctcctcgtcaaacttcgctttccccaaagtcttcctcttccctcctctctctctctctcccccatctccatgccgccataagtatcagcagcatcgcacccggaatcggaatccccaaacccaaccccatcaccccccaacaacaagagatcatcgaagccccaacaagtcgcatgacatccatggcgacgccgccgcccaagaccctcctcctgctcgtcctcgcgctatccgtcatcctcgtctcggccaccgcgttccaccaccaccaccaccacgacggaggagccgaagctggaggaggaggaggagggggaggcgggttcttcgaggtgccgtggttcggcccgccggggggaggcgggtggggggcgtggggagccggctacggcggcgccggaggacacgagatggcgcggccgtcgacggtgtgcatggagaagggcgcctgctacaagaagcggctcacctgcccggaaaagtgcttcaagtccttcagcttcaaggacaagcacggcggcggcggcggcggcggcggcgggtgcagcttcgattgcaacaagtgcgaggccacctgctaattaatcaaaccgaatgatccatggatggcgaagaatcgatggccctctctactgaaactgatggatgtgtatggtatggggtgttgaattaatcgtcagttattagagttttgttaattagctacttactgaatggaatggaatgtaatgaaatatattttggtgagctgcgagagtctgtaagtattcaggtgtgtgtgtggtgttcttgatgataatgatgaataaaacgagaggaattcatcgattctttgaccgtatgaatttgatttgagctgagctgagcagcaatagtagtagcgaactttaacgatcagcacttcgtctcttcttcttgtccttcacatcgtccgtagaattgtcaagcagtccatagtgaaggaattttttttcctacttattactggtacaggattaaattgttttccaacaaaaataaatcttccaatccaaagagcctcttaatcaaaatctacgagaaggttgatgctgagccgactgatacattagttcggtttgccggactgattacaggcggagatgatttcgacgtagaactaccagctgctctcgttgatttccctatcaaaaatgaaaccagctagtttttctttttttaaaaaaacacgcttcaagaagtttcatttcgttgcagagtcaaatcaacaacaacaatgagaagaagaaaatgcatgaattccgtcaccaagttaaagttggagctgatgtgaacagaatgaaaatgtgtagtcaaagatggatagttgagctgggccaacagcccatccatagcctaggccagcccatcacttgctctggattttggtacgtttgccttccgtgggcttctcatgtggatagatgggtcatgggcgcggccgcgcgggctgggctaatggatttggagttggttcacttttcaattgggccaggccctccaggaaaatttgctggattactttcaactgggcagccctattagtagttgggccgccttcccccatttgtcatgctcattatctcatcaagaaatggttgggtttatgtctttcatgacgagattagtcatggatatttttctcttctctcaatacagcttgtttggttcacagaggtgagagagtgcatttcattagttcagagtacatactgtcctgttcttttctgattaagatccagattttatctcggtcttaattagtacacttttcaaactactaacaatagattttttacgaaaactttatatatagaagttgctttaaaatatcaaatatatctatttatcaagtttttaataattgaatttaattaatcatgcgctaatgattttcccgttttacgtacgtcaacttaatctttgtaataaaagattcagtattttgtgcagtgtgttcgttctactagcatcttcatggaaggagggggaaaaaggaacaccttccatctacacacacacacacacacacacacacacacacacacacacacacacacacacacacacacatatatatatatatatatatatatatatatatatatatatatatatatatcccaattgtcgtctgtcctgttctgaatatttttcttgttattatcttggtcgtatgctggaaaacatgctgttttatcgcacgttgatcccatgggatgccggcatcatatgatcacacgacttttcacctttcctcgacctcctgaagcctccaaaccaaagaacaaattacgacaaaccaggcaaaaaaaaaaaaaaaccacacaccaaactatctcaactctgaaagtctgaacttctgaagtccaaaaccgaaagtctgactgataacacgcacgaattaatgattccgagaagaaagaaagactcttactaatccaatgggggatagatggcgatgctaactaaaaatacgccaaaatttcttccctctaccgacggctcgtgtctgacttgctgaccggtgaaaattcggcgtaaaaatcctaaaccttttgcccatctcgcgtatgttgaaagcatctgtttttctatattttaatcttaatctaatcagttgccgtcacttgtcagtcatcaggatcgcgtgttctgactatccatttggggatttcttttttcttcccaattttgtttgtctcctctgtccacgaatataaaactatttttcaaaacagtgataagttaaatatttttaaatttaatcgttaatataaaagtcataaatactaacgatgtaaaaatgatattatgtagatttatccttaaaaaaaaaccatcataatatacaactctaatacgttttagaggtattattggtcaaggtagcacattggatatcgcattgatatctaaaatgcttataattatgtaagaagatggtagatgtatatttaatgaaaagtcatcttcctccttggtccaaaatagtatctccatcccaaaatatatgatgccgtggatttatcgtataacgtttaactatttattttattattaaaataatatataaaaattatttattttattgtgacatgttttatcactgaagaaactataaattaacttataattttatatatttatattaatttttaaaataagacaaatgatcaaacattatgaaaaaagttaatggtgtcatgcatttcgaaatgaagataatacttgtgaagtttcaagcagccactgattggtacctacatattctcaattttgttaaagtttaatcagcttatcagcatgggcaattaccaacgtgacagattaccaaaaactatactaggaccaatgaccattgaagtaaatcaacgcgtgcttttgttcgaagacttttctgtagatgcacgtggatttgcatgggagatatatgttgctgctgttgttttctgatcagaatttcagaaccgtatgtcctaaaaaaattcagaacccgtattgtggcctggatgggccaggagatgaggagatgatggagatatctcatgttccaacgaccatagaacagaacgatgatactctctccgttttaaaatatttaacacctttgactttttagcacatatttgactattcgtcttattaaaaaaattcatgaaatatgtaaaacttatctgcacgtgaaagtatatttaacaatgaatcaaatgatatgaaaagaataaataattacttaattttttaaataaaacgaatggtaaaaacgtactaaaaagtcaacggtgtcaaacattttgaaacggagggagtattatacataactgtttcatgctgctactgctgttgttatctataactcatcgctgaattaattgtcatggatggttccatgatgtaagtgggcaagtccacgaacccacctataatataaataaacagtaacctgtctagttatctactaatttactctatcccaaaatataagagattttgaagggatgtgacacattctattaacacgaatgtcacattctttaaaatctcttatattacagaacaaatagagtatattataagtggattcgtgaacctgcctgcttgcacctggttcacagccccatccttttatccattgctggttataagccatgaatccatgatgcatattagttcttaacaacttaaaatccaatcaaaatccaaggatgaaaagtaaagtaaaagaacaataaaatgatctttaaaattatgatttaaaatttaattctaattgcggtagatataaacaggagagcaacgatggagtcgttccaatctgatagtgtttgcataaaggaagagagataaacgtcaggaaatttaattaagagcgattagtcgtcattgccactcatgattatataattaagaacggtttgagcgtgtgatcactaaaagagagccagccaggccatacatacgtcaagcatttttgcttggacaagtcaataatacctaattattttaaccaagaaaagctgataacaatatcatactccatatttcatctatttggtactgggaccgagtgatacgtggtagcagtagcacacactaatttagtaatttttagtatgatcggaaacgtcactctgtttctcctacgcaattaggtatatttaacccaaagatttagctctctctctctctctctctctctctatatatatatatatatatatatatatatatatatatatatatatatatatatatctaagcttatcgatctattgattgcgtgctcatctatattagccctatacacgaatgaatgagaagttgagaacagcgcaaaaaaaaaaaacatccaccttattagtcaatagctaaatttatgatacttataacacattggaggaaaacattgttagttgccaccgacgaattaaagtcgaattccacaaacatgatcttaaccaacaaatcaaatttcttccataatgatggtagtatgattatgtcaaacatgatctcaactgacaaatcaattttcttcccaaatgatagtagtacttatcaccatttcagttagttaattaacagttattagtcaactgatggtgccatgtcatacggtgagttctcatttcccccgtggtgattagtgattagattgaacggatttctcccctatttgctcggagttacggtgatgatccgaatgtattggagccatgcatgccgtggcctttgatgcatgtagatccagctatatacggataagattttaaaaaaaacccaatgcatttttccttttaccattcatttcggcgaaccattgttctgtcgatccatcggtatcctggtcaattggcaagttgacgaaatgccccatgagcttaatttgctggttggtttatcagatacatccaaattcaaatgtaaaacttaaatttattttgagttggttttgagatttttttcattgtaatttatttttagcactggtttttaaatcactaagaaaacaacccattttgatgaattcgtttattttgtcccacaaaactaatagcactatccactttgaacaaacaagatttatttaattatgaccattcgctaatccggccaagacctttctctcttctctccctctataaaaagcctcttcctcatttcctcttccatttcttctcctacttgttggcttctatctcctgttaattaatttctcaagattagtagtaaaagggtagggtattagtggcgtgattaatttggcgggagcagcgatgagaagtggcgggagcggcggcggcggcggcggcaagctggtgagctggctatggcgggcgccgcgccgggcgctgtgccgcgcgcgggacttctacgtgcggagcatcaccggctgcgccggccacctcccgccggacgccgccttcggctacggctacccgacgttcgccgccccgacgacgccgaccatgtcgaggaacagcagcttcgcctcctcccgctactccgccggcggcggcggcgacgacgacatgcgcgagctcgtccgcgccgcgtcgcagaggctggcggcggagcgcgccgccgcggccgcggagccggcgaccgtgccgcggagccagagcgtggccatggcgaggatcgacgaggaccggccgtgcgagttcgccggagttgggctggtgttcccccggagccagagctgcgccgtgggcgccggccgcgtcggtgggcggagggggagggtagctgccgtggcatgaaccaccgccgccgatcgccgccggcgattcttgcgtgcggtgaggcgtagaacgaaagcgaaggacacgaacacacgacgtgttcttgttcaaatttcgatgttttctttttcttctgctccaaaatttgcagctgcgatctgtaattcttgttgtttgccactattgatcttcatttttttatattgttcttgttcatctgtaaacatcccattaagaagaacagaattaaattactcgtttggttggcttggtcgaccgaggtaaaaaactgagaggatttttaaggtgattttcaccctaggcgagatggattcaaagatatatcagatatctttgaatttcgggtgaattttcaagctagggagatagattcgaagatatctgcatcagaaatcttgaggtagatttcgtcggcagcccatgcgatcctatccttgtgtcgattggtgttgaataattcatctggagtagtatgcggagtcaaatcccgttttaaccagtcaacggtacaccaaccattcggaaaccgaaatggtgaaagctctgtcactattttgttctctattatccaatgcaggattatctttaattttttgtttgagatgtaacggttgcttgaaggaacgtatcaaaacaaagggcctcatcggttgccctatagtttataagccaaagccaaaatttaaattttaaaacttgattttgaatttgattttaatgttttttcaacatagtttttttcaactttggcttttcaatcactaagaacatacatacaaaagttttactcacatatcattttttaatcgctaataagccgttatggcttataataagatgcgggcaaccgatggggaccaaaggattggaatatctaagaaaatttcttatacacgccttatagagcattttgagattatcaaattcctatggattaatttcttaattcttatgccccaaatgacacttctccttttgtctctctacttcctctctcgtatccaccaaattcctgtgcatttttatatctccatgagatttggtagcgcgtgacattgtaacacgcgtgtttttgtaatttagagtatgaccaacaacttacttattctattctatatcctcagatttaaatcgcatccaacagaatcttccaataatccaggttcccaactccgggtattgcgagatgaaggaggagttggccacgcggtgcgcgcatagggatcagggtattgcgagatgaaggagaagctggccacgcggtgcgcgcataaggagcagcagaaaaaactaattttctctgttggtagttaaagggagggaggggttactgattagttttctcacttcctatattcattttagaagcttaaaaaaacatagctttgggatttgattattgtcaatctcttggtgatgctcttagaatattgcgttccaaaggagtactagattttctttaaaaggaatcacatagaacacaccacctatatatacctagccctaccatatttttaaactaagtaaaagtcactaagtttcaatttttcaaaattttcttcgaacttaaccataaacatcaaacttctacaccacaactattcttactgttgggcttggcccagccgcgccgaacactgtcgcaaaaccacgaagctgaagcctagttgggccggaaaggaatatccaagaagtgttggtccgaaacgtggcagcaagaaacattttggcccatttgagagcccacaagctatccggcccatcttctataagaacgaaacgatgataccatcgtgtcagtctcgactcgtcggctcgcctcctcccttcgccgtcgccgatctctctctccgcctcgcctcctccgccgcgcgccgcccgtacgacggcgccgccgcctccatggcgcagtaccacctcagcgcgcagctacgcggccacgaggatgacgtaagcgtcccctcctccctccctcccgcacctctcggcgtcgcttctcgcctcgtctccgctttgcttctcccgcaagtctgcgcgattccgccgtcgttccccgatccgagcgctcgccggtggggggctcgggtccgctcgcggacgccgcgggctgcggtatcgatctgctatagtagggcgatggcgcgttttgttgcggggacggcggtgctgcttgcggctccgaattgggggtagctcgacctagcttggttgcgctcgctgttctagctctcgcgctctcctcctgtttgttcggtgccttacttgggttcgtagatttcaaacgctcgtgcattgctagtttagtttagttcggtcggcaagcttgcttagtgtcagagccaactgctgttttgattgctagttcggtcggcaagttctacccaatctatcgcatgtgaattcactgtgttactgtggattttgggggtttagtggagggttatcgtggatgtcctcgccagtgattattgtactttgggtaattagtagattggtgaactcgtgagtgatcagttgcttggtctcaaatttgatgtgattctcttcatttcgtatcacagtagaacttcctgttccctgctccacccgatctcagtaattcagtcccatccagaatgttccttgtcaatttgacaacattttcgtcctttttttttcattacaaagcatgttttgttatgcatgtctgtgcctgtagaatgcgtatcttatatgacatgagctaattgcagcttttctttgtgcgatcctcaggtttttcaatttcagcgcaatatagttcaattatgcttattgtgcccttccacattaacaacacattcttctaattttacatttgcaagcacacttgtttcatggtctgcttattgcgatttactcctcaacaggttcgtggcatttgtatctgtggggatgctgggattgcaacatcctcaagagaccggacagtgagattctggacacagcacccagaaaagaagcatgaatacgttctctcgaagactcttgttggacattccagttttgtgggaccattggcttggatccctccttcagaccgctttcctgaaggaggacttgtttctggtggaatggatactcttgttttgctctgggatttgcataaaggagaggttgttgagactatgaagggtcacacttcacaagttactggacttgctgtagacaacaatggcgacatcatctcttcatccatggattggtaggttttctctgagaaatcaatataattctatgctgctttcttatatggcttggttctgtttctgcttgctaattactatcctatgctaatttcattaaaaaaatgtatgttgtcaatggcataatgtaacatgctatgataatttgtatagctttggcaccttcttatttatggatcactcattttctttcattttgtgccaattcatgtttctacttctgtttccttttcctttgaggctctgttgcaaatgttactactaataatttgtgtcaaaagctgcctctaagtatttggtattttaggcacacgcatctgctatttactctttcttaaattgtttgttctaatgacaggatggcctaatactaataaacaattaagggtccttattagagtggtttattgttgtcctatctgatatatgtattgccaattgtccatacagcactgtaagacggtggagaaatggcagtgtagtagaggtttgggaagctcacaaggttgccgtgcaaactgttctgatgctgccatctggagaactatttactggtagagcatctgttatgccttcacatttatttcgtttttacttggtacttgtttattttctgtatttgtgcactggcaccttgttcataactgatccaatgtgattggtttgagcttcctatcaaacttttggaatctgatggtttactggaaatatcccgaaagcaatggttcatctggaattgttttggctttttgaaagtacttataatagtaattcttattggatgtactaagtagctatgtgtctagcaaccgctaccttagaggcgaaggaaaatgggtttactagtataggtaaacgtctcaatttccacaatacagtgcagggggtacaaaatgcatactgaacctcaatttattatagtgtttcctgggacttgttctgaacaaatgtgaccaaaaattcgtcaaatgatctattgatgcttttcctccttcatacaggctcaagtgattccacaattaagttttggaaaggaaggacatgtctacatacattcacaggacatgcaggttatttgcctgttcctaatgcataatactctgtttattgtttatactttcttggacattgacacaaatgtatatgtgtgcaagggtgcttctactgtaatagtgtggttcaccagatagctgagagttgtcaattttactctggtcaatttttttttctcactttagaattgattctggttgcactggagcaaaatgttatgcatttgttttatgcaaagagaaaaatatcatttatgaattgattgtcagtgcccttctcaatatataagcataagtttgtttttgtgttttgttgctagctcacccatgtttatttgacctcattttgtgtaacattgttacggcagatactgttcgatgtttagcacaaatgccagggctcgggatcctctctgcctcacatgatgggtgagtaaccagcttcacttacaaatagagagataaaaactgtcggtttgtctcgaactagaaaagcagcacatttacattattgtttgatcattgttattgctgttgcttcttctaaggcctacttctcatgcaggggccctttggtttactaaaaaaatttagccaccccttaatccttttttttaaaattttatcacacacatgtgcatcactgtattttatcacgcacgctcgcaaatgatattttgtttggtcacagcactattaaggtgtgggcattaactggccagcccctgttggagatgattggacacacttctcttgtgtattctgtggacgcacattcatctggggtaattgttagtggcagtgaagatcgatctgccaagatatggaaaggtgatttgttctgcgttcttcttagactgagttcatgttaaaattcagtagtattttttcattggattgattatacttgcatagtcaactcatgagtcctaccatgaacatttgttccaaacaatttctgaactgatttttccattgtgaagtgcaatccgttttacaaactcctttgtctaaagaaatgtaactttgtagttaaaatcattatgtaagattcagcttcctctgctccagatctgatcttaactagttttgtatatgacaccttggtatggtagttggtagtacatgtttgtattcacatttcttgcttttgtaacaaaggaaacgatctttgaggtgaaacccagtgaagtgtatgttttgctaagcagggatcatgcatgctttttcaaaaaaaagggtgttttgtatggttgttataagtatgtagcagaatgcacattaagcacctcatgtacttgatcaaatgactttgctagttgtataatgcagatgggatctgtgttcaaagcattgaacacccaggttgcatatggggtgctaaattcttggaaaacggagatattgtaactgcatgctctgatggaatcgtgaggatatggacaactgacaataataggttttgcagtgatgaggagcttgcagcttttacagatcttatttctcagtacatacttagtaggttggttcgctttgcttcttgaattattctatttatgttctatgcgaagtattgacatcttctcaacgtgcccccccctcttttgggtatcaacgtgacctaattgtaaccttatcggtatgcataaaggatgcataaagtagtctatttacagtttagacatgattcttttaatctttttatttgaataatagaacctgatgtttattcatgcaatatcaagttttaatttgaccgatagtttttgtgccttttattttgcttgtatagaaagactgtcggtggattgaagttgtcggatctaccaggaattgaggcactgcaagttccaggtcacatacctcatttcttatcaatttttttagattattgttgatattcctacgttgcttaaatatacatagaaaattcttaagctgtttgccttttttttttaaaaaaaataaatcaaaacagcatgctactagagttaagaagcataagaattagacttgatctctaaatgaagttttgtacttgaaagtactttgtgggtttatgctaaattagacttttggaaatgtctagagtattttgataaaatattgcagttgtgaaactcaattgtctaccgattctttagtaactttgtgatgttcaagttgaaggaatgaaaagttcatctttctttatctttgcataatagtatcatcatttttgaacttgtttgcttgtaagcaggaaactctgatggtcagacactgattgttagagaaggggacaatggtgttgcttattcttggaattcaaaagagctaaaatgggacaaagtaagcacttttgtgcttttagtatctccattgtgtcccccctaagttgccattccttcacatgagataatatgaatgttgaaggtgtcttttcattatttgctgtttgatattgataaatatatttaacttaaatgcaacctatgcaatttgacatacctatgaggtattagcattatagggagcttaacacatttactgcgtaacaggtgtcataaatgatgctctctgtttatatttttccatgcccatgcttgacctgcactttgttttgattttatatgtgattttaccttgttattaaaaaatcatgctagattggtgaagtagtggatggacctggggatgctgcagctgcaccaggccagtttcatgatggtgttcgttatgattttggtaagttgccttctgttggatatatttttgtgctaacctcatcatttacttatgttcatctgaaatccatgcagtttttaatgttgacattggagatggagagcctatgcgaaagctaccctataatcgatcaggtatgcctcttttttttaatgcttttgtctgctactggttctagagtaacccaattagtattataattcatatgcttactttacaaaagagagttttaccatttaagtgtccactcaatgcaaggtcctttgcttgcatgtgcatttacctttagagactctcttg

SEQ ID NO: 29475 - DNA, 6620 bp, Oryza sativa
tgggatttaaaccctaacagttataatcataataaacattttttatggtccttgagaaaagtacctagatatatactaaaattttacatacctcgaggtaccaagttttatgctataacatgtggtacattctaataccttctcaagaatgataaaattactttaatcataaacatacaataattaatgtgactttgcaataaccataccaaatgtgctatacctatataggtgcacagttactaaaatgttttagcacacgattaagttaattaaccacagcacgttaactgttaagcatatttgatcttaaagttggcgatgcaaaagcaaacaaaaaaaatatctggtagattttccggtgatcgatctttgtaattaagtacgtgaaatgtatttgcatacgtacaatgcttggtcataatcaatttcagcatatatttgtgcatccattatatattatatatattaagaatatataacggcgatatatatatgactcgtgcattcggtgttatgtttcggccggaccattaattttatgtgttcccgggccttcatccgttaactgtcaatcggtgcataataactattaatctcactcgatcgcaccaaaaaaaacatcatgcttgcaggagcgcatcacataatttctgccaagctgtatatatttgcctccaagatatatgaatggaaaattcatgaagatatgcatggggcactatatatgcatgccagcagctatatatgggttatggctagggtaaacggtatatataaaaatacagcatagacgacaattattattgacgaaacaaattaaaatcttttttttcaaaagaccacataaggaagcaaataaatcatgcacacatatatataagatggtgaaacgatcacgatcaatacagcaaggacgccatgcttagtgacgacgtctgtctgattaattagatttctctgagagaattaaggaggagaagaaattaaaagatcgtaattaaccagctgatactgatcaatcgatctcgatcgtatacatgcacacagctagcagccactgcacacaggtgagaagaaaatccccaaacctcgatatgtatcgcgattgtaagtaggttagcagcatatatagctagtagttattcctcttgctcccagctgctgacctgtactgatcgtcgccacccttgagcatctcttgcagcacttggtcgtctaggcactccagctcgatcacctgccgctgctgatgctgtcgggacgaggacgacgagcctgatccccgcacgtagttgcgcgcctcagcagggaagttgaggacggcgaggtggccgcgcatggcgtaggcggcgcggtcgtaagcccgcgcagcctcctcggcggtgtcgaaggttcccagccagacgcggacgctctgcctgctggagtcacggatctccgccgcgaacttgccagaaggccggcgacgcacgccacggtacttggtcgtctcgccgccgccgttgccctgatcgtcccatccgcccccgccgtcgccgtccatgatatcgatcgatcgattgcgaccactgaccggccgcggacggacaataatcaaattaactagctactactgttacggatcggaccggggatgcaggggtgtgctaataatattgtaagtatatatatctaatgatagctagctactgatctattccatggatcgatcattcagctcagctagctagctatgcatggagtatatatatatatatgtctctgaatataatgcttaaccgatcgatcgattacgctatatatatatagctatctagctgcagctgcgacggcgctggaaatggctaggggcctggacttgtatttaagagcagcttccgagcttaagccctaagggagctcaagataatggagatgcaatttgtgatcgcgttattgaaagcagagaggaagatgccgattctctcgcgctcaagtgatcacatagattgtggaagatgggccccggtcgctcctctgcatccatcccttgttgctctctgcctgtaattagctaactaaaaaaaacatatatatagtaatgttactaaataacatatataataataaagcaggtctcgtggtttcagagagcttgatcgaatgcatatctataatccctccgtttcgaaatatttaacacagttcaaatttttagtacatgtttgatcgttcgtcctattcaaaaacttttatgaaatatgtaaaattatatgtatacatataaatatatttaacaatgaatcaaatgataggaaaagaattaataattatttaatttttttaataagacgaatgatcaaacatatttaaaaaagtcaatgacatcaaatatttagagagtatatattacgtgttcgggatgatcgatccggtcatgcatcagtacgcctaatttatgtaggtcgagtcattctttaattaatttcaggtgactatctaaaaccatatagatatatagctaaaccagccgaccgtacctcacgcgttctacttgcgttgagttcaatgacagttgcctaacttcagctattaacttttgcatatcattgggcattgaaactactcagtattgtttttatttgtaggctataccgctaccttgttttctctttgaattgtcatcaccgtgtttgtatagttggagaatcctttttgattcttgtatggacggatgcaaactaaattaagctcaactagatgatgatgagggatggaatcataccttgatgaattgcagccttgtatatagttaggcctcgtgcctcaattgactggctaaatataatttgtcgcatcgctaactttattaagcaatgactcctcttgtcacaattagcaattgttttaggttagtgggattgcacgtatagtatatacaagtacataactcacacatgcatgtagtcctagtactgttctataagaacaaaagagatggtttgaatgaattgcgcaccttaattttttttatttgggattatattcttgtttggactttgaaacgaatagggacgtattggcctcgatttccctaggaccggtcggcgacacgcatgtgcatgcacgctgtttaaattcatgtttgatcgatccttcgaaaaggaataatattggaatgtctttgctggaattaactaaaatttagttagatgagcccagctgcccagtttctttattgcttctgctatttaattatacaagatgtaattatatactagtagtagataatgcaaggatgtttttggtttgaggaatctaatacgattacacttgctggccaacaaacataaagggtaaatccttaaatccacaaatcccttatatgtatatatatgtattcaatataacatgcatgatgttagtggcacaaggatgacatagaaagcatcgtacgtcgtacgaaattttgcgctgcaaacagagtgagtagttgcaatataatgcagtgctgtatagcgaagcctgcgcactagctagccagttttgaaattgatgaaagtataataatttcttttgttggttaaaagaaaagtttgaaaacgttcgagtttccaagtaaacagttttttttactagtaatgagaagtcgttgtatagtgaagagaaaagaaggtgaggaaatagcaaagttaagggacggtgtgtaatgcttaatgggctagcttgtcggccccatgtatgatgattggatacaatctggcagtatgcatgtttatgggccgatccaactgatacgtgcataggataggagtaggactggcattgcaaaacagcagatgccatgacatgcataaatactactccctccatcccgaaatataaaggattttatgtggaggatgtgacacatccagtgcatactactactacttggcaattggcatgtacgcatatgtgtatgtgaatatatagggagaaaatggcagaggcattgacatgtgcaaatggaggaggtaggtttttaagctagggaggattggatggggatgggaatgggaatggaatgaagttgacttgagagtcaaaaaggagagatgaggaaggagggcccagctggggaagggaataaatccatccatccatccatccatttgctgcctttgattttagtttaggcggccgtcgaaggcgacccgctaggtccctgttccgacttgcgagctgcgaccatatgcatccgcgtactgtatactccttccgtctcaaaataaatacagttttgtactattcatgttcaacgtttgaccgttcgttttatttgaaaaatttttatgattagtatttttattgttattagaagataaaacgtaaatagtattttatgtgtgactaaatattttcaaatttttcataatttttttaaataagacggacggtcaaacgttcacggctgcacttattttgggtgggacatgaggtagtacttggcgttgaccagcgcgtggacttgtaatatggacggacgcggacgtgctctctcatctcctagctactgtactagcactagaaaagaaaagaaagaagaaagcagcagcaggaggagagatggacttgctcactcggcacgtgaagtactccctccagcaactagtaagaagaaaggcaggctgcaggcgtggacgctgactgtcggtcttcccttgtgaattgtgatccaatattgccaaattaataatatcccttcatagatttctctctgaccccgcgaaacagcatcagcatgcattgcaattcaactcgcatattagtagtaagaagagctactcctactcagtggtgtggcgatgggttcagctctttcgggcagcggcagcgggagcttgttggtcctctccgtctccgtcgtcggcatccttttcacctccatcctcctccttgcctactacctcttcctcgcctgctcatggcgccgccgttcccaccaaactgcacgacccacgccgcctcttccttctttcttcttagccgccgatcaaccccgccgcggcctcggcctggaggaggcggccatccgccgcataccaacgctccgctaccagcagcagcagcagcacaacaagcagcagcagtgcggcgtgtgcctgggcgagttccacgagggggagaggctcaggcggctgcccccctgcctccactccttccacatcgactgcatcgacgcctggctcgccaccgccctcacctgccgtctctgcagggcccatgttaccgtcgacaccaaccacattgctgctgctaccaccagcacgcggcacgacgacgaccagttgctctccggcgtgcaccagccgatgaggaggtcgttctccctcgactcctgccacctctacctcgccatcattttgcacccgcaccaactctcggactccgacacccgcagccgcagccgcagggaaccaaagcccgccgtcttagagtcagagaggcctagtaggacgctgcgcagatccttcttttccttcagccacactaccacctccccagtcccaactccaatcctccctatctgattctcaacactaatctacttgtacaatcccatattatatttattaactcatccatatcattggtatttttcccatcacatcctcgtgtctctatgctctcttttttttcagactgtacaacactgccggttactgtaatttcttaatagacatagtaagtggaatcatccccctttaatacttttttcgtttcgtttatgcaatgtgcatcagccatgtagcaggcgtctgaaaataatgactaaaggtaatcctgccaattttaaaaataaagaatgcttcatgcaccatcatctccaacacataatcagatgggtccggcttgccaaatgagacatccatcattacttccttgcgtgatgcctccaacggtatttaacaagaacaacacatgacggttcaaccagattttcattttttattattatctgatgatttgacaccaaccaagtatttcatgttttctatgtattactttattcatattgcctactaatcattatatcgaattcatccattttatgtggcctttttatgttacctacaggaataagtttagggtttgtttaattggtgaaataaaaatctttggatgtcacatcggacgtttgaccggatgtcgaaaggggttttcggacacgaatgaaaaaactaatttcataactcgcctggaaaccgcgagacgaatcttttgagcctaattaagccatcattagcgcatgtgggttattgtagcacttatggctaatcatggactaattaggctcaaaagatttgtctcgcgacttacatgcaaactgtgcaattagtttttctttttatctatatttaatgttccatacatatgtccaaagattcgatgtgatgtttttgcgaaaagtttttagggaactaaatagggccttactttacgtctcattttcctttaaggctgagtttcaaacgtatccttcagccataaaaccgaatacaacgtattcctcatattgcaatactagtctaaacaaggtcctaactctcaaggtacttcatccgttttatattataagactttctagcattgcc

SEQ ID NO: 29476 - DNA, 3000 bp, Oryza sativa
tgatgggatcatagcaatgcttgatgaaacaaaaatactgaacactgctgataatttctctgtgctagatttgtaacagcatggtacgtacgactacattttacaaaacactacaattgttaaggcactgccaggaacttaggaaaatctcccagtaagcaaattccgtagaaatatttcatagcacaataaccatgtgacagaagaaggtaggactctgggtacaagactataaataccaaaaaaaaaactaactttaagcaggccaaacaaaataaggtttcccttatggaccctgtaggccaatcctgaaacaataggtaccagatcaactatgaaagaaggataagtaattatgagctgtacacaagctgtcaatttgtggctgagaacatttaactcattcaggtgattattgacccaaaaatctatctattaattccctctgggggaacaagaaacttttttaaagcaagttattgtgaatatattggtgattggaataactaatggttttacataataatagaagccagctttcctgccaaaagaaaagaaataagaaccagctaagaaaacattggcacaagtaggagtatggaaccattaattgtgttttgttgggtatacagcaaaatttggttgggaagaaaagaaagctaattaaagctaaatacacgtcattggtgtggcaggtaatgactacactccttttcatttgtatattgttatgacttacgagtatctgtaaagtagccacttgatgtaagcattttacttgattatcttaattctgtttcatgacttgaccagcttaaccataaggtagtaatctgccgatattttagaattatatatgtgctccgatggaggaaacactccagtttttaaaataatgaaaaacagagtcacctaaatttacaaaagtaatgttgggatccatgagagaaacactcaaaaaagtaaccaatgttactactatgatacagtttcaagaaaaataggaaaggaaaatggacatatttagatgtctgctcaggtaggatgcacataaggtttataggaagcaattttataacctaaccacatgttccatatctcataaacattaagcacaaagtacccatcctgcattttggtatgggtacaggcatgcaacaagtagttctgtttggcccaatatgtgctgtttaattactgaacttgtaaacattgaacagcatttgcattcatattaaataatacttcctccgtttcatattataaaactttctagcattgcccacattcatatatatgttaatgaatctagacatatatgtgtgcctagattcattaacatctatatgaatgtaggcaatgctagaaagtcttataacctgaaacggaggtagtataaaagtttaactattacatatgtgttcaaccatcaatgatatatgttccactcaggagttggaaatgagcatgaaaggggtagaacaactgggcttaaaataatgaaacttgtagtccactagggagaccaagatgaattaattatttgacaggctttggcaatcacagtactggggttatctttataaatagcagagaatgatgaactgaagatccatatcataaccagcaaggagcaagaataagaccaacaacagcatcaagaacaaggatgacaggacttggctcaccatgtggcgcgtgcaagttcctacgcaggaagtgtgtgaaggggtgtgtcttcgccccatacttctgccatgagcaaggtgctgcacactttgccgctatccataaggtatttggggcaagtaatgcctcaaagatccttatgcatctccctgttagtgaccgctgcgaggctgcagtgaccatgtcatatgaggcgcaggctaggctacgcgatccaatatatggttgtgtcgcgcacatcttctctctgcaacagcaggtgagcaagttcttcattagtattcagtacattacaatgagggttttggttcagaattatttttttttattaaaagaagtggttttattcttcatggagtgggaaaaactcacctggtgagtgttgagaactcaaggctcacgggctatcctaactaatctgtatgatcataaaagggttttgaagtatcacaagaaaaaacagttaagaagtatcccctctttctttgttgaaaatgtgtagacttctaggttccttggatggttctttgtatcaaagtgtaattttttttccaggaaaggaggttctttgcatgaaaatattgtcttaccatatactgcaaggaaataggtgacactgacagtggtgttccttgttaaaaattttcacaggtagtcagtctgcaagcacaactagaatctctcaaagctcaggcaacacaagggtatggagatggttgttcgatctcaagccctcaaaacgatagctgtggaaatatgttaacgtctattgtgcaagatgagcaacagtttgttggcccaacaatggcaagtaactcttcagtaaagaatgagaatcattcatacattgcaaatggccacttggcccctatgtcagctcaatcttcacaaggctttgaagcagagttgtgcatggctgagtacagcaacaccaacccttgttgcagtgtgcaagggaattggtatcatgacatggaggaccttcagtcagtagcctttgcctatctgaatcaggcatgagttgatgatacatatgtggtagactgctagatactgtacgagttggaacggttttggtaacaataacttacattcttataggatgaacattcaattgctaaaataaagcagcagagttgtgatgtagctgttcaaatattgcgaacacataaatttattttgtgtcgatatgtagttccatagttagtgaaagtaagttgtctggtttctgcaatactaaaatcgatctgtcctgaaaaaagcatgagttggaggttaagaggaaaaatatgattatggcatgaacattcg

SEQ ID NO: 29477 - DNA, 987 bp, Oryza sativa
tatagggccaattcgagctcggtaccccatcagaccgacctcaggaggccaatgtccgatgtggtgccgggggctactgtcggagatatgggcccgggagtatgcgaagtgaggggaatctaccttcccatcctgccacgtgtccctacagcctggtcctgtccccgtattccgcgaaccgcaggagcggctggggggtcggagcctcggggtgccacgtcatgcccctcgggcccttgcactactttgccccgaggccctcgcccaaccgccgtttggggggggggagcaagcgaggagggagcccaggctgaacttcctttaatgcgcgcaacgccccaactgccccatgtcgcatttaatgcagtggggcagacgtgcggcgtgctaaactgacgcgcgatggtcaagaatgaccggtctgtgaccggcctgacgccggtcacgtctgactggacggacaaccgtgctcccacgttgcatctgcttccggcagagtggaggtaggtatgacccgtcccatcggggggtcgttcggacggcggccaccacaagtcttcacctattaatgagggaatgacagggttgtcccccgtgtcaggcgagggacggcgctgggccccgctcaaggataagctgtagtttagcttccaggcgaaggcacgggtcgagttccagtcaagatagggtgggtccccacccgaaagaagagtaagtagaggcggtgcatgtggtatccctttgaggtataaaagaaggactttgcccaccgagaggggggacgactctcagaaaacctgagcttgtggaggagggaaataagagtgttctccccaatttaggaaccctttgaactctcagtctaaatcccatacacaggagtagggtattacgcttgatagcggcccgaacctgtataatttggttgtgtgccaactagctaggaaccttggggacaaatacgcgattctagaggcgagctttttt

SEQ ID NO: 29478 - DNA, 1884 bp, Oryza sativa
taagggagagcaagctctaccttcttgcgtcaaaaaaaagatcaaaatgtagatgtgaaattgaaagaaacaatcatcaacatcttacacatatgcggtgctcagtcctgcatctagctttgactagttcagatgaacatcggccggataagtcgatcttaggcagccggcaattcattcagattcattgtaaaccaaggaatcatcattgtcattactgcatctaaacaattgcaatttgatctgttgtattcttgtttgtaataataaatagaagagggagggaagaaccccaaatccccaatagcgtacaatgttaataaattgtgacccagtagcgtatacaaaaatcgtacaattgaagaatacagagctgcctggtacatgcaggataagaattgaatttggagtccaacttcgtatctgctctgcgcagggggaaaagaaaaagagaaacagggtatgcatatgctaatctctgtctgaatgatctccttgtaagagaggtttggtttcatctgtgcctccccacttgtgcacacgagctgaagcttgcgcagcctgaaattatatgtacattaatcggcaacagcaatggtatatcatgatgagcaactctctttatttttccatttaaaatgaaaacgaaaatgtaataatactatatattacctctgccttccagtctgttctccagactacaaagagtagaatgagtgtttgaagtgcaactccacagagcatgccaccccaaaccccctgcagccaatttaattttaatttttttctgtgatcaattatatataatttcgcagtacatatgcatagtactccattatattagtggaaaaaagaaaagagaaggaaggtaggtaggaataggaataggaatgggtaccccgactccgaggttgaagtagtaaccgagaaggtagccgacggggaggccaaagaggtagtagcaggcgaggttgatgtaggcgacgaggccctgccatccgccgccgacggccacaccggacagcaccggctgcacgctgttgagcaccatggtgaccccgagcaggccagcgatcctggagacggcgcggagcaggtgggcgtcgctggtgtagacgagcgccagcttgtcgctgaaggcgagcacgagcgccatgcagaggaggccgatgagcagcgactccgccaccaccaccaccacggcgtgcatggccgccctgggcctcccggagcccagctcgttggacacccggacgctgatggccgcgttgaggccgatgaagatcatgccctcgtagccgttgatgttcatgcagatccccagcgagtcgaccgccatctgggcgtcgtccaggtcccccgtgaggacggtgatgaggcccaggtaccatatctcgaggcacagcatcaccgccgactcgatggacaggcggaggaaggcggccaggtcgtggaacgccgccatggaccacccgcgccacccctccctgcaccaccccattatgtaggccacctgcgccagcgacgacgcccactgcgacacgtcgtacgccgccgccgcgcccgggagcccccaccccagcaccgacaccgcgaggtaggtgatgcccacgtggaacgccagccccgccacgccgatccatgccagcacccccaccttgctctgcgcctggaggaacttgcccgacgggaagttcacggcgaaggcgaaggcgcccgggaggatgtaaagcgtgaaccgccccgccgcgcgcgccacctccgggtcctgccccaccagcaggagcagcggctcggccagcacgtacacggggaccatcaggaccgtggcgccgagaaggatgatccaggatcgctggaagtagacgcccagcatggacacct

SEQ ID NO: 29479 - DNA, 1645 bp, Oryza sativa
cccatgcccaggaggaagccgagggcgaaggtggcgaacacggagaggcccacggaggcggcggcgagggggaggtttccgaggtggccgatgaacatggtggtcacggagctgatggcgtagttggtgatggtgccgatggcgatgggggtgccgatggcccacagccgctttgtctcatgccagaacatgcgcgccgccgccccggccgactccacggcggccgcgtcctcctccggcgctggtggtgacacggagcccatggttgattggttggagagcagcagcagcagatctctccctggtctggtcaaatgtgtggcgaaggcgcgtcatttatttggggagttgcgccggtccatttcacaatgaatgcgtatgactttttttctgcttggattttggattttgcttggagtaggtaccagctacccgcacgcacgccgctatcctcctcgtgacacacctccatttcagtttccatgccttccctttattaaattaacggagcacggagtacttatcaatcagagcagatacaatagcagtctataaaccaactataaatatattttaaatagataaaagaagaaagagaaaagcagcggactacagatctgtagctagctgcaatatggactctaaaagtaatgtgtgtatgatagatgagactaggtattaaggccagtcacaatggctagtgtcattgcacggctacccaaaatattataccatcttctctcaaatgaaatcttttatgaaacaatccccacagtggaggggtttcactttgacgtttccaagactaagcaaagcatttaattgatacaagttgctgggatcatttgtacccaaaatccggcgcggcgcgggagaatgcggaggtcgcacggcggaggcggacgcaagagatccggtgaatgaaacgaatcggcctcaacgggggtttcactctgttaccgaggacttggaaacgacgctgacgagtttcaccaggatgaaactctttccttctctctcatccccatttcatgcaaataatcattttttattcagtcttacccctattaaatgtgcatgacacaccagtgaaacccccattgtgactggcctaatagtaaatgaaacaactattttataaatcgactattacgttggctaggtgatttagagctagtagctagttatactattaaacttcctcttagatgcaaccaatgtagtactagagagaattaatacctgtaactgtaacgattaaaaaaagaaagaaattaaaaaaggatcggggcaaaacaaaaccgtcatttctagtatggctgtactaggatcgtcattcgagccattatttttctctctatatttttcgtaatttatgaacaaaaaaataaataaattcgtactccagtccgtgtcagcgagtggtacagctgagtaaagggagtgggtggactgtgcggtgcaaacagctaccacgtcttcacgtattataggctcctactgggctttctttctttctgttgggcttgaatcctccctccaacacgaatcgcaatcgcgcgaggcattgtacatcggaataagtccatttttactcccttaaaattgacccaatcaatcttgacacataaactgttaaatccgg

SEQ ID NO: 29480 - DNA, 2752 bp, Oryza sativa
cacgtcttcacgtattataggctcctactgggctttctttctttctgttgggcttgaatcctccctccaacacgaatcgcaatcgcgcgaggcattgtacatcggaataagtccatttttactcccttaaaattgacccaatcaatcttgacacataaactgttaaaaccggtgcaatttgactccctcgacggttttggtgagcggtttcgctgacgtggcatgttatgtggcgatgttgacccgtcttcgtcctatgaggcgttgacgtggcgcttacttgtaattagaattaaaaaaaatatgtgggctcacttatcattcacaaacacacaaaattgtgggacccactgacaggtgggacctacatgtcagtctatcccttcatcatcctcccgacctccccgttccatgccccatgccgccgtcgtcagagcagccagctctctagcatcgagaacaccggcgcgggcccggcgccaccggtggccatcttgctcgtctccgtcgagccctccagcgtctgggcaattgccgtggcggcggtggcggctgtcgtcaccgctctggctcgcgctctggctcgccgacggggacgccgcgccctcgccggagcactgtagctgatgctgcatcgtcgccatcgtggaggtcgaccccaacgcctcggggcctcgcgagcgccgcgcactaggagtggcagacgcggcgtgagtggaggcgatcgatctcgcacgggatccggcggtagtgctcgcgcaagactttgtctgggagttgcgcccatccccgaggccgttgatcagccgccattggaggagacgggaaaggattggatggagattggaggttagcagcgtactctggggcgaattgaaagggaaatggcatgacaggtcgatgtgagaagacaatgtgctactgtatattttttttagataatggaatataatattccggcctttactcaaaagagctacagccaattattacatagtagttttcataaacatagtgtaaatctaaataaatagaacacaccgaagatcactattattgaaaccagcctaacgtaaggagatcacaattattgaagtctatttgtaaatctccaaccataattggcaaatagttgtataaccgtggtctccaactttcggcatgcaaccttcagaaactcttcatcttcatcacacctttgtagttgtgcccaaaaccggagccaatgagttgccctgaaaataacctacatataggaaaatgatggtgatttgtcaaaaaccatatcgttcctactcagccatattgcccaacaaatagcagaagctccaacaagtatcagtttactcattttcttatcaactcccaaaagccacccattaaaaatatgagatatgctaactgaaagattaaaaccaaaagagaactgaactgctctccatagaaatttcgcaaaatgaactgctctccatagaaatttcgcaaaatgataatccataaagagatgttgaatagactcattcttcaaacaaaaagaacacctcaagctgccattccagttacgccttgccaaattatccttagttaacacaacccctttaagcaggtaccacatgaaaattttaatcttaagtggcaacttaagcttccaaatacacttgtttctttcgatatagccattattaattaaagctaggtacatagacctcaccgagaacaagccattctgatggaaattccatctaaaactatcagacgaatcattcaactgaatatgtactatagaggcacacaactgatgccaacaaacaagattctgaccaactaaagctctcctgaaagaaacattaagcggaacatatcccataacagtggcaatagaagatgttttcctcggaacaattgcgtacaaagatggatatttatccttaaaagccaagttaccaatccatctatcttcccaaaatctgatttgttccccattattgacaatccaagaacccatatttaagaaagtacttttgacattcataagaccagaccaaaaatgagaatcaccttgtttcctgtcaacttaggttatagatttattataaagatatttcctcttcaataaatcatgccaaaccccatcctcattaattaacttaaacaaccatttacttaaaagacatttattttgtatctccaaattatgaatcccaagacccccctggtccttgggttgacaaacaacatcccacctagtgagcctgtattttttcttatggtcatccccttgccaaaaaaaaccgcgatctataataatcaattttacaaagaacccctttcggcacctcaaaaaaagatatcataaacagggtaaacttgagagaacagaattaatcaacactagtctaccaccaacagataaatgcttgcctttccaactactaagctttttctcaattctctcttcaataagtttccaatctttattagaaagcttcctaaaatgcatcggaattccaaggtatttaaaaaggaaaggtacctaacttacaacccaaaatatcagaatagtgttcataacattccttggcctgaccaaagcaaaataattactcttggggaaatttattttttaggccagataacttttcaaatatcgataaaatcagtttcaaattctttgcctgttgcaagtcatgctccaaaaagataatagtatcatctgcgtattgcaagataaacacaccatcatcaacaagat

SEQ ID NO: 29481 - DNA, 1470 bp, Oryza sativa
ttatgttccatttggaaaatagcatccttaacctcattttcagaaaattccttagttaaggcttcattctctaaatatgaaacttgaggaatgtcagcaacataattctcatcaaattgaaggtcagactcatcaggagggccaaaaagacctttataataagtggtaatatgcgactttaaattggcatcaccacttattaaatgatcaccctcctgtaattgataaattctagttttcctatgttttccatttgccactaaatgaaaatactttgtattagagtcaccctctaaaatatccttagtcttagcccgctgataccatttaatttcttcttcccttagaatgacagataacctactcctgaaaaaccatctaatatcaacttcctcttgagacaggagaacagtctctgcctttttatccagcgcctccaacttatctaaaatatgctttttctcttttttgtataaaccactggtatgtttagcccatcccctaagatgctgtcttaggcggcgaattttcgcttgccaacgctccataggagtattgccctcatcaaccccagaccaaacttcttttaccatatcaacaaatccatcacgtaataaccaaccaagttcaaacttaaaactatgttgagcgttactaaaagaggaagattttgtatttaggagcaaaggagtatggtctgaaatatctctattgagagcaacaacagaggataaagggtatttttgctcccattccgtcgacactaaaactctatccagtttctcataggttgggtgtgccagattatttgcccaagtaaaattcctaccagtcatttgtatctccctaaggcacaacccatcaataatagcattgaataagaagggccatctatcatcataattatcattatttttttcattaggactacgaataatgttaaaatcaccaccaataagaattggtaagttctcatgactgcacatgttaactaattctgcaagaaattggtccttaaactcattttgtgcaggtccatacaccaacactaaggcccacttaaaattatcagctttatttcgcaaatgaaacttaatataaaaaaccccctcatcaatcaaaccaatgtcagaatttaataaattaatacccaacagaagaccaccagatctgcctctaggaggtttacaatgccataaaaaatctttaccagcacaaagattattaagagcagctgtagaaaattctttcttaacggtctcagataaagcaataaaatcaagttgatgttctttggttaaatcagaaacaaacttatgttttttcgggtccttgaacccatcacaattccaaaagattcctttcatttaaaactaattttattattcttcttcttttttttacccttcttaccattagaaatactattagtagaaggtaccatggaatccaaagtggactgaatattat

SEQ ID NO: 29482 - DNA, 885 bp, Oryza sativa
agttcatctgctgcctcgacgcaccgccccatctgacggagcgtggggctcctcaccgggagaccgcgctggcccccctttgccggttcggccggggaccctgggtgagactctaagctcccaatctgtggaaggttcgcgagacaggaagcacacaagacgccggcgatgtatacaggttcgggccgctgagaagcgtaataccctactcctgtgttttgggagatctgtgtatgaaggagctacaaagtatgagccagcctctccctcgttctaggttcccaatctagaaaagtccaaaaaaatctcttctctcagtgggcaaggtcccccttttatatcttaaggggataccacatgcaccatttccctcttttttgtggggacttcccccaccttttcataaatggacggagatttgtatcgttgccgtccgagtcaccttctgatgggacggcccacaactacctccactttcgccgggagcagatgcgacgtggaattgtggccacctgctgacgacatgaccggagtcagaccagtcacgtcggtcattcttgtccaccacgtgtcagcttagcaatctacatgttcgcccttcttcacacaacatcttgcttgtaatggttaggatgaagcctggcatatatctgatcaggactaacgtgccatctctgggaggtaacacgctagctccagctggggacgagcgcctagaagccctcgtcctgacgggatggggcgaggcgtgcgtcagaccgcctgtcgccacctaacccgcgatctgaccggtctgtgactggtcacagaccggataaatgagtgcactgcactgcgttacatgcggcgtgacacgctcagccaaaccgcaataaatgtggttag

SEQ ID NO: 29483 - DNA, 852 bp, Oryza sativa
atgcgtaacccactgttctgcactgtgcatttgctgtcttgcttgaccgtgtgaaaagtgtatccatttatgtcatatccttgccaggtggtggcactccattcaggaccctgtgacaaccactgaagtgtttcactagggcaattctgcaacctggcaatttcgttcttcaggcactcgttgaaagaagacatgtgcttattcctgacccaactctctgaacggcctgggtactcttgtcggataactgtaaggtgttcatcaacgtacggcaccaccttagtcatatgctgtaataccgtgaaatgagctttatcgtacaccttccgatccaactaatagtctttcttccaacaggaccaacaccgtcaagcctcccttcgtgatgagatcgtggtaatccaattgaagatgtttctgacatgtagtccacacaaaattcgatggcctcttcggtggtgtaactctcgatgatactcccctcggggtgtgaacggttccgtacataacccttaaggatccccaggtacctttcgcaaggatacatctgcgtcatgaatgctggaccacagcactttgtttgcctcacaaggtgcaccggaagatgttccattatgtcaaagaaagttggaggaaagtacatctcaagatgacataggggttctcacaagttctgcctgtagtttatctagtccctcgggatcaatgatcttctggccgattgcatggaagaaggaacacaaccgctggatcgggtgtcgcaccttaggaggcaaaatattccttattgcaacgggcaacagctgtgtgataagaacggggcaatcatgcgacttcattccaaccaactta

SEQ ID NO: 29484 - DNA, 2029 bp, Oryza sativa
tgtgctcttctcttttcgctttccaactttcctcttttttccaaactcgttggttattcccatcagtaagttgtgcacctctgtccctgttagctctgtagggggtccggttgtatctctgtgtccattgaaattctttttcatattcctatacgggtgataccttgggagaaatctcctgtgacccatgtagaccgtcttgtgtgaatgcttcaaccatttgcttcttgtttcctctatacactccgaacacgcccatttccctttcacagtttggccagaaaggttgccaagggccggataatcgttgatggtacaaaacagcatcgcatggaggttgaaatactcttgtgcatatgcgtcccatgttcgtgtgccctcattccatagcctttcgaagtcatcgattatcggttcaaggaacacatcgatatcgttgccaggttgtctcggtccttgaatgagcatggcaagcataatgtactttcttttgaaacacacccagggaggaaggttatagttaacaagcagaactggccatgtactgtgacgactgctcaaatctccgaaaggattaatgccgtccgtacacattgcgaaacgcatgtttcttgggtcatttgagaattcctggtaaatcctatcgattgtcctccactgcactgaatctgctgggtgcctcagcatagtatcgactttccgttcttcggcatgccagcgcacaagcttaacttgttccttgttcgcaaacattctcttcatgcgctccgcaattgggagataccacaccacctttgctgggcctcccctctttgacttacttccttcaccttcactctttgctcgtttgtatcttgatcccccacagatagggcagacatccaagtcagcgtattccttgtaatacaaaatgcagtcgttcggacatgcatgaattcttctgacctccaggcccaacggacataatacttgcttcgcttcatatgtcgtctgaggtaaattgttcccctctggcaacagatcctttaacagctcaaggagttctgtaaaactcttgtccgaccagccattaatagccttaagcttcatcagttccaacacgcatgacaacttgctgtgcttcgacttgcatccatcatacaacggcatctggcaatcttccaccaacttactaaacttctcataatctctgtcgttgtcctctgcgtcttcaatgtcatgcaacattgtagatagacattgagtgtccaaatctatggtctctccacctaaaggagaaggtacgaacatgccttctcgagctgcggcggtgttctctacaccctgatccaacacttcttcagctgcgacatcaggcgcctcttgctctccatgcttggtccatcaggtatatttcttcatgaatccattcattatcaaatgagcatgcacttcatccttgtcttcgatcatccgttcattcttacagtccctacatgggcacaacatgtgcatgctcatcctactttttctgtcattatccgcaaatgtgacaaattcagtgaccccctctctatactcggtagacgaacgatgcgcatagtacatccatctacgatccatctgaaatcaacaacatacgaagaaaaataaatgatgatcgatatgttgagaatgaatggagaataatatgttttttaccttgaattttagtaaaaaatcgccccccttgccctcccaaccgatttgtgaacagtacaatggtcgggatggaaagcagttggcagtttgggggtatttatagacccaacacacctcaaacgggttagataaaaaaagcccgtcaaaggtattgctcatacctttgacgggcttctattcaacggcccgtcactggtatccgctcacctgtgacgggccagaaatgaaagccgtcacaggtggcggcccatcacctctgacggcttctaatgtatcggcccgtcacaggtgaggggataccagtgacgggttggaagaaaaactcgtcactggtatacctctgacgggt

SEQ ID NO: 29485 - DNA, 1731 bp, Oryza sativa
ttggcgacttgataactcccatcggctgattccgagatgctgcagtcgataatgattctaagccgataacgtctttgccgattaccaaatttcactgttaacatatttctatatggcctctaagcttttcaatataagatgtacattagctagcaagttgcccttgccgcgaagaaattagacaacaaactaaagcatacttagtaggagtaatactctatatatagtcagttttatctcttctgtacctagcttgcttggaataattatatataagtgattaacaaactcagtataaagtacacaatgaacagatggatatgcattgatccgatctttttcgcgaacgctgcattgatccgatctatgcatgcatatgcgactagagaggcattcagaattaatctgtttaattagcactcatatatagatatgtgaagtaaaccaaacacacaacacagcaattacttggtgatgtttgattaagctattgctgctatactacacacaaatgctaaagaaagagaaatatatatggccctggcacttgaaccactaaaatttacctgtataaacgtacttatatagcttggatcgatcttgcattatattggctcaccttttgttaattaattagctcgagctggctagctatatatagcttgttgatcatatatatcatgtgagtatatatatatgccaattaattaagcaaggatttaattcatgaagcttaattaattaatctagctagagagctagtagggcggcggcggcggagggcgggcatggtgccatgcagcaagcccggcgtcgtgcattcccccgccgaaaagtagtggatcggcggcgccggccatgagtggcggcggcgccatcatgccgcctgccgctgcttcctcctcctcctgatccagcggcagcctctcgtaggtggcgttggcgaaggtggaggcgatcaccatgaccggccccgccgcggtgagcgtccccaccacgctgccgcccaccacctgcccctgcccgccggcgaggtacacggtcagcccggtggagcccggcggcgccggccccggcaggaacgtccccgtcagggacaggatctcgaaccgcccacggagcgccaccacggcgctcggcgcggccggctggcgcagggccacgtcggtcacggtgccggccccgctgagcacgcagacgccgcgctgccgccgccgcgcgaagtgcgcgatggactcggcgacatcggcgccgccggccacctccatgacgtggctgcgcagcgcgttcgggctgtcccgcgtcacgaagatgggcggcttgggcttgttcttggagcccggcggccgtccgcgggggcgccggttgcggccggtcaccaccgcgccgtccttgggctcgccgcccccggcgctggtcccgttcatctcgtggtcgtggtcgccgcttggctccttggacgccatgtcgtcgtcaccggcgccggtggtgtcgttgttgccaaggccgagggatgggtcggcggctgtcaccggcaggctgagccgcccctcgtcccaccaccggctcgccagcttctacctgcggcctatatatccaggctaggctagggtttaacttcttcttcttctttctcggcttccgatcgatcgatagatcccttcaattgattagcttctggctagctagtgcttcttgctcgctgcgccacctcggatatatatcatatgt

SEQ ID NO: 29486 - DNA, 5572 bp, Oryza sativa
ccccccaccaccgcaccttgcagcagctgcgggacgaagaaagactggaatagccgcatcgtcgccggtaccccgatgaacatctcacacaaatgcgcaaagatggccagcgtcatcacgacgttgggtgcgagatgcaaggcatggatttcgtagaaatccaaaacctcgtggaataatccggagaatggcgggatcaaccccgccatagcaaaggacaggaggtgcacggatcgctccgggtaccgtggccgcggccgcgactcccccgccctcacggcggcgtcttccggcatgatcttgcgggggagactaaggtgcctatccgccataatgcgcgatgctggaagcactgcgtcgctggcatcttgagccatgatgactggcggagaaacgacgaggggcttggtgtgcggagtagcgtggagtggcgagaatgttagggcttagggagcgagtgtgcgggtgagcagttggcgaaaggaagaaggcaaagtccccgcctccgtatccttttatccctgcctcgcccgcgctcgcctccttgtttcacgccctctcggttgcccccacgattctcgcgcctgcagttgcctcatcgtttcctgcgaccactcatcacgtcgcccactgaatccgcgtcccgcatttagtgcgcctgtcagcggcacactcggcgtagggcgtgcgacggtcacgggcgcaatctgggcgaaccgtcaccagtaccgccgcatgcgtggcgggtgagggagtctaggtgcagtccatccaaccccctgattttcgcgccttaagcatcctcatcatcagcgcggtcagtggcggtcaaaccgctgttgttgttgatacgccaacctggccactcggcggcatccacttagattccctgccgggcccacaacaccagtttgggaagtcgtgaggcaccacatcagaccgacctcaggaggccaatgtccgatgtggtgccgggggctactgtcggagatatgggcccgggagtatgcgaagtgaggggaatctaccttcccatcctgccacgtgtccctacagcctggtcctgtccccgtattccgtgaaccgcaggaacggctggggggtcggccaaccctcggggtgccacgtcatgcccctcgggcccttgcactactttgccccgaggccctcgcccaaccgccgtttggggggggggagcaagcgaggagggggcccaggctgaacttcctttaatgcgcgcaacgccccaactgccccatgtcgcatttaatgcagtggggcagacgtgcggcgtgctaaactgacgcgcgatggtcaagaatgaccggtctgtgaccggcctgacaccggtcatgtctgactggacggacaaccgtgctcccacgtcgcatctacttccagcggagtggaggtaggtatgacctgtcccatcgggggttcattcggacggcggccaccacaagtcttcacctattaatgagggaatgacagggccatcccccgtgtcaggcgagggacggcgctgggccccgctcaaggataagctgtggtttagtttccaggcgaaggcacaggtcgagttccagtcaagatagggtgggtcctctcccgaaagaagagtaggtagaggcggtgtatgtggtatccccttgaggtataaaaggaggactttgccctccgagaggggggacgactctcagaaaacctgagcttgtggaggagggaagtaagagtgttctcccgagtttaggaacccttgtaactctcagtctaaatcccatacacaggagtagggtattacacttgatagcggcctgaacctatataatttggttgtgtgcgagctagctaggagccttggggacagatatgcgatttctagaggcgagcttcttctcccggccgaactcacgaaagggggggtctcacgatctcccgcaagagagggtcactcctcgacaaagttaattactcgatctgaaaaaaaacatatatatgcacattgctctcgttgcgttcatcattttatatataccaaagcatatgcatgccagtttaatttaatcattaatttacgattatctcaacagtcttagtagtactattactagctgtctcatcttttttgttatgtaaagattagtagtacggatatatcatattaggtactagattgggtttttatgggactgagagggcatatagtaaagtacaagcagccatttgcagaacactgtacctagactctaggttgtgatgaacccaacaaacacctatactagtagctaagctaagaccatggattgactggtaattttattggcaatggccatacaaagctcctaatgatgcgtgaaaggagatcaaaaaagtgttaattagctttaatgacagctcccactaatataaaagggcacagattcctgtagctagcctcctaatgtaatggtggtccggggacacaagttgcatgcaaggcttcattgccatgaactttgttttgttaattacgacaggtcatgccggattagattactgtattaagataagctagcttcacttgttggttagcgctttcctcaaaaaaaaaaaacttgttggttagcgcaacacgtcaaaagacagcactatatgtattcacagcaaattaatctcaactgcagcaatgatcaacgattttttttttgtaaatatgttcagttaatatttggaatctctcatattcttagatgaataatactactgcctttctagtttgctgattaaatcgtgcgccttttgctgcattagttgcgttgtttggattaaactatccattatcaagtaattaatcacctcccttggcccgtgaatggccagttggaattgtaaaatggatgagacaggagagacgatcggagaggtgaggctagcagcaaatacattaatcggacaaccttaggatggtcgaatttttcttaattatgtacgggcaggaagcaaggagtactttaggatttgtgcaattttcggaaccacaagaagtatgcacagaagtttcatccggcttctggatgctaacatgatggatcacatcacaattcacccgtattcctttcattttaaaataaataaatatagtagttttaggtcataagatgttttaactttgatcaaagtcaaactgttttaaatttaactaaatttatagataaatataataatatttatattaccaaattgattttattaaattaatacttaaatatatttttataataaatttatcttagataaaaaatattactatttttttataaacttggtcaaatttaaagcagtttgactttgatccaaatcaaaacattttataatctgacaaagtcagaatattttataacctgaaacagaaggagtacgggatatgacacacattcgtttgtccaggatatgtcatgctactattttgtgatgacggagggagtacgtagacgtgtagcacacagtgacatcattaactcaagaagtcttcagtgatcgatacaacaacttggtggccatgtttgggggcctaacacacagtaaaaacttggcaggggcacagtctctcttggaacgtcaactcgcaatagcgtgaagagcaaaacaacacaactcttcgttcattcattcggtgtccagtgtaacaatcagcaggacaaagtcgccatttgacatttgcagcagccacttgcaggcagtccatcgacagacacacagcatcttctcttctctagcaaatcagtaaaatctcagcagaacaattgcagtgagtgaagcgaatccaaatgctggtttgcatacaacgatggttgaaatgggcacaagtgtagcaccaccaacgagggcatatatcatcaactcgtaactcatcttttgccgtcacaaagttttacaacagttctcaccacattcagaaaacgttcagctcgccttacaatcaatccacacagtttgagataaaattctcaaatgttcggtcatcaagtgcacaaaacttgataaacaccgtcagccatgtactttacgtgcaagcaagaggaaaatgaaaggcagagtcagacaattcttctacttggttaggtagtatataaggaagaagacagaaatgaaagaagccaccatggtagccattctgcgacttgctttggtctcaaaaacctgaagtaagaaaaaaaaaagagcaattgtaagaataacagaacagttaaggagtagcccatgacgtggagataggaactccttaattcattaccatcttaaacttgtccaccgttccagatagaaatcctctggaagcatccatatcattaccgtaaatagcaaagaaatgcattagagagtagtgacaagaaagatagcatcttgcaggatattagtaccattctgtccagcattcggttatgattctccacttcttcatgtatatctcctgtcaactgaagagacaaaccacatcaaaggtacagtaagtttagaatggctataagcacatatgaagattacattgtgatctagcatgcaaaatcttgagaacaataacatacaaaagctaaaagatgcagcgctgtttacttttgatattcagatcatccacatgcaataaccatcatactaattttttgaaatggtatatggcaggaggactgccggttatattaggaggagaaaaataaagataaaaagttattaacaatggatcatagtccgtcgagagagaaagaggagggaaggggcgacttaattacataaggagtgaatcatagactaaggaaaataacatatggtaaattttgcagtgaactttgcgccatgttcctcacaacaaaatatttgcagtgagctaaggactattaacgatgcgtcgggacctcctggaggctggaacagtggaataatttatccttgaatgatatgtctttattcctcttttctagctgtttctataatgctattttggattctcgaatgtgttgatctcacattcagatgttcagaccgtccttatatttttcttcgatggaaaaaattggggtcatttctccctagaaaaatatgtcagacaatctggaaatttatactagcaaatacacaagaaagtgcccaactcttgccgtgttactgtacaaagctataagtagtcaccttctgcagttagcacgaaaacaagtcatgggccatcagtaaataattccaaattaagccgttttatttctaccagctcgataaaaactccatccttggtattatatagtgcaaaacgatctaaccccaacctgcaaagccggtgttaccggagctggccatctaaaccgtggttgctctaggtcgtgccaatttgtatagcgagaataggcaccagtgtttcattatctttttgcacttctcaaaaaaaatctaaccctaaccttattgtaacggctcaaccattatcgcacacaatgcgatccaatcagactgaaccatttagccctttgcagtagcacagggttttgtgttaatgaggtagtaaaaacctttctaggtttgtattgcacataactcaatatgtgaa

SEQ ID NO: 29487 - DNA, 2143 bp, Oryza sativa
caaaattctccatgcattttggtttctgtcattctttgatgattaaggaactttgcagattatctaaacttggggatttatataccctttttgtctatgaataggtgaattgcatgaattgttgtttatatacatgatttatatacccttgctgctgctgccacataaataattgtgggctgttttattatctacacttgattgaattgaatggatgaattgctgtttacatgaagttagtagtactgtctgtttttttttgatgaaatatatgcatatttgagatgtgaaatatatgaggtgatgaatttggactatttgtggatgaaatatatgcagtattagatgaattagtctttttgtattagatgattttaggattaattttgctgcattggttgaattttgcatgattttaactagataaatggccagtgatgttttatgttaatacacccctgccactgctgttattgtgggctacttgttaatacacccctattgttgctgcccctgtggagtatctttgcccctgttgctgctgcccaatgtgttccttgttaaatggccagtgatgaattgctcaataagaacaaattatctacacttgttctttctttatgcataagaacagattttctgcacttgctcttttttctggattgataagaggagactatatacacttgttttctgtcattctttgatgatttatatacccttgctgctgctgcccaatgtgttccttattaaatggccagtgatgaattgctcaataagaacatattatctacacttgttcatttttttgcccctacacttgttcatttatatacccatgctgttgatacccctgtggcatatatactcctcctgctgctgttttatgtcaatcatgcaaattttgtacccttgctgctgctgttttttaaatttgcatgattgattcagtggttatatacctctacacttgttctttttttatgcataagaacagattttctgcacttgctcttttgatgttatgatttcctctttttatcccttcatgcaaatgattgtaattgatgcatatttctcagcaaaactgaggccatatctttcatagtataccccgtattacattggatctaatgctatttagtctaatggtaggaaatttataatctttttcgcgaaagttaaaccatgtcaacgcccggcgcaaacccgccctccccaacacctgcgaggatccaggaagaagcaaacccagccacagaggcagttgccgaaggtcatcccgcgacaacggcggtccaacaacccgaaattcatggtaatttataggataaattttcaccacatgaccacataaattttagctagcaccccttagcaaatattgccttctgtttgtgctgcagaattgccgcatgaacaacatacgtcgatgtcgggcgggacaagtgcaagtaggtctagtagaaatccgcggtcacaaaatatatggccgaccacagtgcaagttataagagaggttgacgctagtggtaggcccacggcgcccaggactgtcattggaagatggtctaactgctgcgggatagcggcacgtgagaacttcgggatcctccataaagatatcgggaaggtcacagaagccgagaaagagcgagcttggacggcaatggagaaatggttcacatttccagccgaagcaaaggataggctcaagcggaaggcattccaaaagatgggcaaagcttggaagaattggaagtcgaagctcttcaccgagtttgtcaacccgcccggcaatcatacgccgttcgatgaataccctcaaataaccgaagcggtttgggaggaattctgctctctcaagaccacccaagagtttagggaatcaagcgaggcacatcgcctactgcaacagcggaatgagcacccgcatcggctgggcaccgcagggtacatctgcaaggaggcaatatgggctcaagaagatgcagccgctgcagcagcgaatgtccctgccccgtttcagacatccctgaacaaagagctcgcaactgggcgcgggcaaggggtaaggtcaacccggacggctctgtcacatttgagaacaaaagtgatgccgtcgtccatcaggaactggtga

SEQ ID NO: 29488 - DNA, 2874 bp, Oryza sativa
accccggacggctctgtcacatttgagaacaaaagtgatgccgtcgtctatcaggaaaccttttgaagagttcactacttaacctaactaatttccgttcgtataaagtacaagttcgtataagcgactatcttcttttctagttgggcttggttactgaacaagcttcacaaagcgaggttgagtccgcgccgaagaggcgcgaagatgacatcctcacaaaggcgctcggaaccaaagaacatcctggccgaactcggggaattggtagcgatgtgccctggaagcatggactccctcagtacagatcccaatacaggaaacggaaagtctccaaggaagagaggtacgctcgtttgaaggccgaacttaaggttgaggtcattcaagaactagaagctagcatgaatgcaagggtggaagaaagggttaacaaggtcctcgccgacatgaatataccccgagtcacaacacctgctgtgcaaccaactcctcgtgtacaacacgacgcgagtccgtcacagcataggagtagttgtgcatccacagaggtgccggcccctggtctcccgatcgcaccactagttgcagtggaccacatcgaggtaattgttgttatccgatccatatctaataaaagacatgtacacattccaatattaaattcaaactttcaccttatgcagggcgcagcacagtgtgtcctactagcgagagtccacccaactttcgctcctgaagtcgctgagggcatggctttcaagccctcggttacagacaaggtccacggcgcagacctgctagctgggtatgccaaggtgtccatcgatacagtaaaggacacctggtcaggctatccgctgcccgtgcccccaaatgatgaaatcatgactttgggcgatgcgcgcaagacgttcatacaatggcccaaagaagacatagttgtgaagatgactcctcgtccaagtcgaccgacggagcttacacctcccaagtctaagctatcaattgaggctccccgtggaccggcattgtcagtacctcattctcccggtggagctgatatggacttggcagatatagctcaaagcttggctccaataaagaccacaagaaaggccgatagctccccaccacttgtcaagggccagaagcgtgaacgcggcaaggggaaggtcggggagttggcgccggagccaaaaaggggcaaggctgcgacgtcgatgccggtgagcaaatcggggaaggtcgtgagggcgccagcccaatttgagctaggcatgccattggtggaggacaatgtgttagctgtgatgggtattgcttgccgagagctacataagcaatacatggagctaagcaatgccaagcggaaaatgagggagtcatccatagttggacatcacgaccaccagccgttcctatcgtcgcctgcctatataactataggctttgatgacctcttcgaccttttcaggatccggaagttggacactggtcttcttaaatgctactccttgtaagtgcataccttctatacttgtgatatgactggactatatctcctaattaaattagttctaatacgtacatattttaaggttgtgttggatcgagagtcgtcgccatggtaatcaggttgggttccttgatccatccatggtgaatgaggttaatttacgacagagcttcactgaggtggttgactatgtcaaccggtgtttatgggcccatcaagacaaggagtacatcatgtgcgcacacaaccaagagtaagaggacaatacccttcgtgtatattgtttttgaagttaaggttcttagtactaacactacataaccactgcgcaggcgacattggattctcctagtcatcgtacctaagtggagtcgggttacctaccttaactccaataagtccaaagattatgatttcagtgaaatcaccaaggccttaaatatggcttggggcccatatgtggaaaagggtggtaggcacaaggagggcaagaatgaactttatcatgacaccaagtttgcatgcgcacaacagatcggagaccaatgtggtttccacgtgtgccacaacatgtcaacacttctaagagaggtgaaagatttcgaccctgaggttgttgctaatggcgaataagctcatttcaatatctaaattgctattcaaaacgtgctaattaacctcttatttattaaacagaaaggtagagctggcttcaagatctcacccatcaacccccccgctatcagaggcgaattgtgcgcctttattcttgcagaaataatgaacaagaaaggacgttttcatgccaaatagactcatgaacttggctagataatttattgtgatgtaaaaaagatgtttttataatttctggcgatgtaaaaaattatgtttttatagagtgcaatgtaatttactttcatatgtgcaatatttatggtactttactaaattgtcatcacatttgatcaactacgatttatgttgtactattcatctggtttctcctttttttttccttattgacaggttgtgcaggtcgatgacattatggctttaatccatttggtaagtatatatgcggttctatgagcaacgaccgaaattgtggctttaaaggggtgtgaatttgctgtgcaaaattgtggcatttgaactgcatatatgtgttgttggggatctgtgatgttatattgggggggtgatgtatctgtgatggatctgtgactagaatatatctgtgatgtttctattttgcagagggcatggctagcaaatcctgaggctagccaatatttagcatttatttttttttctggaattaactcatcagtgacgggtcggaacaaaaatcg

SEQ ID NO: 29489 - DNA, 12214 bp, Oryza sativa
tgtattattcatatttagctatgtgtaaatttaggtttgaaattttacgagacggtaaaactgtgccattaattaaatctttattatttccgtaaatatctcattgggaattaaggaagcagaagccccctgggcatacgtgacacagcaaggggaaagtaaagcggagagacttctgaggttaattagttgagaaaaaatggaggtgaagtgggcgcggcgctcaatcatatcatgcatcactgcatctgcgtgcaccacattggaaggctaggaacgaaagcatctccaatctctcattgctgacctctttaaattaacccccttaatttgaccaccctacgtaccagctttcatttcttaatttaattctctggcttctgtattatattgacagtgctcctatatatatgtactttagcgtggttagttatatattataacagcacgtaatcactgctcagcatgtacttaatttgtcccttggtagaatgatcagccgatgcttttgcacgatcagttcactgtgccatataggggctcccatgcatcatgaacaaattaacatgaccttcggtaaggcggtactctcgaaagtcgctattggggttgcacaagggatgagttcatcttcttctctcttattcctcctcctcatcaacctgtttctataggatgactaggagtttgtgggtggctagtagcttgcagttatggtaggacagagtgtctatgtcccgctgtagagctgtggtgacaggccacacataacagtgataggctcggcgttagttcttttctcaagttggtggttgggagtcgttagtttcatgctggtgagtttttcttttctttcctaattgtagcctcctagagttgtaatattgtatattttttcatgctatattaatatgaagcctcgcagctatctcatgtggtttgttcaaaaaaaataacatgatcaattgttgtttgttgtgtagtggtctctccggtgtcactatcggtgatttgacaaagacactcccaatgttgaatggtgtaaagatagtcatgtctccagtctttgcacatatatataatacatagagtcaaagtttaagatcaaaggtaaccttaataagcgattgaatgctctatgtgatggaaatgtgcatgacgtctatagtcctttctaagactctaagagtgagttacaaaccgcctttgctacctgtacgttgattgagttttagaaaaatcgtagttgattgatcaatcatcaatctgttgttgatctaagggctatagctctatcttgtacctcgagccaagagggagacatgataaggagagggatatgtcagagaggactcgcgacaacgtcctggtggagatgggcgggcggtgggtgggggtgagatcatgtggttaggttgcaagggtgatagatctagcagcgtgagccaccccgagatgaaggagaaaacacatatggatttgttgatgaagagggtgatggcagtgatgtggagggaaagaggacagggataggaaaggcttgtccagcctcgccggtgtcagcgctggcagtgcaaagaggaatgccatcacacgcgagtcaaagttgggacttagaacgttggtggcacaagagacgggatcaggagagggggaggctatgttaaaattagattgttacacaaataacaatgtaatctgagctatttaataaactatatataaaacatcaggcaactaatgaatggtcaagccgttatcaattattctggatggtaactccctgccttcgatgcaggacggagtgtagcgggggcccctgtccgaccatcccttgcgataagagtttttttctttctcagtaacttatatttcctgtatttgtgttttttgtttcttttttttccttgacccctagcaacggccctctgaccgtttgcgttgtgtaaccaaactctgttgtcttcttctaatatattgacgtgcaatcatttagcgcgttcgcgagaaaaaaatggtttggatggttaaatcttactagaaaccagaacaagataggctacgcaattagcaatggatggttggcattaggtcatctaaggtcaaaccgacggagatacatttgctgcataaatagcaactagcgtaatatgtgatgtgatgtacttcctacgtcttataataagtttattttttagctacttatatttgtctagaaataagttaatttttagaataattatttgtatcggagtttatgaaagtaaaaagtaattgtatttggagtacataaagtgaggaagtattgagatttgataaagtagaggtattttagtttttttttattggtacgtatgagattagtgaaaaataaatttatttgggaagggatgtagtacctagctactcttgtaccagctagattaagtataaaccaaaaacaacgggagtagtagtagtaagaatgtaaaacggttccaacataacgcaacaacggaacggttggatattcggttgggaggagaagggagattccgtttgagtaggttataaatagcaaggaatacatacgtacgttccaaatcatcacaaagcaagcaattaagctggcatgggcggcggcggcggggagcagcagcagcttgaggtgctccacgccctgaacgtggccaagacgcaatggtaccatttcacggccatcgtggtggccggaatggggttcttcaccgacgcctatgacctcttctgcatctccctcgtcaccaagctgctgggccgcatctactaccgcgtcgacgggtccccgtcccccggcacgctccccccgcacgtctccgcctgcgtcaacggcgtggccttcgtgggcacgctctcagggcaactcttctttggctggctgggcgacaagctcggccgtaagcgcgtctatggcatcaccctcatgctcatggtgctctgctccctcgcctccgcgctctcctttggccacaccccgacctccgtcatggccaccctctgcttcttccgcttctggctcggcttcggcatcggcggcgactacccgctctccgccaccatcatgtccgagtacgccaacaagaagacgcgtggcgccttcatcgccgccgtcttcgcgatgcagggcttcggcatcatcaccggcggcctcgtcgccatcctcgtctccgcctccttcagggccgccttcccggcgcctccctacggcgaggaccccgtggcctccacgccgccgcaggccgacttcgtgtggaggatcatactcatgctgggcgcgctgccggcggcgctcacctactactggcgcaccaagatgcccgagacggcgcgctacacggcgctcgtggccaccaacgccaagcaggccgcggccgacatgtccaaggtgctgcaggtggtggagatgcgtaatattggtaataatggtggcagcaggaggccgttcgggctgttctccggcgagtttgtccggcggcacgggctgcacctggtgggcacgtcggcgacgtggttgctgctggacattgcgttctacagccagaacctgttccagaaggacatattcagcgcggtggggtggatccccaaggcggcgactatgagcgcgctggaggagctgttccgcatcgcgcgggcgcagacgctgatcgcgctgtgcgggacggtgcccggctactggttcaccgtcacgctcatcgaagtggtgggccgtttcaagatccaggccgttggcttcttcatgatgaccctcttcatgctcaccctcgccctgccgtaccaccactggacggcgccggggaagaaccacgtcggcttcctgctgctctacggcctcaccttcttcttcgccaacttcggccccaactccaccaccttcatcgtgccggcggagattttcccggcgcggctgcgggccacgtgccacggcatctcggcggcgtcggggaagctgggcgccatcgtcggatccttcgggttcctgtacctggcgcagagccccgaccggagcaagacggagcacgggtaccctccgggcatcggcgtccgcaactcgctcttcctgctcgccgcctgcaacctgctgggcctgctcttcaccttcctcgtgccggagtccaaggggaagtcgctggaggagatgtccggcgacgccgaggcccaggaggaggcgccgccgcccctgcaaactgtactgtagcgctgtcgccgtctgcatatctatctatatatacatgcagatatatagccaccatataatataactgatcgatcgagaccagagaagatcgatcgaagaaaccgccagttgatatataactggcctggctatccactatatatatatatatatatatatatatattttgtcgttgtcgtcggcgacaccatgtaccttttcttctccttaattagccttattgtgtttcatgatgtgtcgatctacttctagttcgtcgtcaacgatccctgcctttttacaatcttgagcttttgcgcgcttttgacaaccgatcaagcctaactatatatataatctcgtagaaaatagaatatgtcaatgctagctaactgtacatcattatataggaactgtctaattaatgacctgaaaattcacttagtaacatatttttactcccccgtccttatttctagctatgtatctacacatgtgtatagccataaataaggtttttctataaaagtagtattgaattgctaaacaatatattttgtctgtgatagtgatatctcttgtgcatgtaaacaatatatatactatcccacattcatattgatgctaatgaatctagataaatatatatgtctagattattcattagcatcaatatgaatgtgagaaatgctagaatgacttacattgtgaaacggagagagtagccaatattaacatgaaaacgtgtccaatcaaagcacacagtaaatacatgcggtggcacccgaagatatgccactacaagaacaatacgtgccatcaggttctgcaagtactacagtgaaagttccaggagagaacccatcagggcaagtgcgtgtcgatgtgctataggttggctgacagggcctacggcacccttttacatcgcacaaacgaaataccaatatcaatttggggttggaagggttaagggggatatggattataaaaaaaaaaagtactccctccctttcatattagaagactttttagcattgcccacatttatatagatgtttatgaatctagacacatatatagattcattaacatctatatgaatataggcaatgctagaaaatatatgaaactgaggaagtaatggtttggtgttgttctaatgcttccaatatgaaacaaaactttacccagaaattccaggtagatctctctttcatggaagttttggttcccaacccaaaagtttcaggatatttaggaggtcaaaatctacccatagtgccaacttttggtgtaaacggtcaccaccagtgtgttataggctgttgttatttacactatagagtaaattatatccacggtacaacaatttggcgggtgggtgcgatatagtgcaataacttgaaaattaaacgttcaagtgcaacaacttgacaagtaggcgcgttctagtacaagaacttgacaaattagtattttgatgcatcaacttagctaagcatatgctaggtgagttttttttttcacgatgtcaatatgccattacatagcagtcctacggatattactttacaatattgaatttaatctttaagatttatactgcacattcaatttacatccaattatctttaagaatttttgttttctgtaccttcccaaatctcgaccgaaatataataatttctacatccagttaattgattttcagttattagttattaggataaaaatataaatatgcttatatacaaacccacgctagtatattgtcaaaataaatacttaaaaattaaatatgtatttaaaaagtgctccaaataattaagttgtcgcataacttcttaacttattgtaacaaaatcgtacatatcttgcaagttgttacatttatgcgatcacttataaagttcttgtcctgaattgcacttacctgccaagttattgcactagaacgctcatttctcaagttcttgcatcaaattgcaccaacctacaaagttgatgtaccgtgggtgcaatttactctacactataaatatgctaaatatatctattatttcttttaaaaaatatacttcctccgtcttgtaaaaaatcaatttctggggatgaatctggttgtctttttcttttggactgaaggtatattggcttatactaaaaagagttcttaattattaattttaaagtttggaattaaattaatgacattctaaatcgagagtgcaaaacaaatacaacttcatattatattaattataaattttgaaattattaaatttggaaaactaaaaaaataaaagaatgtgatatttacaattttttagataatgatgtgatatttacaattacatgttttacaatagtatccatgatagtaagtttgacctaatcaaaggctagatttaaaaacatgtaggagctctggcaaagtgtctaattaatacaaagtgtagattcgggacatcaattatatagagagggtacaatttcacgttggactatgccctttgaccaaagttctaatgggaaagggcgtgttcgaaagaaaaggtttgagaatggtttgggaatttttctctcgcgcacagaaaacaggatgactcattagcgtatgattaattaaatactagcttaaaaaaacttgaaaaaaaatattaatacgatttttaaaataacttttccataggaactatttttgcaaaagaaaaatacagtttagtagtttaaaaaatatacgcgtgaaaaacaagaaagtaatattaggaacattgtagtatagaccacaccctaagccaacgtgcaggggcagtataaacatattacatatatatggtggtggatgaactagatatgtgtatagggtgggaagcgtataatcttcaagggacaaccttgaccatcaagattggccatgcagaaaaatgatgtaaagcaattcttgtgctgtgttattagcttgttgtgcataagtcaaattgaaggcaagggatcatgctcttactgcttgggaatatgccggccggggagaagggagaaggaaggaaaagatacatctttctaaaaagtgattcagatattatatattgctcagtgtagcgtgttgctccactggaatgttcctatagtggcttaattggggctacctagtacaatatatacaggaggaggaggaggagaactagattaatgaatgatgatccaatgtggccggtagtgcatcttcgattcactcactacatgctgtcgttcatgttagatgtatactctcttcgtttacttgtgcgtctctattctcagatgcatgtcttcatgccataggtagtttgcacacttcatcgtaactgtcgcttcgaattaagagcctacttggatcatttagttttcgaactaaaattagtctctggaccaaaaactttagtcccctactatttggatccagggactaaaatgtactaaacgcacgtggaccaagagagaagagaaagactgccactttagtcactataagtacctccaagagggactaatggattttagtcatccctgtttggattcttaggaactaaaggtgactaaaatggagggactaatggattagtcctataaaccgaacaaggcctaatttgtctttgtgccatgtgtagtttgcacacttcgtcataactgtcgcttcctacagaagtacctctaagagtgactaatggattttagtcccaatatacacttagtctattttagtcatcccaatttggatttttaggaactaaaagtgactaaaatggagggactaatggattagtcctatgaaccgaatcgggcctaacttgtcttcgtgccatgtgtagtttgcacatttaacttgtcttcgcgccatgtgtagtttacacatttcgtcgtaactgtcgcttccttaggaattaacttgtctcctttcttttttttattacctaaaattttatgataattaaacttggacgaaaaaaaacaacttaggccttcagccctaaaacacgtgtctttattttttttatttttttgagaagggtaatttttacccgtctctatatccaaccggtgtctttttattttattttttatttttttgagaatggtattttttatccagcctctatatccaaccggatatatgtaaacttttttaaattcttagctctcaaattatccaatctaaaattcattcctatggagatttgaactcatgactttaggatgctactcaggttactgcaacactattctacatgctttttccttcagctcaaaatttctgcagccccaagaataactgacattgtcttcccaccaaattacatgattattaacctcataccaaaaatcacatgtctacgcatattagactttgacccaattacacgagtgtacgtatattagactttgacccaattacacgagtgttttttcatgaaggctagctgcggttatttttccccttcttttgtttgtttttgcatcaccacgattttctgtattttttcctcctatatgattttggatttatgagggatgtgtggtgtcacgaggcaccacagacagcggacgggaaaccagccagttttttttatgggaagtactaccaggaaaccagcctagtagttactccatatattataacagagatgaaacaggtttcacaatattacagaagttgtaaccacagcttgttaccagttgatagtattcatcatttttttgtgagggataaccagccatccagccaagacgccaaacttaaaagaaaaaaatatataatctcttataactctccaagtgcaatagtgataattaagatagcaggctactacaaataaattagactccaagatacaagacaaaacttggtttggctattataataaacctccgaggagctgtcaagagaggaagataaaaacgaagggcagatagaactagtcagagagaccagccctgctcctcaagtgctccttgaagtccatgatatcaccttcccacctggtcaccgcctgcttctcgcacacccaaatctcttgagcaacctggttgataagcctgaagtcatgactcaccaggaccaaaccaccgtcccactcgttcagtgcctcagccagagaatcgatggtctcaatgtccagatggttcgtcggctcgtcaagcagcagcagttgaggctgcctgtaagccagccacgcaaagatgacgcggctcctctgcccatcagagagattcctcattggcatcacctgcgccttcccagacaggccaaacttaccaattgcagccctcatcttctcctcctcattcccagggtattccctcatcatgtactgtagggccggcatgtccaggtccagcttctctgcgagatgctgatgatactgcgcaattcgaaggtggttgtggcgcctgaccataccatctaatggagctaggtcacctgtcatgagcttcagaagagtactcttgcccgcaccattggggccaaccagtgcgattctagagtcaagatcaacaccaaagtcgagattcttgtagatgaggttatctggggtatacccgaatgagacttcaacaaactgcagcactggtggtggaagtttgccaacatctgtaaagcggaacaccagtaccttgtccctgacaaccttctcagtgagcccacctcgttccatcttagcaagagttttctctttgctctgagcttgacgagcaagctttgcagatccatggccaaaacgtgcaatgtactccttcattgaagcaatctgttcctgctcccatttgtactgcttcatttgattctcttcaagctcagaacgagtttgaacgtactggtcatagttaccagaatataacttgagcttcttgctctgcatatggatgatgttagtgcaaactccatttaggaaatcttgtgagtgtgatatgacaacaagtatacgatcaaacttctttagtgtctcttccagccagacacaagcctcaagatctgcaaacgaaagaggaaaaaacaattaacctacacaggcaaaaggttcaacaaaatagtatcgcaacaaaaagccaagaaaacccatggggatgcaatagcacatttttatcttgttcagacttttataagcaacgttctttccttgagctacactccaatgatgggtaggcttattatataagtgtcaaccagactatgggaggagagagtcaggtgtagaacaaatttaaggccaacaataagtaatcaggttataactgtgtgttcagaaaacaaaaggtatagcaacataggggccttttgtcccaactctcaattcatagaaccaggtaaaatctaactacaatatacagctatttaaaagatgttccgtttgtatcatcattaagtagggcacaaacatccttgcccatagccagcagccaataatttgacacatagatgtgtttaaaaaaactaaagcaatgtagaaaatgcctttttttcccactggaaataaaagatgaaatcgattctttatttccgtgtggacttagatttcctttagaagactcaccaagatggtttgttggctcatcaagcaaaaggatggttggattcataaacaaagctcttgccaaagcaatcctcatacgccaaccaccagaaaaatcctgagttttctttgcctgcatttgtttattaaagcccaaaccaaacaatatctcagcagcacgcttttcagcagtagatgcatcaagtgcttctaaccgctcatatatacgatccaaagcatcaccgccaccatcatcctgtaaatgtcagtaaagaaactgatgttacaagaccttaagtacccagttataacttgcaacaggaacaaagatgaaataccaatacagatatcaggggcacagatatagcaatatgaagcatttgaagagctggtcacctgagcagacaaaatttcagcttccttttccaacttcatcctctcttcgtcacaacagataacagcctgtagcgcagacatatctgaagcctcaatctcactggagagatggtaaatatccatgtgttcagggatagggagttccctgcagcctatggctgtgagcagagtagatttgccacagccatttaggccgagcaaaccgtaacgcctgtaggttaaataaataagacaagtgttagtgtgaatgaaggggctgtagcaggataatttttgtgattttaaagtgatgaatgggaaataaacgaacctcccatagttgagctccaactcagaatcaacaataaggtcatggccatgaaatgttaatgagagggactctatctgcaacaacatcgaatcgaaagattacgtttcagttagtttttgggggtgcaaataaaataaaagcaagaagtaaatatgaatgaagatgattatagtaagattacgtttaatttgtttatgtatatatgtatatgtatatgtatatatgtatatatatatatatgtatatgtgtatatgtatatatatacatatatatgtatatgtgtatatgtatatatatatacatatacatacatatatatatatatatatatatgtgtgtgtgtgtgtgtgtgtgtgtatcaacatggttattgtatcgatcccttagaaattggagcgcaaggatgtaggagtgcaagttggaagcaggagggatgatacatgggcatctgatctgagattctgagcggagcagcaaagcgcatcttattattacatcttataaagggggggaaagaaaaagaaactaggtattcccctccctcgtcaacacaacacgtacatctggtctaatcaaatctaatagggagcagtaagtaagaaggagggaggggggggacaagatccttacgtggatatcgcgggagagcggatgggaggcgaggactccggtgcaggtgcgatcggaaagcttaagcgcggcgataccgttggccgctttatcggcggcggaggaggaagaagatgaggaggaggagg

SEQ ID NO: 29490 - DNA, 8261 bp, Oryza sativa
tatttattattatttactttgttagttaggtccaactccaatccctccccaactattttcagattcttattagctttgacattcttgtctagttcacctagtctacatatccaattgaactcaatttacatttcatcagacacagttattacagtatagaggtttgcttggaagatgcaccccttctgttcaaatggatcttccctttgagggtcagggaactatgatggcaaggcaaactgtttgttggagaaaccgcctacctctctcgtttattttacttcgttatgttagatcatgtatgtgccactctcgctccgcgagtcctttgtagctgttgtccacttttggtcatagccactatatttgagcgcgtaacttgggctatgcctactcatttgtccaacatcttgaatggtagactgacacattatgccttaggtgacatttctctttttttttttgcacaaaacatctcaaaagcactctctctctctctctctctctctctcgttctgcatgggatatattcgtcatttacttgcttgttgcaatctgcgtacagaatggacactctgaagaagcatctaccagtatcagtgcctgaggggttgaatgaacttcaaaagatagcagtgcgatttgaagagaaaatctatactgcagccaccagccaggtacacttagcctcttgctaactcatcgggttgatccaatctttcagttgtggggctcaagcatggcatttgggatcttagtagaagaaatcgatcgtccaatgtttgcaaatatgtctgttgattttgaagtttgttagagtttcgccgtgaagtatccacattttcttttgaaccgattgtaatatttcgcacttccacctaaatcagattatccaaggctgctgaagcttttccccttccattatcgggggaaaatctcctttgcgccttggatacagggactaagactgattcagtcctatgctagaggtgttgatgtccccacattattttcattgataacatatctcaatagtaaattagtattaatgaattatagaactaaacaatatttttaccatgagactggtttctctcattggccatgttaaaagtacaggagttgtaccttgagttctgtaagcccatcattccatctgttcatgcttgtataaatcacctgtaaaatattccctttatcccagatgaaacatcaaacaatggtttactccagtccttccttttgtgttagcgagtatgtcatcatatatcccacttcattttggtaaacatttttgtaggagcttctttggctgggtatagggattcataatctccaaattccaattgtgttctcctgttcatacttcatcaggcttattcatgccaaagtagtttgctgtatagataagaatttgtataatttaattgattgtataaaaaaacgaagcatatgtttcaattgtgctaaccaccaggacttagggtggcaagttatttattacaaagccaaatcttaccattgtattcttttgtatcaccagtctgattacttgcggaagatttctctaaaaatgctctctatggagacaaagactcaacagaatcctggaaacgcccaagtgattcaaaaccaaaatccccctggctcaggtatcatatgaagtatattcaatatccgattctgaaatactggagtaatagtaagatattcgctggtacccatattttgttcaccgtaaaagtccttgtatatatttttcatgatgtaactatattgcatgtgtgtttacaagccccatttctgagaggaaaccatccaatggaagctctgccacactgggtacaacagtgctctctcgttttagcttgtatcggataatgctcaagcaagtaaattaaggcgagatgcctgtcagtcgaaacctccaaacttgttgattactcgaacctaattaagtaattgctaatcttgatagcaaacacaccatttggatgctggccacgaatccttgcatggtcatattcaaagcttttgggcaccaacatcaaaacagacgaccccttcaatctgcttgttctagtagaggctagatcagccatggcttccaaagtagaaaagcaaagcaaggctcacaccatcacgtctgctgccagcagcccaaagaccaaagatacacatagctttctagcactcattctctctctttttaatcaaagattagtatcatagtctagcccattggcaatacacaatcacttcatcgatataacctctcgcactggatttcctctccctgacaactcggtagctctttgtttatgtatttagaaaatgggctatcaagttgtatggatttgtatgtacttgttgtccatcgttaagcttgcccaggctcaattggatccaccactggatggagttatatgtctaaaagttccctagctagtgtcagttttggtttacatatcttgtattattaacatatgctgtctagttatttgcatgtgcttcacttttttgaactgattagttgtccatgatctatacacaacctagatgtttaattgatgccatatgagtatgaaatgacacattttaaatgattgtcattttcccctgataagtgctaacacatgttatgttagttatttgcgtttgcttcttcacattatttatgctcatttttcttttgaagggggatgtctactttccataattcatgatctataatacctaaaggttcaattaatgccaatataccatgaataattgcacattatgaatcgttgcactgtttaatttattccccctgttaagtttcatgtaactttgctttatgttggagccagattacacttgtgtgactactgaggtaaaataatagttggctattttgagttattgatggaattatgtttattctccttctgctgcaacttgtcagaatttatttgcagtttccttcttagccttatcgaaaaactaattaatggttttttgtctaagctacttgctaacctcttacttgttttggtacatgtgtgttccttggaaaatgtagattctcgtctcaaatatgtctttatcatgcttatttggggtgttgttatgctttttacaattttgcaagtattgtctacaaggtatttatgcacattcacgatcttttctgcaacagtacctggactccctcaaggcagtaatccaacacagtcatcagcgatccctttgatgtctcagcaacaggcccggcagccaaattctacgtctgtccaatcttctcttactaatcttggtcagaacttgccaggtgtcaaccagacatccacactgcagaacatgtctggcatgccgcagaacactatgaataatggcttggcacaaggcgcttcacaagatatatatgctacgcaaaggcaaatggcaggaaggcagcagcagcagcaacaatctcagaaccaattaatttaccagcagcagcaaattatgatgaagcagaagttgcagcaaaattcacttatgcaacagcaatctttgttgcagccaacacagatgcaatcctcacaacagccaatgatgcaaataccatctagcctccaacccgggcagtccattccgcagacacaaccaatggtacagtcatcatctcagggtggtattcaacagaatgctttgaactcggtaccacaatctgtgcaatcgttactccagcaacctacacaatctgctatgaggcagcagcaacactcacagtcctccatgcatccacagccttctctgcagcaagctcaaccaactcagcagcctaacattcctttgcaacatcaattaatgggccagcagcaaaatttacaacaaaatcagttaattggtcagcagaatggtgctgtggatatgccacagcaacagagactaccagttcaatcgaataatcttttgaatatgcagcagacacagcagatgttgaaccagcagtctatgccctcgcaccagcagcaacaattgggctcccaggcaaatatttcaactctacaacagcagcagcaacaaaatcagcagcaacaacagcttcttggaactgtgcctaatgttccgaacattcaacgaatgcatatgctacaaacaaaggcagttcagcaaccacagcagcagcagcatgctcagcagtcatcactgggtttgatgcagcctcaatcacaacataaccaacttcagcaatcacagcagcatcttatgtcacaattccaagctcaacctaaccagctgcagcaacaactgggaatgccgcagcaacctcccatgcaacaaaggcttcaaacgtcagctggcatgctcttgcaacaaaataacattgatcaacaaaagcaatttatgcaggcacaaaggggccttcaagaagtttcgtctagcagtaagttctccatatgctgtctatatagttgcatttattcttttattgtttccccctgttttttcgctgtgttattgttcctttatccctctgttttatccctattcatactgacattagttttctcctacatttatgccagcttacaaatcctaaatttcattagttaacttaataaattggagatagtaaggataacatttgtcagttagagtctattgcaatgtacattgataacatgctgacgaagctgaccctaatgattttgtgccttctgttcaaatttgttttttctgagttgtggacatatttgccacaaaaggctattttcagattactgtttcaatctgacctcaagttcactgttgtatttttctagtaggaatcacacaaggtctcccacttctgtattacatcctatgttgtagtagcagcttgctacttgattgcttgttcattgacatgatgtttgatttccttgcttttcatgcagcatctgtggactccactgcccaaacaggtcatacaggtacaggtacaggagattggcaagaggaggcatatcaaatggtaatgcataccactaccgtttggcgctcgtttgttcacttggaccttcctaaagaaattcagagaaaaggacctctgaacattgtatttgatgtttagaataagatttggtcaaacttctaaaatactgaccataaataatttctcaaatgcttagtcttaaacaaaataaatggtataggtaaatttgcttcaaaaagtactatcataaaatcatatacttataaacttattctaatataaaattgatagtcgaaatctaaaaggtctgaccgaatcttgttgtgacatcaaatatttgaccggagagagtaatattctcccgctatcctttttcattgttgttttgatctgttttccaccaactaaacaataaacagttcccaattgattgcatgtccttttttctctcgagacatctggaacgaattcgacactgcatttttttttcagatctgtacaattttatgtgtaactcattttgttcttaatcttttaaccattgaagtatggtgaaatcaataattggacatgtgtagccaaagaaacaagaatgttatcttttactgataaaggtggaactgatattcatacaactatgcacatgcatgctttctttaagatagaggattctttgtgaatgtggactgtatagcatattgtatctagatgtgataaggttatgatgcagtttgtaatccctttctcttgaccttgcaagttcaatcaacaccatgttttctactggttattatagttttttctttaagttccctatgcatgtaataactattcgaacaatctttgcctgcaccatatctgttagttaaacaacaggccttggtttactgaatgatttcttttctgtagtatccatcccttcatagcttttgtgtttttctttcttgtgatcacaggtgaagaacttaaaggaccaatattttcctgaattaaatgatttgtacaataagatctctttgaagctacagcatgttgacaacatggttccacctcaaaagccaacagaacagtatgaaaagatgaagaatttcaaactgatgttggagcgtacaatgcatgttctgcaattgaacaagggcaacattcagcctgcccttagggacaaaattcctgcgtacgagaggcaaattatcagtatcctaaattcgcaaaagaggccaagggtgcaaggccagcagacacaatttcaacaatctgctgggcaaggtcctacctctaacattccgcaacaacaacaaccttcccaaggtttgcagcagcatgataaccatactaatcagatgcctcaagcaagcatgccaagtatgagcaccggattacaatcctcaggtgcagctggtatccaacatttacctgcatccccagcaacaaactttggtgttccagcaacacagcaaaatgtcacaaatgcaccacaggctacctctaatttggaggttactcaaggaagcaattttaattctttgcagcatggttcaatgagtggtgctttgcaacagggaagcactgggcccatgcagggtacactgaatgcacaacagcaggccagtagtagcatgttatctcacaactcagtaggtacaatgcaggctaatgccaattccatgcaagccaacgcaaattcattacagcagctgaagcagcaacagcaggagcatcatatgatgcagaatcagcaaatgaagcgtcaaatgtttcagcagttccagcaaaaacaaatgcttcagcagcaactcccagcacagcaacaattacagaaacagcagcaatcacagatgcaggttccacagcatcattctggaaatgatgcaaacgagctgaaggttagacaaggagctgcaatgaaacctgggatttatcaacagcacttggctcagcgcaataacttttataatcagcaaatgaaacagggcagtgctttcccaatttcgtcaccacaaaacctccaagcatcatccccccaaatttcacaccattctcctcaggttgatcagcacaatctcttgccgtctcaagtgaagaccgggacaccattgcagtcagctaactcaccatatatgccatctccatcgccacctgttgccccgtctcctataccagtggattcagagaaaccactctccaatttatcatcatcacttactaatactggtcaggctacacatcagcaaacaaacatggcgcctcagtcacaatcaatcgccgttaacactccagggatctcggcctcacccttgttggcagaatttacaagtgttgatggaaatcaggctaacatgccaacccaagttctaaccaaatcaagtgcagcagaaaggcctttagaccgcttacttaaagcggtcagtaactttgccaactttttatttactgtcttttcttcgtttctgtagtgcaaaataaatttattatttaatcagtgctattctgagtatattttaaagcgtaattaactatggcataaagaacacagtaggctcagctaaaatatttagttcaggagttatatatgccatgccttttgcttgtaacctcgtgcacctaccttgctaaagttaatacaaacattaccctgtttcaatcaactagtttatcaaacgataactaaaatgatgcccaaaggttgcagcagatctcagataagtatatcgtaaattctgaacttgataattatgtcaaaaagggatactatgctaaaatcccagtcacatgcacatatgcgtgtgctaagggattatgcaaataacacacatgttagatctgtacacaaatattttgaagtcaaggggatgcaaagcatgggagtcatcatgcctggtcatttcatgttactgcttatttaaagttgactctttgagtcttgacatctgaagaacttgataggtttagcattgacctattttatttatttctcttcactattgctctgtggaatctagctatgttttccggatagcctgttttgctgctgtgctaaaagagaagaaatcattaataccttttattcccctcaaattagcttccttaaacaaattttgatcatatagaaggcatataccctccctttagattgaaattgaggatttaccttcctgtccctttttttttcttgcatgattcatgtcccttgtgttctgtatggcagttgcggacaacacaacgccagtccttgagtgctgcagtaagcgacataggttctgttgtcagcatgattgacaggattgctgggtctgcgcctggtaatggttctagagct

SEQ ID NO: 29491 - DNA, 4973 bp, Oryza sativa
catttcatgttactgcttatttaaagttgactctttgagtcttgacatctgaagaacttgataggtttagcattgacctattttatttatttctcttcactattgctctgtggaatctagctatgttttccggatagcctgttttgctgctgtgctaaaagagaagaaatcattaataccttttattcccctcaaattagcttccttaaacaaattttgatcatatagaaggcatataccctccctttagattgaaattgaggatttaccttcctgtccctttttttttcttgcatgattcatgtcccttgtgttctgtatggcagttgcggacaacacaacgccagtccttgagtgctgcagtaagcgacataggttctgttgtcagcatgattgacaggattgctgggtctgcgcctggtaatggttctagagctgctgttggtgaagatttagttgctatgacaaagtgccgattgcaagccaggaatttcataacacatgatgggaccggtacatcaaagaaaatgaagcgtgacactagtgctatgcctcttaatgtgtcatcagctggaagtgttaatgacagtttgaagcaaacattcagcataggtacccctgaattgcagtcaactgcaacctcacgtgtaaagtggcaaaaaaccgaggtatgctctttattatttcatagggatcaatacattatatgcctcagtgatcagcttcacaatcgtttgtatagatgaaacttagtggcatgatgaataaactaaaatatcatgattatccagctgttttgtttccacaatgacttccattacatatatgggcccagagaagggaagtatagttaaattgacgggagctattctaaatttttggctacctttattatttatcttgtctctggtgcacctgcagataaaccatgctcttatggaggaaatacatgagataaaccaacagctcatagatacagagctccatgtttgcgaggatgatgctgagtcttttggtgctacatcagaagggacagaagggacagtcatcaaatgcacatttactgctgtggctgttagccccagcttgaagtccatgtttgcatcagcacagatggtaagcttctcaaagcatgatctgtggtatcggcttttattgttcgctgatgttccatgttaaaaatgtgtggcagagtccaattttgccattgagggtgcttgtccccgctagctaccctaagtgctccccggttctcctagacaagttcccagatgaacaaaggtcagtatccaatgttttatcagattctacgccaggtactacatattaggctgtcctgattctctgtacataaataaactaaggatgttgcattgtgcttgtgaatctgctatagaaactcggatgacctgtcgaccaaagcgaggtcgaagttcagcatattgcttcggggtttagctgagcccatgtcactaagagaaattgcgaggacgtgggacgcgtgtgcccgcaaagtaattgctgagtatgctcaacagactggtggaggcagtttcagttcgagctatggttgttgggaaaattgcgtgggtgcttaatccccattcttcttcagtcctgctggcaccaatcttcgttttgcatcgatattgtgcgatcgcttgcacgcccttaactggaacggttaatgcatcgctctataaatatatgcacataaatatatgtaaccataattaacattttagcaaacatgcaattgctactggtgtgtacttatttattatgtgtggttgtacttttggaaatcctccctgtttactagctggatttggtagcggcccctcttgtacagaacagtctacatctccagcctggtttgattctaatataaatatactgtgagatcgctgctcgtaatatatgttgtgtattgacaacagttgaaggacgtgtgattttctgagatgtgctgagaccagtttcgtcggacgttttctcttttcttgtgtgttcttttcatatgcggaatggcggtaatcaatgagcatgtacagaatataagaagatcaagctagggaagtatttgacatttttagcttggttgctaagggtgtgtttagttcccgctaaaattgaaagtttaattgaaattggaacgatgtgacggaaaagttggaagttttatgtgtgtaggaaagttttggttcgatggaaaagttagaagtttaaagaaaaagttgggaactaaaccagacctaagtatgatcgcgagagcaagtgacattcacttggttcagttacggaaaattttatccaatttgggacttgtaattcagattgtgtttctgcctgcaaggagtgccagcgctcattatgttatagcacacggtgacgttacaacaggtaatcgtttgatcaggtacagtacagtacagagagggcgtgttaacaggtccagtactggttgcataaaacatataatggtaacaatagtatatatgtaggtctagatggggatacaataatggtaacaatactagaggtggagaagaagcatttccttggctacgaaatgtgatgacatgatggatcttggatttgatgttgggtacaacaggcacctgcgactgagagatgagaaggaacaacatgtaaacgcacagtaatatgtactgtaagcatgatacttgtacgctaaattaattaagctgagatgacagatacaagaaaatgagctaagtactctaggagacatgtatggtagtaacaaggcaaaccagctgctattagttgttaagcttagcttggccggagaaaactgcatatatgtagtgtaggtcctagcaattgcactgcgattgtgcggaggtgtagtacgtagtagtagggtagagagttgatggagtaatttttattaattggcacacagtaattcagtaatcgttggatcgagtagctatagtaatactagaaattgaatggatcgattcattcgatgtgaagtaagatacttactggggaggggaggggaggggaggggagaggagaggagaggagaggaggtcaggcgaggtcttggtcgtcgaagtcgtcggggaaggaattgaagaagtcggcatcgatgggaagggaggaggagggcgggtggcggtcgtcggcgtcgacctccatcatgcccatgcccacggcggaggcggcctccgactccatctcccccggtgagtcctcccactcgttcacgccgcccggcgagctcatctcgatgactcgattaatccaaccacttttggaatcttggattggatgattggatttccgatccccaatctcctcctcctcgctttgcctcctccacttcaacaacgacttgtagttgtaggtagggagggagggtacaccacagcagaggccaccagccggcgtcggcatccaactccaaatgcttttcttcctttctggcctttgtgtgtccaatattaattgctagtggactcgactagacgtgaggcccatttgttggcaagtttcttcccttgtctctctcttgtgagacgaatcttttaaacctaattgctacatgatctgataatatggtgctatatttaatatttactaatgacagattaattagacttaataaatttatctcatggtttactgatggattctataattagtttttttattagtgtccgaacaccccatacgacacgctatataatattcgctgcgacacgccaaaactttatgactctggatttgaacaccacctaagttgcctcttactcctagtattaatatccaaaatactgtatcaaacacaccaaataagcaagtggatggtggtggtggtggggcatcggagacatacagtacacgtgcatttccccaaggagaaaaggagggcagagatggagtgagtggctttgacttacgacgatatagcactagcagtactcgtactcctaaatttgtgttggtttgttggactatctatgtgtgtagtgcatgtgcgcgtgcaagccgcatttttgaaaggaattaatgtgtttttctataaaaagaaaaggagaaaagaaagaatgaagttgctttaattgatgaagttgtcttgtggggtagcagcactttgaagtggtcgctgttcccattggtgtatgtcggtcggagcggaagacaatgcttgatggccatgtgacagtagagtatataagatgccagtcgtaagatgttactactcgtacgtagacacacggagtatggcaagcaatgcaaaaatgtccattggttagcaagactagtgctagtgtagtatagtctgtggaggagtattgacacccctttattatttgcattgcactactcacactcagcaagcattgtctttcacttgagtagtactaggagtggtgctcacttgcacactatttcactccactgctccagtccacagtccagtgtgttcacctgctctaccccaagcccaagggaattgaagcaagcagatgagatgagatctgtgatgatgtgctgcctcctcctcctcctggtctctgccgctgccggggccgaaggcaagtcggaggtggcgctcctcctggagcgcgtgaagccggcgctgcagggggagggcgaagtaggagggaacgcgcagctggccacctggaccgcctccaccccgctctgccagtggcgcggcctccgctggtccaccgccgccaccctcccccgcgagctcccctgcggcaacctctctgcaggcctcgcccaccacccggtcccggacgacctcctcctcctcctctccatccgcctcccggcctccgccctcgccggccacctccctcccgaactcgccgctttctccgccctcgcctccatcttcctcgcccacaactccctctccgggcccatccccctcgccctcgcaacgcccccgccctctccctcctcgacctcgcctccaaccgcct

SEQ ID NO: 29492 - DNA, 3169 bp, Oryza sativa
cgtgcagtgcagtgcaggcgtccagcactccagctacataatcctacgtactactactagtagtagctgctcctacgtactccgtactctactgtacggagtactactagtagattttccttttctcaacgcctgtctgcctgcccaaatattaatcctctcttcctaaaaacatgactccagtcccctacaaaaggatgatcactgcactgatttggatatctgggcaaacacagccttttgcccatttgcattgcatatgcttggtttcattagttttaggtcctgtttagttcgcgaaaagaaaatttttaagcgtcatatcggatatttaaccggatgtcggaaggggttttcggacacgaataaaaaaactaatttcataattcgtctggaaaccgcaagacgaatcttttgaacctaattaatccgtcattagcacatatgggttattgtagcacttatggctcaaaagattcgtctcgcgatttccccctaactatgcaattagtttttttaatctctatacatatgtctaaatattttatgtgatgttttttttgaaaaaaaaatggaaactaaaccaggccttataatgaaatatagtagtatgtcaggtccttcaaattacattctggtatttgatcgtatacgactatctatgtgatgctccacgttagcacacattttacatacgcctcctggatagggggtgaaaacggtacagaaacggacggaaaccatctttatcgttttcgttttcatattttttttcggaatcagaatcagaatcagaaaccccggatatgaaaatagaattgaatattatcgaaactgaaaacgaagcaaaaacggcgcgaatacggtaacgaaaatttatcagaataaaaaacccctcaaactgataaatccaattgaataaattatctatgtttaaaagagtaatgttgttgataaatcccaatgtaggacaaaaaatattcttatgtaattttagatttgcataacaaatatttttttaaaaaaaacagccaaacaccatggtattcactatttagtgcttaaaaaagaatcatggtatttcagtcacaacatttctggtaattctgagaaaattttctgaaatttcgagaaaatttccgaaaagttttcgaccgattccgagttccgacggaaattgcccttatcatttccgatttcatttctgagaaaatattttcgaattcgtttccgattccgaaaaattccgaccgacagattctgttttcgaaaataggtccgaaatccagaaagtttccgtaccgttttcacccctacccctggatctcgcacttccgcagcatatacaaatgcatttccctccttcccgctgcaagatgtaccccagtactccctccgtctcctaatacaatggattttgacattttgcttacactgtttgaccatgcatcctacacaaaaaatcttgaggatccattatttaatttatttgtgacttactttattatccaaagtactttaagcacaacttttcgtttttcatatttgcacaaaatttttgaataagacgagtggtcaaacagtgcaagcaaaatgtcaaaattccttatattaggggttggatggagtactaacaaagccaaacacaaggtcctaggactgctaattgcttgtccctccatcctattttgatcatcctcttaaaattttaagatgtcttcccaaaatgatcatcatcctaacatgtatatctttgtttatttgtgtaaggaattaatgtgcatctttaaatgtgttgcatacaaccaaacaagattaatttctgttgatgtaatgacatacaatatttaaaacatgagctattcacagtatactaagcgatgaagcatcttaactgatgggaattaatctgagaataatgaatgttttggccgtgtcgttggccttggtaccctttgcttgggtgtgtttggttctaagactaggtgggatgggatgaaaccatccctgattttgaggctgggatgattccactcgcgtgtttggtttgtagaataggacgatcccatttttttgtttggttgaagggatgagggagggatgggatggacgctgtttgccaccaatggcgacgccgtttgcaacaaccatagccgccgccgcctctgccctcacctccatctctgccaccgaggtgcgccatgccgccggacaggaggaagctactggtctggggcaccgacaggccggcgcggtcgcgaagggacgcaatgcggcgggtgatggcctcggccttcgcgcagagcagctgtggcttggcgacgacgacggtggcgaggtccgcacgggagagggagagggacaggccggcgcggtcgcggagggacgcgatgcggcggctgatggcgtcgtccttcgcgcagagcacccgcggctcggcgacgacgacggcagcgaggtccgcacataggccggtggagaggagggcgagcacggcatcagggttggagcacggagttgaggcgggagagcttcggggacgacgacggacggtcgggccgcctccggatccgtcggcgcagccctccccatcgtcggatccgccgccgccgccttccccaccacaggatccggtgccgctgagccccccgacgccgccgctgccgagcctgtcgccaccgccgtcgcctgagccgtcttccggatccgttggcgcagccctcccaattgtcggatccaccgccgccgcgttccccaccataggatccggagtcgccgagccagtcgacgccgccgctgccgagcctgccgcctacctccgtcgcccgagcctgtcgccactgccgttgccgagcctgtcgcgccgccttagacaagcccgccactgtcgcccaagctgtcttccgccgccatctcctaagggtgagcagggcaagcgcacgagctggcgtcgtcacgccgttcgctcattccaggtgggacgagtttgtccgccagttttggccggattagttggtcccggatctgataggaatattcctctataggggccaacccatcccactcacccctaaaccaaatactcctaaaagtacgttcatcccatcccatcccatcccatctcagcaaccaaacataggggatgattaaaatggaattggggagtact

SEQ ID NO: 29493 - DNA, 3786 bp, Oryza sativa
agtataagtttgattttttatgggacggaggaagtattacataactgcagtttgatcgcagcaattgtactgatgtggtacaaggaggttccatgcatatgagtagggatggcaacggggctgcacccgtcgggtttcactaccccgtccctgcccccgaggtgatgaaattcccccgttcgccatccccatccccgtgctcgggggaaggtttctcaccgtccccgtccccgcagcgggtacggggcacccgcgggtcctagcacccaacaaacaaacaccaatatacatagaacaattgagcaggaacagatgataaagagtttacaaatacagttcacaccaatgaaaggaagcaagggtgaagaacttcaaaatccaatgtagatgtacaatagaaacagaaacttgatgcaccagtgaatacgagtggcgcacacactaaagcaatagataagtactacatgttgatgctttaaaatcagatcgagttaatgccgtgcaggtagcttgcgtctcacgacggcatcatcactcctggtcagcaagagcggagaaaatgagggcgacgccgctgtgagtcactgggggtggaggtggagcaggagagggcgccgccgcggggagccaaggccgccatggctccagtcacaaactgacgacggcgctgcaatagcgatggcaaagaggcgggctagaccggcgaactagtgaaaatagaggaaaggggatcggcgaatctagaaaaatgcgaaggggatcgggacttctctccgtgcgagtgcgaccatgcctgcgagcggcggccaagaggaagtggggacgggattgaaaagttagggtttctctatatatattgcttctaattgggcctaaatggactgtaacctaaggaatttgctgatgggccgtcatatcttggagccccatggggatacggggccggggagtggtggaacggccccgcccccggcccacccgatggggcctgcttttggccatttgttaccccgtgggggatgaatttaccccgatagctcaccctaatagaggaattccccaccggagaacggggaacggggccccattgccatccctagctgtctgtaaacttgcagccgcttctcatctctctcctctcctctctcatccacctcagcattcagccttcttatagccatctattatacttgctcttagtgataaaatatagggtagtactacttctgcaatatagggtaactatagtgagatcaactctaatagagttgctagatagctttattccaagttaaatttcagcaattttgatcaaaatacaagctccaacccagatggcttgtatggctagcctggatactagccaaatttggccatgctatttggttggccattttgtgggccccaccatgaatctctcctcatccccctctctctcccgcatctttcccgttgtggcctccccattcatcgctatcgccgacatctgtcgtcgcctttaccaccatccttcgtgtcttccccatcatcgtcttccccgcccctgaaggggttgtgcccgcgtgtccgagtccatcgacaacggcagtgtgccggtccctacgctaccccctccgacggtagttgaggatcttgtcgccctactgggcttccaagcgctcccctctctttccctatcctcctgaaccacctcccatgcttgcctccattgtcgttgcctcatccgacgctgcccccttggtcgcgcattcaaggccgcgccgatggagcaggcgagacactacacgggactggtgcaatcgctcgtcgcccgcggtggtgaacaacgcactctacaacctcgtgggcacctaccccaagagccgtgcgccttatcaccgtcgacgtcgcttcccgcgcaccgatgggtgggtggggaaaacaagagagaagaagagaggtgctgagaaactgacatgcgaagctagtaaaatttgaagagtggtagatagagagactattggatctaacaacaaatatggagaggattctttttggatagcttcccaaatggacaaatagagagtaagatttgccactatgttggagatgttttgataaagtacatatgtagtactataagtgtagtgtggttgaaatcaaattcgcattaggttcttcttgtcaatttctatggattactgtgtgtactatctattttcttatatacaagttgcattgggtacatcatacattgagtgtctttgaatggtgaatttgtaagcatcaacagtagtccagcagagcttgatatgtgaaaaggatttaagattcataactaaatgaacaaaaagtatgctaagatggacacataaatcacgttgaagctaactaatgccgaaatatctaagaggctacactacttaaaaaagggccaaaggtgtcggttcctaacaggccataggtgccgatttttcatccggcaccaattggtcggcaccaatactagcaaccgacacctatatggaaaatagaaccggcacctttagcattgctcaggccaaaaaaaaaagagccagctcgaatccaagccgaacttacccagtgccgtcaccgcgcatgcgcccatctcaaaatcaaattgatatccccaaacccaaaatcatccacaaatcgtcaccaaaataaactgacatcacaacaaattcacaaaataaaacatcaacaaaaattatagctagatggatccatgtcgatctgaagagaagaaaaagagatcgatggcggtggcggcgagagtagtggaggaggatccagatctagagaagaggggagggcgccgccgcaacctgtcgcccgtcgtctctcctcttgcgccgctacctgctgcgtcccttcccgccggatccagcggaggggatggtgccgccgcagcccgttgcccaccgcctgctgcctcccctcccaccgtatccggtggaggggagggtgccgctgccacccgttgcctaccggctcccctctagccaccgccgcttgcgcgagaagtgagagagccgagtgagaggagagagagagagagagccgagcagagagatggagagagagatagcagataaggttgactcatatagggaaaggccaatgcgtcgccgcgtcgggctagatcggctcggcggctcaactcggttttctataatttattataggtgccggtttttacgtaaccgacacatgtagcatatcaaaggtgccgggtttttttaaaaaaccggcacctatactatatgtgtcggtttttctttagaaccgacacctatagtttcttaaaggtgccggttttttgtattttcagtccgtggaggaggaaaaatcactataggtgctggttttagctgttccagtacctgtagtgccgatctctatgggcttttttatagtagtgctaccagaatttggctctccaaatacccttatagtgagccaattcattgagcaagtttggccaacacatatagtcgattagtcagcctgccaaggacatgatgtatacctaaaattctttttttttacaaaaagttatatgccataggaaaaaggaaggaaaaaagagactgtgttcaacccagaagtcttcctagctacctccctcctccgatgccctaaaacccgatttgataacattttcatcccttcacattttttttgaactttcacagggggagagcttccccacctgaatttcattagcaaaggtttgttaaaggggattagattacattagactaggtgaaaccccgcgcattg

SEQ ID NO: 29494 - DNA, 8761 bp, Oryza sativa
  unsure (1)..(8761): unsure at all n locations
cccgcccccggcccaccgaagggggcttgcttttgaccgtttgttaccccgtgggggatgaatttaccccgatagctcaccctaatagaggaattccccaccgatgaacggggaacggggccattgccatccctacatatgagcatgaaaaaaagcagacgcaacacgcaagcggacgccgacactcaagatcagacacgacgtgccatattcagcacggcaccactgccaccacacgaccttacccaacccaacaccaccatttcaccattgcactgcacgggggcacggccgatcgaaaggacaaacgagttttcctttcccaaactattactagtactacagtataaaggtgcctctttaaatcgcataaatgataataagataataagtgtgaaataaaatattacaaaatatacgaaaaatataggaaaaaatataggaatggttgtttgattgaccagcgaaaagaacataaaaatcgaataagagagataaagtcaaaagaaaatttttaaaaggttggagtttttttaaagtttcctcaaaatctctttttattgtccattcaatagaaattttaaattgtatgataggatttaatccattgttttaaaggtcttcacacaaaaattttttataggattaaaaatcctttaaaatttctatgttttcctacaaatcaaagggtccataaaggttggatctacttatgggtccataaaggttggatctacttatggcctatttgttttggaggaatttaaacatataagaatagaaaatgtgaaagaacaggaattcgtaggaattttcccagaggtttgggtggatgaaatttttcatatgctttctctctacatctaataggaatgaaaatttttcttctatttttctatacctatatgcctacaagccgaatgatactaatatgaattaattcttagaaatccaactttttttcgtccaaaccaattttttttgtttcccttatcggtcagcacttacttttcctttttttttgaatttttcttcaaggaaaatgggcttttctctctttgatcctccagaggagagaaaacgtgcattttaacttcctccagtgcaatttacatttaggtcttatctttcaaccataaaatctggtttatcgtttctttcaactatcaaaatattattttgcctctgcaaacgtttttgaaggtgattttgtccaatgtggcacattcgtaacatcttgatatagtcttcatccnaatatggcgtataagtggcaatacagccaaagaaaaataaaaaaaataatgcgacccacatgtcagtggcataaccgttcctctctttatatcgcctttcatcagacaaaaccgttaactatattgacttataagcgccatgtatgataaaactatcttcaaaaccattcgaggaggcaaaatactggttttcataattgaagcaggtgataggttgagggatgcgaactaaattcggttatatttgagggagtgaatatggacgttttcctccagataaagttgcccaagtggaaaaagtacaccgaaagtccctcaacttgtcatcctcaacttgtcatcgagttacaaaatcgtcccccaattgcaaaaccaaatatatgacttccctcaacttacaaaactgttaacttttagatccttcagtggttttgaccccattttgtctgacatggcggctgagtcagcgcgggatccatgtggccccacatgtcagggtgtccacgccaacaccatctctctttcctctattctctcccttctctctgtctcacttctctgcacaggctggccgatgggtggggaggaggcctgcagggtgaggcaggagaggagggtgcgaggcgaggcgggactgccgccgctagggaaggagccgccaccgcaccagaaaggcggccatagcaagtgaagcagcggcggcggcgacgagcgagcgtaggggcggagcagcggcgtcggcgggcaagcgcggtgacggagaggcgccggtggcaggcggctgcggattgggagcgacggcgccgatgactccgcgccgctcggcctcgtcgtcatcggcggctccaggcgcatgcagagcagaaaggcggggggcgcgaacgggcgatcggtggcagggatagggctaatgggaggggccccgagtcgtcatcgtgctccgcatcgccgaccgtcgcccgtcacgcttgccctcctctcaaccgcgctcctccctcgccggcgcgcccaccgtgccagcactcctcccctaccagccgtgctccttgagagaaaaaatgtgtgtgtgtgtgtgtgtgtgtgtgtgagagagagagagagagggaaagggagagtgtgctgccttggcatcccaacacatggggcacatgttggtctcacgctgacttagccgtcacgtcggataaaaccggggtcaaaaccacataaggacttaaaatgaatggttttgtgagttgagggatgccatattatcttgttttatggttggggatgattttgtatcttagatgacaagttgagggaccttcggtgtacttttgtgctgcccaagtctaggtctaagtggctgccgtcgtgcattacttcatcatgggcctgatgggcttcccattgttgtcacaagacaagagtgttatgtactggactatgtagttgggctttattacttggtcattcgactccttcgtcttcctgcgcccctcttctccgggtctagggtttgctgctccccctccccgccgccgccgcctccgcctccgccgctcagatgggaggcaagtgcccgcaccgcaaggtcaagaagcgccgcctctcgcacaagacggcccgccgaggcaagttcctcgtcaaggccgacgacgccgtctacgacgagctggtcaagctcgccgacgccggcaaggacgccgacgctacccagctccccgtcgacgaggacctccccggtatgggacagttctactgcctccactgcgagtatgtgccccctctctactgtccctgctctgccccccctttatatcgaatctccaactaggaatacgcctttgcttcctgcaacgaactctctctctatatatatatatattgacgaacatttacacgtctaatataaccactgattctcgtagtttgcacgctgcctttaattgaattgaactgtaactcctgtgataaaccaataatttagtctcgttgattcttgcaatgcctgcaacccttatcaatcaaataatatgttcaactctcgccgtttatttctgataccaatcatataatgcatgcttgctatgttggttgtcgcctgcagtcgctactttgcaagtgagagtgtcaaggaggagcactaccgctcaaagcgccacaagaaaaggtgatcgccttgtccttgctacttttaaatctctcttctaagaagaatacatattggtaacctgccacattccagcatcacagacccttactgcactgcatgtcatggagctaatatatattatatggtgtcatgacattgtagggtgtcaatatatattacctccatcatggttactgaaaacatactaacttcttaaattttatggtcacaagcatctctattccttattgcatttcatgacattggagctaaacagaaaaaatattctgctctaggttgtcttctacagttttgacgagatagtactttgtttcaataatgtatacatgcacacgttttgttgttcagcaacaaatttttgttgtttggtaaacgcaattgcctagagcatataatgtaacaagctgcaagtaccaacttttgacaaattttacagaagacgaaagtccttttgttttggatgcagctagtacatatcatttatatccgtgtagctagatggtcttcagttctataactttgagcttgaaagttaaaacaccagcgtaataattatgtggtatagaaaaggtctctgttgtggtactactatgcagcttaatctactgaagttgttcaatctacttcgctgtacctatctattactccttcggtttcaaaatatttgttttgttaggacaagactttgactaacaattactctattaggatataatgttttgtgacacaattaaatttattagatccgtattcaaaagtacttataattacatcgtatatatcactacatcagtgtagatagttggtcttcagctctgtaactttgagcttgaaagttaaaatactagttaattatcccctccggttccataattcttgacgttttgaacaatgacacagtctccaaaatatatcctagactatgattttctattataatatatacactaaataaatacatttttacttttattatagtaattttaagaaaaatctatatatgttgttctaggggctttaaaccaaatattattaaagttataaaagcttgacctcagccttacacaaaacatcaagaattatgaaaccagagggagtatgtgctacagaaacatttctttctttgtgcaaagtgatacggttcaatctactatgctatatctaataatgactttgcgatacttgtaggatcaagcaaatgtcagggccagccccacatactcaacttgatgcagagcttgctgctggaatggggatgcctgacaatggcctgaagctcatgtccatgtgaacctcttcttgttcctggtttttactcatatgtttttgtcactgccgtacgtatgtacttgctctgcttagtagttaatggagttgacttgatggtgtctgttggtccaagaatttacttttaagaagccaagggttactctgttttgcctgcctcattttgtctcgcttctgattgaatatcagttacctcagtcagtgcttgggatcaaaacgtcttatcggtttattggcattggcttgagcacaagctaccaaaggcaaggggcgttgatggatgcgctttgcctcacatgctatggctgccttatgcctgtagggactaccagcaatgagcattgtatggcataggtaaactacatataggcccagagtattggccacataaatatagattgtgcctttacaggtgtgttgatctgtttttcacgccccatatgatcttttgcacattctggatctacccttccatgacctggtcatgtctccccactgagtctctgggccatgttgatggtgtcgtctggggctttatgcagctgtaatatgcattttagcatgtattagttgcaccgtcacgtgttactggcaactactagtagtgtgttttggtttggtgtaaggacgagttgaaaaggaataggcggtgccatattaatcaatagggctgtcaatgttgacaaatgttcctccttatctaatctacttgttgatcgcaagtgcgtgatggtcacctgacctgggctgttggcttgttggaatggaagtctgcattgcatagaaagggcgagaaggtgaatgatggagatgaaatgagtagaaagatgcctttgatgatgcagcttttgtcataatagcagctatagaggacatagcgatgcaatgcacgcacgctccttgtttgtgtgcgggcgtcaagatgcatatactacttactactgtactctactatgctgggtgttggacatgcatgcatgcatgccggggggccaagctaagctagcgaaatcaattggtttgcatcatcgccagttgtgcaattgtcctgcctatactccttatctttctttcactttcatgctcccaatcatgtctgtaataaagtactacacgtagtaggagtaataagttataagtgccagaatgaagccccatgagctgactcccccgtctcccttcccctggtgattggcgatgagttggattggatttggatctccagaatccatccagatgctgaaaagaaaattaagagcaaggggccaaaacctgtcacgcgctcgctcaaccccaccacaacaccatccatgctcatcatcttgttgtgcagttgctgctcttgttctccaatcgacacaaacacaacacatgccagccgcccgcccgggccggctgtggattgtggaagagagaaaaaggactaatgattccatggctgtcctttcggatcgaggcgccctggatgattagcagcagcaggggcaggagcatggcaatctatctttgatgccaagcaaagcaatggctggctgatatactaccactcactgatccagttgcagtttgtttagggtgtgccacttgtttcagatctctcttttgccttgtttctggcagcatccacaagctcgccttgcgccaattgacatggccaaccccacaaagactagggtggtgacttgagctccttcgcccacacttgtgctcattgctcgtcagaccagatacacaaacacgcgccctgctctactactggagtactactactccagtactggtagtacagtagtacagacacacacactgacactggccctgctgatggtagtggtagtggcagtgttaggtaccccatcgcagaaagagaagaggagactcgccatggactcacctctacagaggagaggtgtaggagtagagcagtgtcagtgtagtatggggcacatgagttttcgacagcactaaatatggtggcttagatttgacagtgccatttggatttggttcatccatgaaatagaaatagaagaggcccccatactgctttgtccgtccggaggggagggggagggaccatgcagcgagcgagcgagcgagcagtcggtgttggggcacacgacggagacgatcatgtcatgtgcaagcaacaacaagacgtcaacattatgcctgcatgtgcatgtgatagtccttccaagtcaaactttggagggtccagaatttctgcaattctgcctccctccctccctatcccttgcctgcaaaacactgttactttggactttggagtgtgaacgaatgatactcctactcctacgactactctgaatgttgtactagtagtagtgacaaggaagccctaaatcccgggtcatacctgctgatcgaattgacttggtaatggagtaatattatactactccagcagcagcagcagcagcagtggtggtgtatcaatcatcctcaactaatcgaactgagcatgctgcttttgtgctggtccttgatttccggacaaactaatcgaagaatcgagctaaaatgatccatcgatggacacagtactagtagtatcatgagctagctagctagcagtatagtaattcatttcattaattcattcttagaacatctagcagcagcagcagcaagaacacacagcaaaagaagaacatgttgttgtatcaaaacgaatactaggtgccgtgtgttgttgttgaggaggaggggcccggcgcaacgtgggagtgggagaggcgctggagctgcagcatgcgcgcgtagcagccatcggggtggtggttgagcaggtgggagtgcgagccctgctccgccaccttgccgtcgtcgatgacggcgatggtgtgggcgttgcggacggtggccagacggtgggccaccacgatggtggtgcggccggagccagaggaggaggcgagcgcctcctgcacgctccgctccgactcggcgtccagcgcgctggtggcctcgtccagcagcaggatgggcgcctgcttcaccagcgcccgcgcgatggcgatccgctggcgctgcccgcccgacagctgcaccccgcgctccccgaccaacgtcccgtacccctccggcagcgccgatatgaacttgtgcgcgttggccgccgtcgccgcctccaccacctccgcctccgtcgccccctcgcgcccgtacgcgatgttgtcgtggatggtggccgcgaaaaggaagggctcctgcggcaccagcgccatggcgcgacgcagggaccgcaggttgaacttgcgcaggttccggccgtccaggagcacccgcccggagttgggctcgtagaagcgctgcaccagcgccagcaccgagctcttgccgcacccgctcgcccccaccagcgccagcgtccgccccgcccgcgccctcaggctcaggtcccggaacacctgcacctccggccgcgacgggtacgcgaagtccacgtgcttcagctcaacctccccccggggccgctccggcaccgccgccgcgtccacgtcgtccggctcgatctctgtcctccggtccatcgcctcgaacaccgcctgcatcgcccgcccgcccttcacgaagtccggcgccagcgtcagcgtctccgcggcgccgttggccgacaccatcagcaccatgaacacccggatggtcttggagaagtccgacacgccgtgcttcaccagccacgccgcgtaccacagccccagcgcgtacgacgcgtacagcaggaactgcgccaccccgtacccgctcccggcgatctgccccttccagaagcaccgccggagcggccccgccaggttcgcctcgaacagccccacgatcttcgcctccgacccgaacgccgccacggtgcgcacgttcgccaccgcctctcccgcgatctggtcgccctcgcgtgcgcccgctccaggtcgcccgagaaccccttgaggaacatcttctgcagaacggtggcggccaccaccagcgggaagacggccagcagcaccagcgcgaggcgccactgcaggacgaagccggcggtgcaggccaccaa

SEQ ID NO: 29495 - DNA, 7496 bp, Oryza sativa
  unsure (1)..(7496): unsure at all n locations
tactactccccctgttactaaatgctaatgcagcaggcaggcgtgtcagctactcagctggcaagaataattaatgaagggccggagtgttaaggtttaattaagcaaaccgcctggcaagagctcatgactccatgagcgagcggcgagccccatcaaacaagagggaaagaaaagaaaagaaaagaaaacaaaggattgattattgggaggaagaagcgggctgacattcctgacaaaatgtcaagctggaatggaatcatcccgagcttaggattccttgaaatttggcaatgagctgcagtgggcactggagtggacaagtgcagttgatgagtgggtgctgcaaaagggcgtcacatcttctgatctagtactagtccgtagtggtagtaggtactgtagctgttgtagatggagaagtcgaaagaaggtgatgagtgtgcaggtgccatggtttgtgcttttgaaagggggaggaagaggaggaggaatcttggcatgatccaataatccgtccatgttacttgcaccaactcggaacagcgttcgaaagcaacccattgattgccgcctggccctagtaataataacataacatgtctttccctgtctctatctaggagtatctctctccctccgagtacagtaatctctaatgtactatctatctataactaaaaaggagggagatgagatgatatgagaagcagcagagagacgtggtgtgaatgtgatagcatagcatgcctcctcgtgctcatgctgcctgcctaacaaacaaacacaacgcattgttgcatggtggatcgtcatcgtctcacagggttaggagaggcagcgacaggaaggacaaacagcaacaacaacaacaagtgaaacgaaggaaattgacggaagcagcaaaatacttgcctgcgtgttgtaggcgtcggggagcttgacgatgaaggagtgggcgttggcgaccctggcggcctcctccaactcctcctgcgtggcgccgtccctccccagcagcaggttctcccggatggtggtggcgaacagcgccggctcctggctcaccagaccaatctggcggcgcagccaccgcaggttgaggtccctcaggtcgtggccgtccagcaggatggtcccggcgttgggctcgtagaacctctcgatcagcgacaccaccgtgctcttccctgacccggagctccccaccagcgcgatcgtcttccccgccggcacgctcagcgacaacccccgcaggatccccacgtctggccgcgacgggtacgagaactccacatcccgcagctccacccgccccgtcaccgcctccagctccaccccgccctcccgctccatgctcggcttgtgctccatcatccggaatatcttcgccgccgccacccgcgccttggcgaacgccgccatgctcggagccgactgcccaagagccctgcggatcggattggatttttgttttgtttttactctcaatccggccaatcggagtacgtatatgctacggagtactacaaagctttacttacaggccgcctatcattactgagaacatggtggcgatggcgaggcctccgttggtgtgggcgcgtcggacgaggtgacccccgtaccagaggagcagcgcgtagcagcagaagacggtgaagtaggtgccgcccagtccgatgcccttggcgaagccggagcggtagccgatccgctgcgccacggccagcgccgccgagtaggcccgcatcacccgctcctcgcccacgaacgactgcacgatgcgtatctgcgccagcgcctgctccgcgatgccgctggcgtcggacagcgcgtcctggctcctggaggagagcttggcgagcgcggcggcgctgaggccgccgatgacggcgatgagcgggacgacggcgagggtgacgagggcgagctgccaggcggcggtgaatccgacgacgaagccggagacgaaggtggcgaggtagtggatgaggttgccgagcttctcgctgatggcgtcctggacgacgacagcgtcggcgttgatggcgtggatgacgtcggaggtgcggacgtcggtgtcgaagaaggagacgtcctggtgnaggcggncgtgaaggtagcggatgcgcatccgggtggactgccgctcgccggtccacatccagcaggagatctcggcccaggaggaggcccagatggcggcgccgacgacgaggaagtagaaggcgtacttgacgacgaggcggagcatggtgtccgggtgggcggcgtgggagccgaaggagtcgacgaggtcggcgaagaagcggaggaagaccgggagggagcagccgtggacgagggcgcccagcgtgcccagggtcatgaggacgtagtcgaggccgtcggcgaagctgaagagttgacggagcggggccggcgggaggggcttgggcggtggaaggtcggtggtttggatgtggggaggcggcggcggcgacttaggaggaggaggagtaaggggagcaggtggcggtggcgctgctgctgctggtgcatcaggttgaggatgggattgtggagaatggtggtggtggaggaggtgcgagtgcgggggctggtcggcggaggggagatggaaggcctcgagctccgggtcggcggcggcatcggcgccgaggacgacgacgcggccctttatctcctcctccatgcctagcctaccgccgccctgcccttgctcgatcgcactctgctctgctctcctgttcctgtactaataatctcttgctgctctgctcttctctaattctagctctacttcctaataattctagctcaaccctccaattcttgagttgacgagttgctcaattcctctcttcccatctgtgactgtgagcaaggaggaggaggaggattgccttgcctaatggcttatggctggtggtaagaggggacgacatgtttataaatagagagactactggactaatagaaaagaaaaggcacgtggccttgcacaacaagcctggtccactaggccacaccaagtcggcttctagttctacaccagccagccctttttcccttcatgtagagtagtagttatccacggtaatactcttaccgggtgtgtgtggcctccttcaacctcaccggccgacccgcccggagccccaagctcggagctccggtaatctctctctctctttccacggtaatataatatccgcaggcaggcaggatgttgcagttggtcctttcacatattgttgcttcagagttcacacgagctaactaccaatcatccaaaccaaaacctaccacatgcttcacttgacaatataatcaagcttttatttccaacgacgaccgacgaccactgtcacaaatcactatgctacgtaagaagtagtagtatgcacatgttgtcgcactccattttcactgtacgcatttgtacaactcgtactggagtactagtatgcatgtatgcgcatgctggactagctgctagtatatactccctctgttttgaaatatttgacaccgttgactttttagtaaatatttgaccgtttgtcttattcaaaaacttttgtgaaatatgtaaaattatatgcctacataaaaatatatttaacaatgaatcaaatgatataaaaagaattaataattacttaaattttttgaataagacgaacggtcaaacatgtactaaaaagtcaacggcgtcagacatttcgaaacggagaggttactccctattacgtactcgatcggtactcctaagcatggctgtgcatagttcgtgtgccaaaattctttttaagtatacggacacacatttaaattattaaacgtagattaataataaaatcaattatagatttcacctataaactgtgagacgaatcgattaagcctaattaatccgtcattagtcaatatttactgtagcatcaaattgtcaaatcatggcgtaattaggctcaaaaattcatcttacgatttacatacaaaccgtgcaattgatttttttaatccatatttaatgctctatgcatgtgtccaaacatttaatatgacggaaaagttaaaagttttaaaaaaaagtttaaatctaagcacggccaatactactagtactactcctcctccaatcaaaccttcaacacctacacagagtgcagacagagttgctagctaggtgccgcccgaccggccagcagtctcaaatcttttttttttaagaaaaaattcttccaatacttatgctaactgccacagtcaccaagtccacccgtacatatcgatctacacctatatctctctctcgcaccaaaccattcctgcaaactttctttcttcaattttaaaacaaacccccaagtagcttatactagtagtatttctttctaaaaagatatattttcatcacaaacacccatggaccatggtgcatggtgtggtaattttatactcctactttatggtacgatggtagtaactaatttaattaattactattgtaactgtatgccacaggtgatgcacggccagccaaatgcttgcaacttacgctgattcacgccaacggagaaaatgttatgtggccaatcgctttacttatcttatggaaccacgtgatctctaacaatgttgtaccattacaacaatgtcgtcaaccatcttatcgcaccccaatccattccgctcacgcattgcacggacggcattgcggtaagtcattacatggcttgtacgcacaatcataagtaaccaacatttatttactgtactatatacttactatagtagcacatttaatttgacaactcaaaaaaaataaagaaaagattagattaaaaaaaagtaagtaactactggggacaggggcaaatccagcctagagacaaagctggtgtcggcctatgctaatttttcatcatctcaacccgtcatggtgaaaaaagagtctcgacccatgggctttcaacaccagatgggtcatggcggtttgggtctgctccttactaagggatttgccagttctcatatgattaagattcccctgtcacctttctcaaggaatcgtcgtcaaactccaagcaaggaagagggagaagactcaccaatggcaacgactcctcaacaatggtgacgaccagtagcgaacccagaataaaaattaccgggatccaatgcgtaccaattatctaaatttttacttatatactaattaacatcatataatttagttagaattgaataatttactggggtccgaggaaccgggtaaatgtaactaggatcgccactggtgacgatgtcgaaactcttacgaataacctagggtttaggtttccagggtaggggtcgtgagggaatggccgtgagcagtggtaagaccggcggtgggtggcggagtacatgggcggtgggtaacggagatgccaccgaagctgtgtagttagaaaagaatgttcaaatatatggacatctagatataatttttccataaataaatcataacattaaacatgtaaaccaatagaaccatcttaaataaatcaaacatactaaacatgattgatacatctcgacgattttgattctattgtggaagtggagcagcacaacgcactgcacatatatacagtgcacggtattggatattgatgatgcacaacaccctaacgtagatgaagatgagtcgttgtggacgaacaacgagcagtcgcacgagcgattccaaaaatccttattagtgccttctcccgatgcaggatgtctaagacgaaggtttcagagatatgcggaaggttgtggccgtacggcggtggagtgagatgtatggttgtgacgcctgccttattgcccgtgagctgtatgcggctagggttagaccacaattagtggttagctggtgagttggtggagcagtgggctatttgggccttgtggctgtggttggaacgaactttgtggtagtcaagtattcgggtaaaatccagatatttaaaaaggtaatatccgtgttttataccagataacacgcatatgtaagatatcgtcatcccaaacccgatcttatatccaacagaaaatacctatatttggacctgaaaacagtaaaaactcccgaatacctcaatttttaacctaaaattgtcacaaattaatacacccgggcaggcgatcaggaaatacccaccctgttttcacccctagccagcaggcatgaaaagtagactacgagcaactacgcggtagagaggagtatccaaaaccctataatttttttgcgtgtgttgcatagaggtggtggctcgatatttacaaagatataagaatgcatgatcaggacaccatacaatctccatcggataagctgcgtgtaacctatctagagattcctcgccacttcacgcaccaagaatgcgatgagtttccaaacaccaaattatgcagcaaaaccaatctgaaaaaaaagagaagtcgtgtctgcataagcataagaaaccatttttgtggaccattcacacgtatgcctaccaaccggcctgtgcctagtgaggcgagcgagcacgtgtgtgtcccgtaattctcacccccacacattacttaagtgcttagaagagcgctttctcttttaagaaaatcaccctgttttggaaaaggcaaacatagtactaaagattaaaatacatcccttcccatgagatgagactttgtgattttcttagaaattaatcttcgtatgagtcttagcctacatattaattcgagtagaggacgtcgggcagggtcgttagcagagggttatatcctggatggttagtaggcggaggcaacgacaagatagtgggccaatgggcgcgatggggagttattgctttctggtgccgacgaggctaagaggtagggcatgggggtggggggagggggaaagggggtatgtgttaggtggttaacgaacacacgtcacgatggagaggagatgtgtgtagtgggagaaatgcatgaatctggaaagcaatatagctagtgtaaatttggctgaaatttatggttgtttttagatgactataaactagatctcttatgattatgatgatacccgtacattttagtaaggcaagacaaacctagtagtccctctctctcaaaagagatatctaaccctagagtgaatttagatttatcaccggaattgggttttttttttacaagggagacagggacccatagcctatattttttatataggcagacataagttgattttttttttacaaaaaggcgtatgtgttaagtagtatgccgtgtatatacgatgcagatgcaagcatgttcagcgtcgtacgctcatcgcagattaccgaagcacttcctatatatatatatatatatatatatatatatatatatatatatatatatatatatataccagccagttaatttgcttcgcggtatacaagcacttttaagcaaggcgtatt

SEQ ID NO: 29496 - DNA, 1492 bp, Oryza sativa
ccatccatccaacaacgcaagttgcagattctacttggtcggagtttcagcctccggcgaactgctccgatcgatcgatcgctcgctcgcggggacgcgacgaggtaacgacgcccatccctccctgctctttcttctcttcgatccttcttcgcggtcgtgtagggatccatccatcaaatctgaatatctaatcgaatcaatctatatggcgttgcgtttgcgtttgatttgaaccaccatgatgatgatgatgattttgctgctctgagagatgatgctgctgctgatgctagggtctgcttgcttcatctgtcgtagggtgggtgaatcgcttaggatttgggaatggctcgccgtttgattagcccctgccaaggctctggtttgcttaacgccggatttctcggcgtcttctcctcccaccatgtgattccactatccccctctccctcctcccttccccatcctccacttaaccaggcacctcactcacattccatgctcaaacccttgccctcctctcctctgcaatttctttatacattattcatacacacataggtttcgatatagattctcctagtgcgctggaatattgtttgtactagtattattaaagtttatatatgtgtcgatgcctctaacacaaatgatacatctacttgtcttctcctcactgtttcttccccccaattctattccctgtttataccagtatcatcgcgctgccattgtcatcatcacataggagttccccaactgaagaattgctaccttcctaatttaaggaaggaggtgtgtgcctcccccttgctctcagatgataatctcatgccacccacccagttatagcttttgttgcatggcattgctgctgttgcttatagattctagtttgtattgttgtaggtctcgcattggacaagaccagccacgccttccttgtcgctatatgtctgtatcatctcgcttatatgttacttttcttcattaactccatgtttttacttctgtagagtacatcttgatcggacaatttcccgatatttcagagtgcaaggcttgccagcaagaggacaacttgttccgttgcaaccgagccgccgccttccacaaccgaagaaccagagatggatcttccaaaggagatattcctgaaagaatacaaaaagcctgattacttatttgactcggtaactacatacctctctttttttgcaaccatccaaaattttcaatatctgaactccggcttgcaggctttctaacaccatatctatggatacttagctgtttgcaatctgaaatttaactagatatatatgctagcctgtatgggcatcttggcatttaatgaacataatgggctcctttctgtttgttgtctttactaccttcctgactttatgctgggacttaattttgggcaggtcaatttggaatttcaacttggcgaagacaaaacaatagttaccatctaaaatagctg

SEQ ID NO: 29497 - DNA, 3524 bp, Oryza sativa
  unsure (1)..(3524): unsure at all n locations
tcaattgtcagaactgacaaagtggtaatcagtgaataccatgtctaagaatatgcatctttctaactgtagggtggcaagcattatgcattgtgggaagaccccctcaaagaaaccaagctacttatttgctttagttgctggtcagttggattgcagggaggactcatttactacatgttctggccgaaaagtaacacttagaatttggactcctggtcaagatttagcaaagacagcgcatgctatgtattctcttaaagcagctatgaagtgggatgaggaggttggtcccgattcattctcctatgtttttgtgcaattcttcgtcgtatcactaacacaatttattaatcagattactaatacaattctacctttggattcgtgccaggtttttggccttgaatatgatcttgatttgttcaatattgttgttgttccagatttcaatatgtaagccttctctcttattacattgtcatgctgcaattttgttcagtctccaagacctaggactttgtgttttgttttgttggtacagttgttcttccagtggtatttatttttctactacagattgttctcactaaatctcctgtgttggttaaatagcagatcagatctaccttatctctctaacaacactcgtactaataaacttttgtgttgttttgcaggggagcaatggagaacaagagcttaaacgtaagaatctctctgtggttacaaaatacttaaaacatgaaacaacactgattcctgttatatcaatgaacagatatttcaatctagacttgtgctggcatcaccagagacagctactgatggggattatgctgcaattttaggtgtcgttggacatgaggtacattatcagaaatgatcgattttcactcactatattctttctgatcatgaattcctgttgatactaacttatctttcactttatttttgcagtatttccacaactggactggtaataggtaaatatcttaacgacttcaccgtactggttacatctaataattaaatttcaacttctaaaacatgatgtgtttggttgatttgttgccaattgcatctttgctcgtgttttttcattagttatactatttttattgatctcacgagcttcagttagtttagaatcctccaaaagaagaggcatcctttcaactgtcctctgtgtcatgagattcgtcatgattagtactagttaggacagaatatatcctgatgaatatcttgtgcaannnnnnnnnnnnnnnnnnnnnnnnnnnnnnnnnnnnnnnnnnnnnnnnnnnnnnnngggantnnnnnnnnnnnnnnncaggtactcatgaaataggcttttagtgatttgctgcaatgtttgggttttatcgtgctctgttaataaattgaatctgcaggaattctcatcagatcttggttgtcgcacagtaaaacgtatagccgatgtttctaaactcaggacctatcaatttccacaggttgtgtttctttaaatttcccttcactagtactggattctaattggtttgatggcagttacatttgttttcttgttttaaatcattactttcctccctgatatccaggatgctggccctatggcgcatcctattcgtccgcattcgtatatcaaggtgacaatacttaactgtcagttattgtaactactttgtgatttttagccaccatacagatctgatattaattcttctaattttactggcagatggacaatttttataccggtgagttgctctgtctgtgaagtatgatgtgcatctaatgagaagtactacatcattagctaattattttcaatcattttatgccctggtgaacctccaaccttattatttgttgaatcttgtgtggtgatttgaacgtgaaaaacctggcagtaacggtatgttttctgttctgttcaattagctttcaataaagttgtatgggaattcttttgtctaaagaaatcctggaacgttctgacattttcttttgctgctttctactttttcatccaatgattatgggatttcatcacaggtttatgaaaaggttcgtttgatccaatgttttcttattcacttttgacccctaaccccagtgggatgtaatttgtggatatgtacttgtagggtgctgaagttgttagaatgtacaagaccatgtttggagcttcagggtttcgaaaggtaaaagttaaatgcagaaagcatgatgatgatttcttttctcccatggtggtgctgtgggcttaaatatatgaaaataaaagaaatgagaaaaccgattgctttgttatcttttggcaaaaaaaaaaggaagcaccaaagaatgagaatcttcatgagatctgtctcttttcttcagttatcaaacgtgtgttatctgctcgttctgtttagttaacagtttgtatctcctgcacagggcatggatctttacttccaaaggcacgacgggcaagctgtgacttgtgaagacttttatgctgcaatgtgtgatgcaaataacacccagctgccaaactttttacaatggtactagacatctatctttcaacgatgcacatgttgcaagcacaatctgatcttaaaacaaccatgcaatagtgtactctcaggcgggtactccaactgttaaagtgagctcttcatacgatgcaagttctcagacattttctctgaaatttaggtgagcttctacactaccaagtttttagttactttcacttaaagagttaacccagtttatgattctttttctgtattgcttgattttccgttcatgtttttaatccacggattatagatattttgcttcttccttttctgccttctatagataatttgtgaaattagaatattttcaactaattccttccgtccttttaaatatcttagtcaagaagtgccacctacccctggccaaccagttaaagagccgatgttcattcctattgctgtcggacttgttgattctaccggaaaggatatgcccctaacttccatttacagtgatgggatgctccaatcactcactagtgatggccagccagtcttcactactgttcttcaatttaataaggtataagaactgattattttccagtcaaaaattcctcttcaatggcaacttcagggccacaagttgatttctttggattatgaaccttgcatgccatgcaattaagtcatttgtgagattatcattttgaactcttgctatactttgatttttatagaaagtactaagaattgtgccttagtcaggatcacgtggttgagatgtgtaaagacatcaacctgcaatttttatattcgcgttcagacattacatgttcttgtctgatcttcaaaatggctgaatgagacatttttttcatctttcagaaggaggaagaattcatatttaacaacatacctgagaaaccagtgccttccttgttgaggggatacagtgctcctgttcgtcttgattctgatctgactgagagtgacttg

SEQ ID NO: 29498 - DNA, 2033 bp, Oryza sativa
tggatgaagaaattaacgcctcgggaatagcagagatttttccaaccagtttttcttgctcaaccaacacggtctcctcatccaacccgtcaaaatcttcgtcagacgcagtcaaaccttctgactccggtatcaaactcaactgagaagaggtaaaagaaggaccacccctctcagtaagattactatcagtagccatactcacatcagagacacccggtccagacttctttcccatgtccttgtcattttccccatcgtcatttctcttcccatcacccatccccaaaattatccatatccaaaggaacaggatccccagcaccaatatctgactccactttaaaagacagctcatacaaatgatcaccaatggccacatcaacaacatcagggattagagatgggtcaaggaccaaaacttgtaaacgagctatctcataccttctagtaaataacatatcaacagctttagtaatcccaagaatagaaccaactgcccaaataattaaatattccctcaactcagaaggaagccccttacactgaacccaaacttttggaatgacatatttcacctcattcccaacacctctttctatgatctccatctgagcctcaccaactttagtgtgcacctttccccattccaccatgcgattcagctcagcagcagaaggaaagatggtatgaaaagtgttatcaccattgtcatgtaccacccacctccatttaccaggaattaacctctccaattcagatacaacagcggggggccctcagctttaactgtcatctgaccattagatattttaaccaaggccgccctggggtcatgcctaatcctttgtccagctgggagggggatatgaaaaaaacccaaaccatcacccccataaccacataattgagcagtaggtttcacagctgatctaaaaacaggacaccgggtagcaatgtgatccacactttcacaaatttcacaataaaattttgatgaacactcctgaagagtatgccccttagtcaaacacctatagcagtaaggtttacccaatcccttagtgtctgcctttgatttacctttctctgaatcagtggcgcaaacaagcaacccttgttgtgcgggttcagcacccaccgccggggtaacagatgtgatgacatcacccattttagcagcagcaacaagagtaccacccacagcaaccgatccactaactgacccagaggtatttgcagttaaacctgcagaaccactagccgaagttcttccaaaactcggtatcacaccaactgaattaactgcagaagtcccaacaatcttacccacatgtccactcggcgccaaacctgcaggtagcactagcgatgctgacacagaggtagcagcggctccctgaccaccaccacccagcggaagaccagctgcaggaactccacccgggtataaaccacccggcggcccaaaagcacctgccggcggcgccataccacctgccggcacaccactagatccacccgtcgctgcaaattgaccaccagacgacggcacaccgaagaactgtgacccagatgcatcacttgccggccggccaaaagagcccaaagggaaccctaaaccggaattgaagccagttggcccagcattctgtccaaacccaccgttccaaccttgtcctcctccaaaggtgccatgccatctaccactgttgccgtgagagaagtcatggcgattgttgtgaccgccaaactttccacgaccccgggcccttactcctctaccatctctggcttggtatggaaaaccacctccggaacccggatgaaaaccccgagcaaagccaccggcatgcccggcagcaccgaaaccctggcgattgtttctctccattgggcattggcgaaaaactaacgacagcggcgtacgagcgagcgccagaaagagattgatctcccaccaaacacctgcgcctcacgggaccaaattttctaaaaagagcaactaaacccggttatgggcctatacggga

SEQ ID NO: 29499 - DNA, 1932 bp, Oryza sativa
cttgtgcaatttgcagatctcagaaggaaaagaagaagaagaagaagaagaaaagacttgcaacctgcagagttcagaaagaagaggaagaagaagacgcgtcgcaaacttcaaatcgagcgaagtggagacttgccgctcgccgccaccgccgttcgctgccacagccgatccggcccccacctgctacaaatgtctgaaggggaagagggcggcccctttcgccgagcgatgaccggcgaccacagcggcaccacgctgcccctctcctccttcccgcctcctcatgaatgaagccaatccccttgactgagctcggagaagacagaatcagtgccgccgctctcccgcccgctgtcgccactccggacgccgccgccgccactggcctccgcttgccaaatggggagggagagagaaggggaggatgaggaagggatagactggccccacttgtcagtggtcccacaaatttcttttgtgtgtgaatgataagtgagcccacatattttttttaattctaatgacacaagcgtcacgtcaataccacgtaggacgaagactaggtcaacattgccacgtaacgtgccacgtcagtaaaaccgctcaccaaaaccgccgaaggagtcaaattgcaccagttttaatagtttaggggtcaagatatctggttttatggttcagggtcatggattagatttaggccactttttaagggactcaaagtggacttattccttatacattccaatccggaaaaagtacaccgaaggtccctcaacttgtcatcgaattacaaaatcgtcccccaaccacaaaaccagatatatgacatccctcaacttacaaaaccgttcactttaggtccctcggtggttttgatcacggttttgtctgacgtggcggctgaatcagcgtggacccatataggcctcaccctatctctttcccctcctctctctctcacttttctcctcttgggcaggccggccggcgggtggcgaagaggtcgccgacagcggggtgcagtggctgtggcgcgtacctggccgtgccgccgggggcgcggtcggtgcgatgcgcgctctgccatgccgtgacgcgcatcccttggccacgccagccacagcgagcttagcactcggagccgcgagaagtagtcgctgatgacgagcagcgcccgcgccgcctgcctcgtggccaggatccggtgcatctgctggagtgtctgctacatcagcagatcagcctacacaaaaaaaatcatcgcatcacgccatggtaataagcaattcagttcgccattgatgtttgaccgaagcttgaggaagttctccagcgtggtgagcatggccatggcgatggccatctgtcccatgtagttagtgacgttgtcgacgaccacggtggtggccgccgatgccattgtgtctcccagcgtctgctgcagagtctccatcccctgcgacagcgcgtcctcggcctgctgcgactactgctgcaggttgcagatgcccatcaactgctgatccgtcagcggctcaagatggctctcaagaacctgcacaaacaacaacatcatcatcattcaacaatagcggtcaatggtagcttcagattctttgcttgttacttaattgggtgggtgatcactcgtgtcaaatcttgaggagctcagaggaacagaagccgccgagccacatgaagaagcgctcagcgtggctcatccacatgctggagaggacatggaatacgtcggcctaggtggcgaagctcttgaggcggaacacctggtcgtagtgcatcatcacggcgtcgacaagcacgcggagctcgtcctcgctcatcagcgcgtttgcgccgccgccgccgttgacgacgtcatcggggtgcgggcggcggcgagctacccgcgcgtctgcggcgagaagc

SEQ ID NO: 29500 - DNA, 3339 bp, Oryza sativa
agaccaataagaccatcgtcactgccgctctagctcccggcggcggttgctgcaaccacacatggtccttggccgtgcgcaccgccgtcatgttcgagcccgtcctctctgcagcttggtgtgttgccgacgccctcctcctctcccgcactcgccccgccggctgccctacccagggaagagagagagagagaccggaggcgcatgcgcggccggtggccggcagtggagaagagcggcggcttgctcgctccgtcggaccacctcacccgcctcgcccggcgacctcctccccacccgccggccagcctgcccaagaggagagaagtgagagagagagaggaggaagggagaggggaaagagggagggtgatgacgtggcatcctaacatgtggggcccacgtgggtcccacgctgatttggttcagataaaaccacggtcaaaaccaccaagggacataatgtgaacggttttgtaagttgagggatttcatatatctggttttgtgattgggggacatttttgtaagtcgatgacaaattgaggggccttcggtgtactttttccttccaatcccagtgggcctttcttcactcattccgctgggccctgcatcaaaatctctctatctctctctcctctccttttctttaattttggcttaacgtacgtgccactacaaacaagtactccatatttttctcttcaaaattcaaaatcattggttacttcaattgcatctctcctcattacattgctaatcacgaaattaaatcaagctcagtgtgcggcctccaaaatggattcaaaagaaatcgtaaaatggaggcgcctcgatcgctagctatccaagatggacggcgtcgacagggacacagcggcgcggctcacaatccggcagcgccaacgtgtgctgcagagggccatggtgatggtacacaagctacccttacggcggccgcggcttgtaattaatttccttattcattagttagctacgtacgaaattgcatgcactaatcaatttcatcaaactagtgtgattgtccacacacagattgtatggtttgtatcattgttttttctcaaataatagcatacatattttcacatttttataattaaaatatattaaaataataatatactttaaattatgtgctaacctgatcaactaactgatgtgtgatattatgatgaatatagataattccttactgttctattaatcatacaataaatcaaagatatgtttttaataaaaaaatgtatttcaatactaattatttttaatttaaaatttcaattatttttaaattgtattcctatatgaactataactctcattctaatatttctttttaaaatttctaatttccattatttaaaattatatttatatatgaactatagactcttcttctaatatttcttattatttttaaaatttagaatttccattatctttaaattatttgtttttatttcctaatttcatctattcctaaattatattgctatatggactctagaaacttatactaatatttctttttttttattttcaaaattttattatttctaaattatattttttatatggactctaaactattctttcgatatttttattttttttatatttctaattttacatattccaaaattgtattgctatataaactctagactcttcatccagtattacttaattttaaatttgagttttagatatgtacaggttatatttatgtatatactctaaactctactttttgttttattatatgtttaattctgaattttagttagttctaaattgtatacctacatggattctagtccccgcttccaataatccttattttttaatttcgaatttcaattatatgtagaatgtacttctatatggactctatgttctttttatattccaaatttcagctattcctaaattgtattgctatatgggctatagactcttcttccaatattacttatttttagttttgaactttagatatttacaaattgtttttctatatggactctaaactgtacttttaattctaaattttaattagttctaaattgtatacctacatgaactctagtcttctgttccaatattcttatttttttaattctgaatttttattatttctaattgtattttgttgacgaaaaaaatcgaacacaccggcttgggagatctgcttagctcctgtgcaggtacaaagattgatgagatgcgggcttgccagtcagtttgatcctgcaactgacaagatatgcaaatagcagatcaaaacagccgatcggctgacaagccgatggagtagttccagccgatagccgataacagccgatgccgataccagccgatagcgatagggtttaagcaatcggctatatatccaatgtagataatgatataaaggcaatcgactgatgatgatataataaaataacaatatagtcctgtataaaccaatcggctagcaatgatatgataaataagcatcgatccgagggttaaaacacacatcggctggaggtccgatatcatgaaatccacaagattagattaaacagtgaaacctttgttgtcatcggttaaatccaacttatatgtatatgcaatcattatgagccgatgcaacatccagataactcaccggctgaaaccctgatgaaacccttattggcaatcaagaagcaggctagagattatggttttaagcacgacttagtagatcaaacttaactgatgcagcactaagtatgaaaagaaacataatatctagacaatcaagccgttgactgagttttcagggtggtagatgtctaagctaatctaatctagtaacgcgatttagccgataccggcagaaaccctaaaacgagaagcagccgatagagctaaattgacatgctaagactagattaacagaaacatatgataaataggtaggcaaatatatcatccaaaccagagcaatccaaaaggtcaaatgtaccgatgcagccttgaacgacgccgacgtagacgatacaattgcctggaccggcggaacattggacttatcccttcgccggagatcaaagacgatgtagccccgcgtcgggtgccaagtcccaccgaaaaagggtagcgatgcgccgaattgtattgatcgtgaagatagattacaatgaccccgggtgtacatatttatacccatgggttgatacaagtccttgtcggacaagaaagaaaccttcgtaaagataaaatgaaaagataaagtccttataggacactaaacacactttcctaaagataaaagaaaactaa

SEQ ID NO: 29501 - DNA, 618 bp, Oryza sativa
ccataggatccccgtacgtaggattatgtagctggagtgctggacgcctgcactgcactgcacgcatatgatatgatactccggccagctggactggagtatgttatgtacggcggagtcgggacgacattatattggaattagacggcggcggcggtgggcgtgccggcgtcgctcctgggctcggcggggctgtagatcgccgacggccggctgctgttccggggccggacctcctccagctgccgcaccacctccgccatggtgggccttgccgaagccaccggcgcgcagcaccccatcgccagcttcagcgcctgaagcagcccctcctccgcggggctacgcaccccgcgcgccacctccgcgtcgaacacctccatcatcgtcacctcctccagcaccgccgccttcaccaccgccggcagctctcccgacgccttccgccccatcagcagctccagcagcaatatcccgaacgcgtacacgtccgtccgcgggctgcacctccccctcgactgcagctccggcgccctgtacccgtccgccttccccaccgccgccgccaccagcagccggtgcactgcgtactccgccaccctcgccacgaaccactcg

SEQ ID NO: 29502 - DNA, 1282 bp, Oryza sativa
cccctgtggtcgccggtcatcgctcggcgaaaggggccgccctcttccccttcagacatttgtagcaggtgggggccggatcggctgtggcagcgaacggcggtggcggcgagcggcaagtctccacttcgctcgatttgaagtttgcgacgcgtcttcttcttcctcttctttctgaactctgcaggttgcaagtcttttcttcttcttcttcttcttcttttccttctgagatctgcaaattgcacaagtcaagacaagctagctcatctcaccttgatctctacggcttccaaaagcaagatggaatctaacaaacatatatatatatatatatatatatatacagtagcgaatccgtcttgtatatagttccgtattcatgtgatgagagagactggaggcattgggcatttgggcgacgccggctcactttggctccagcttggacggcgttttcttcgaagaaaccttcctccggtcgttctccggttgcggccgaggatctactgaagagcgagacaagaaagctcgtcttcggctacgccatgtggctgaggtcgcggcggcctcggcgttgaggccgaagcctgtgcatgtctcagctgctgctgttgatcatcagaaaaatggaatcggtgagtcttctggttctcgtttttcagttttgcaggctttgcatggtgaggagtcttggccgttggtgtcatcttctctggagtgcgcatcaaagccatggagtgggccgctgccgtcgccgaggaagtctccgccgagaactgttggtgaggctatctattcagcgctgcaagggaaagtatcatccgttttcccggcgaccgtttctggttctaccccggcgagatttcaatctcctccggtggggaagatgcggtttcaaaagtccgatttttctccggtgaagtcttccgattcggtgaggtttccacttcatccgacggtgacgaatttggaatttcccaaacttccggaggttacaaaatctgaatcaattaacgtaagtccacaatgtaccccttatccaaagcccgctatcccctataggcccatacccgggttagttgctctttttgcgaaaactggtaccgtgaggcgcaggtgtttggtgggagatcaatctccttctcgcgctcgctcctacgccagctgtcgctagttcttcgccaatgcccaatggagagaaacaatcgccagggtttcggtgctggcgggcatggcggtggctttgctcggggttttcatccgggttccgtaggtggtt

SEQ ID NO: 29503 - DNA, 661 bp, Oryza sativa
atgtttaggctgacgcaaaaagcatggaatggcaatgcaggttggggagcgcgggctgcagttgtcgggcgggcagaagcagcggatcgccatcgcgcgcgccatgctccggaacccggccatcctgctgctggacgaggccaccagcgcgctggactcggagtcggagaagctggtgcaggaggcgctggaccgcttcatgatcgggcgcaccacgctggtgatcgcgcaccgcctctccaccatccgcaaggccgacctcgtggccgtcctccagggcggggccatctccgaggtgggcacgcacgacgagctcatggcccgcggggatggcacctacgccaggctcatccgaatgcaggagcaggcgcacgaggccgcgctcgtcgccgctcgccggagcagcgcgcgaccatccagcgcccgcaactccgtcagctcgcccatcatcacgcgtaactcctcctacggccgttccccctactcccgccgcctctccgacgccgacttcatcaccggcctcggcctcggagtcgacagcaagcagcagcagcagcagcactacttccgcgtgcaggccagctccttctggcggctggccaagatgaactcgcccgagtgggggtacgcgctcgtcgcgtcgctgggctccatggtgtgc

SEQ ID NO: 29504 - DNA, 584 bp, Oryza sativa
cataaaccaacagctcatagatacagagctccatgtttgcgacgatgatgctgaggctttcggtgctacatcacaagggacagaagggacagtcatcaaatgcacatttactgctgtggctgttagccccagctagaattccatgtttgcatcaacacagatggtaagcttctcaaagcatgatctgtggtatctgcttttattgttcgctgatgttccatgttaaaaatgtgtggcaaagtccaattttgccattgaaggtgcttgtacccgctagctaccctaattgctccccggttctcctagacaagttcccagatgaacaaaggtcagactacaatgtattatcagattctacgccaagtactacatattaggctgtcctgattatctgtacataaataaactaatgatgttgcattgagcttgtgaatctgctatacaaactcagatgacctgtcgaccaaagcgaggtctaagttcagcatattgcttccgggtttagctgagcccatgtcactaaaagaaattgctaggacgtgggacgcgtgtgcccgcaaaagaaattgctgagtatgctcaac

SEQ ID NO: 29505 - DNA, 691 bp, Oryza sativa
actttatcattggtgtaagcttcaatatgttagtgcgcttggcgaattcgcatgccctatcttgtggtatgaactgagcacacgataatttatggtgcgtattgggggcttacaataagataatgccgtgaatttgctaagcgttcaaacccactgaagtgttgtgtgaaggtaaatatttgtaagtgttcgtgaaggaaagacatgcaaatattttgaatttatttatttagaaatgtagctgacatattagaaagttttaacacacaacattacatattaattagaataagaaaaatataaaatcgttctactcattagcctcatcatcgaaatttcaggatgtgctagtgtcctttttctttccctttcttctagcaccagctggaggtctgcgtcttgacaaaaataatctttcaggtgaatgtcgctcgcgaacagacctacgtgccacctaaataccgttgaaatcaacgtgcctgtagtcttgggtcagctgagttattggaggcggttcatcaatctgcgacggtcctatctcgtgttgtgctgttgacgaccccccaccgtagctacatggttctctgtaggactgtgtgctgccggcatatcccattatttattgggggtgtacattcctacaaaacattgaatccaaagttgtagcgcacacacatactggaactaaaat

SEQ ID NO: 29506 - DNA, 11956 bp, Oryza sativa
attttcctattcgttgtggagttattttttttaattttttgtgtgggttgatttggttctgatgtcgtttgcttgtcatgtctggtacgattttgcagaccggatgacacgccgtgggatggaggtgagtccatttgacttttccccttattttgttctgatcaagatatctagttactagtgattgtgataatttggtgtttggtgaatgaaaaattaatgttatgcggatttgcaagttatcagatactgcgcgtaaaggttccattttgttcatctgatttcacgtgtaaaaaagaggaaacaccgaaacagcaacctccctacttaaactcaactttgtgcttcgttttgtttacgtcttggttcgcttctgatacaggaagcttataattaagccatttgtgactgtgatgcattcttgtttactgaaaagttagagcttgatcttctgatgcgtttgatttgtgctttattgacaaggctttcactaggtaatgaaaaagcatatgattggcatgtttatgaaattacaggctgtatgcatttttacccaacaaatgcggacactctaacaagtaaacgacactttagagtagaaaatgagtagctctttctcatacagcgtggcatgctaacaataacaagcacacacattagagctcttataagaactttctccataccacttggaattataaatcgaagaacatacccataacgttctcatcggagttactttatctgcagtactcagagcatgttatgatcaggtttggttattgtgctgctctgtgaaatgtggttgtttacaagaatctttactgatccataggattacttttgttatggcaaaaaggaaagtgtttccaacctagtttttgtggtgaaaagtagggaaaagcttttgaaaagccatcacagagccaagtatgagccttaatagaattctgctcatctcttgcttaatcatactcttagacttatagagtccaggaaggctaatgggtgatcagtcgcgcgcgccttcccccgcttgactcgacacgtgtcgtgcggggagggggcacgggcggcggcacggcgcgcagtttcttttttttttctttcccctcctcccccgcacgttcctttcttttagttttttctgttttttttccgcagtttttttgtttgttttttgcgcacggttttttaatacgtacgtgtacaaactttgtatacacgttacaaagttcatatatgtgtatacaaagttcgtatatgtgtttttttaatatgtacatatacaaactttgtatacgtcgtatacaaactttgtatatatcgtatacaaacttttgtatatgtgtatatattttttatacataaaaaatgtatacatattaatattaatacacacacacacaatatatgtactttgtatagacgtatataaagtttatacgtatatatataaaaagtattttatacgtatgtatataaagtatatacatacgtatatacatgcactgtagaggagagagtcagagagactaaagacgttagaactgaccgtgcgcgactgatcgccaatcagccaccccctatagagtctgttagtcttaaatttgaaaatatattttttttcataatttgcgtatacacgggcgctgaggaatagcagaaatattcctattccgcgagctggagatgcgggagcgcgacgatactgcaggctggcggcgcaggggcacggtaccgtagcacgggagtgcgggaccggctcggtcgcgcagaccgggggtgcagaaccgagtcggtcccgcgcggcggctgtgcgcgttgctgtagcccacgggaccgcctgccagcccggccgatcgcgcagaacggtggcgcgggtccaaagcggtctcgcatgaccaagctgcggcaccgagccggtctcgtagggctccggtgctgctttcctaaagcgcgggagcgcactctcttcgcatccccattaagctgcaccgcactgaaagttgtttgtcccctggctccatgtgacatgcctagcgagaaacggcaccgcaccgaaagttgtttgtcccctgccgtcagctccatgtgacatgctcagccaggaacaaatgggagagcgattgtcttctctcttagcttttttcatatggcgtccgccgaaagttttttgtcgtctggttagagagcttactcgtcgagtgcctatagaagggaacgttacgaaatgaaagaagcagactcaagtatagcatataactcatatttgtagactttatcattggtgtaagcttcaatatgttagtgcgcttggcgaattcgcatgccctatcttgtggtatgaactgagcacacgataatttatggtgcgtattgggggcttacaataagataatgccgtgaatttgctaagcgttcaaacccactgaagtgttgtgtgaaggtaaatatttgtaagtgttcgtgaaggaaagacatgcaaatattttgaatttatttatttagaaatgtagctgacatattagaaagttttaacacacaacattacatattaattagaataagaaaaatataaaatcgttctactcattagcctcatcatcgaaatttcaggatgtgctagtgtcctttttctttccctttcttctagcaccagctggaggtctgcgtcttgacaaaaataatctttcaggtgaatgtcgctcgcgaacagacctacgtgccacctaaataccgttgaaatcaacgtgcctgtagtcttgggtcagctgagttattggaggcggttcatcaatctgcgacggtcctatctcgtgttgtgctgttgacgaccccccaccgtagctacatggttctctgtaggactgtgtgctgccggcatatcccattatttattgggggtgtacattcctacaaaacattgaatccaaagttgtagcgcacacacatactggaactaaaatattttatagtaaattacaatttgtacccgttgtttgtggttgcatgataggtgcttaggagttatgccatgtagctaatttagctatcatattagcaagaatagggatacctcgtttaaaatggagccattctatttgtgaacattggagtaagaaattgtagacttaatttttggaagctctttaagtatagccgattgttatcatttatcaatcatcaggacaaaataaagtagttcttttgggtgcggttagaccatgtcaccatgactaaatcttcattgtttaactttgatattttttagcaatagtgtgatgggaccatagcaattagatggcagcttcatttgatggcctatttattgtttgaaatcaactacaaaagagtgatagaatgtataggaaaaatcaccggatggaaactctttttagtatttggtgaccacattttttgcatatggtacctccaatcttatggccttcaaataattgatgaaatgcttttgacatacacaattggtaacatgatcactccctttgtctttgtatgtcaggattgcaaatttgcaacctcatgtaatcctttaaaatcacatcgattgaaatgaagtatgttttgtggtgttattacttatgaacattatttcatgtttaagttagtactaataagtgattttgtcacataggcacgttcaagctgacactacaatttacagaagattatcccaacaaaccaccagttgttcggtttgtctcaaggatgtttcacccaaatagtatgtctcataacttgataatttgaccacttcattatctttgcaagctactacattattcccaagagattgaattattgaagatatacacaactaattgtttttgttatccgttcagtttatgcagatggaagtatctgcttggatatcctacaaaatcaatggagccctatatatgatgttgctgcgatattgacctctatccaggtatcatttgaaccttcgcagagtgtcctaacaatcacatcgatagcttcacttggtttaatgctttcccctggttgtagctcacttgattacaatcatttatatatgatagaaaatacacgcatattctgtatttttgtcatgtcattggtgtagaggtaattccaatattgaggaaatcctttcctcctactatagttgcatacaccaaagtcattattgacagtcgttattgttttccaaacaacctgctatatgggtaatgtgacaccgataaattagttatcaatagcatctgcagcctgattctaggatgattagagcctttcatccatgtcatgttgctgtacgggttattgacctacatttgctgacaaataatggcttgggggaccatagttgatgtcttcctgcctgtaatcctcagttccacattgagcttagctgtttctgttttgccttttatctgcagtccctgctctgtgatccaaacccaaactcccctgcaaactccgaagcagccagactgttcagcgagaacaagcgcgagtacaaccgcaaagtccgcgagattgtggagcagagctggacggccgactaagccaaggacatgattgagttgcagtttctgcaacaagcttctcctaaagatatgcaattctggctttcccggtctgtatcacctactaaaaacataaaaaatcttcagttgttgtaattcctgagcttgatcccctgccttcccctacttgttttcccaatgtagtggctacctatttgatgaatttataaggtattgatgcttatgtaaagaattatactccctagccaagaagttgctgttgctgctaggttgcagaagcctcttgaatcctccgtgctttctcgctgtaccagcgttcagtcacgagaaggttggtgatgctgtaattggcagcaaccgcagctgtttttataattatcacggaactctgaccgttggtagtagaaactattccagctttaatattgacagaacgatacaggggcttgcacagcacaacattatttgtacgcctaaaaagcacatattattgtacgcctaaagacaaaaaagaaagaaaagaagaaaaaacaaatgaaggcgtttctgagatttaaaggattcagtgagcaaacacgatcaggaaaggggaaggttgtgtgcatcaagacagaagcacaacccggaggatcagttccatcaatatctttcatcttcagcttgcctcctgcctgtctcaaaatttccatcttctgttgcagcctgcagccacactgatccacgagctgacgaatcctcacattctttttcccgcccagccctgtaagaacaagctgaactttagaatccttcaaaacaaaggcaaaagctcttcctcatttcatccatacacaccaatccaacaataacctatcaacactacaaatctaacaaatcaatcttggtttggaaatgtgaatgtgatggtcacttgatcagaggatacttgattgatttggatgtatggcacacctggtttgctcattctggaatctggaggatttcgtgatccgggacgacgacgacaccattgaaccgtcgctgctccggttatctccttcccagtcgtcctgcacctgtgcagcgaactgcaggttccagaggacgtcctcgatggacggccgctgcacagcctccttggccaggcacctcaggcagatctgcatgatcgtcctcagcgactcgtcagagcatcccttgctcacctcctggtcggcaaagctcctcctcctcaccaaatcctcgtcggcgactgcccatagcatctgaaaaaaggagtaaagattcagagattgtgctgtgcattgctaggtggaaattcagaggttggcatttttcatgtgaaacaatggttttcaggtgatggtcatgtctcataccagttctttcattatctcaacctcatataaggatgtgattggctttccagacacgatctcaagaaggatcaccccgaaatcgaagatgtcggttttatcgttgagcagtgggctgcaaaataacacatgcagaattcagtgggttttttttcactagattgtactgattgaaactaccagatcataggcatatgtacggatcaagtcctgataagtacctttcagtatggtgcttgcctccaggtcctcccttcttggattgacaaacatcataacatttctagtcagcaacagccagaaaaacaaattaccaaggactgttaaaaatgactgatctacctcagatttcatggcctctcctaggattgggatattgtagctgctgatcttcgcgacatgattctgatcgagaagaatgttgttgatcttcagattgtttccaaacaggccaggcatcatcccagcatgcaagaactgaatgccgttggcgatgccgatggcagctgatattctctgtgcccatgtaagcttccttccttcagttccttctggtgaaaatcagtacaggatgcagtgcaaagcaacagtcagtgactgaatactgcaaacaactgaaaagaaaaacaatgaaggagaacagctgacaatttaacatacgcgaaatcctgctccgtaggttcccgttttgcacgtattcgaacacgaggtacagctgagtgacagtagaatcatcaagatcatactcgaagcagtgcccgagagcgctgaccaagttccggtgtctgagcctagaaattgtttcaatgtggcgactgaagcttagggaagactgattcctcttaaccttcaggctcctgatggccactagtgtgccattgcctagtctccccctgtacatctgacaaacaaacaaagatctgatctcagctcccaagcttttcaaaatgcaggacttattcatcacactcatataagcccgtgaggttaatttgaacagaatacagtgaatttcatgcatcaattagttgtaggttgctcaatgggtaattttaccatccttaaaaatgtactgagagataccacattttgtattgtaaatttgataacttcaggtgctaggtatcttgagtatctaaactttaacttgcttagggaccataaaatttctcttgctcaatagagtctgaactgatcaatggagaagattggcatacctcgccgaaagaatcttgccccagtagcaaagagttctcaaagttgtcagtggcagcttcaagctcaaccaaagaaaatgttctgtatggtggaattcccagagctcccagcttcactgtctgtgatatgtagcctgttttgattttgtcgcagacaccagtaggaaatcaaatcttagtgaattttgacatcaaatttggtgaaattttagataaaattcagtgatgagtgagagacaaatcaaatcatacgtgcatcggcgaacatcttggatgggtagccactcgtgcttgaagaattgtcttctcccaacatcgccggtggcctcaccattacgcctttcttgttcttcctcctcacggcgacgacggcgacgacggcgatggccgacgcggcggcgagagccgccattgcaatgccggcgaggaagccggcgtgatgtgtgagcttcttcctcaccttgccgccgtgagttatccccacggccaaggcttggttctggcagaacggcgacgggtgctgcgacgcgtcgccgccggtggcctcgaggcaattggcattgacgagcaccaccgtcgccggcttcttgtccggcctcaggcaggccggctcgctgccggtgaggaggttggaggacaggtcgacgaactggagattgtcgccgcaggcaaccttgtcggagagcacgccggtgaacctgttgccggcgacgttgaggtagcggatggccggcagggacagcagcgccggcatgaacgggccgacgaagcggttccacgacacgtcgagccgctcgagcaggtagaaggaggtgatctcgccggggaggccgccggtgaacctgttccggctgagcaccaccgtgaccaccttccgccccagcgccgggaacgccgggccgagccagttgtcgccgacgtcgatcacctggaggttggtgaggccgctcatgtccggcaggttccccgtcaggttgttcgacgcgagcaccagcgacctcagcgactccatgcgacccacggacgccggcacggcgccgcccagcgagttgttccgcaggctcagcacggccagctgcggcagctcgccgatccacgccgggagctcgccggcgagcaggttgtcgtcgaggatcagcgtctggaggccggtgagctgggacagcccgccggggacgccgccgtagaggtagttgccgctcatgttgacgatctccagcgcggcgaggcggccgatcttgtccggcagggggccccagagcccgagcccggacagcgtgagcaccttgaggtcggggagcctcgacagcgccatgacgagcgcgccgatggagaagttcatcgggagcggcggcgcgccgcggacgccggcgatgtgcagctgcgtcaccgtgtcgccgtagcacaccacggccgccgacggcgccgccgtgccgccgccgccgcagaagtcggtggtccggcgccagtggctcagcaccggcgggtggttcagcatctgctggatcttgaacagcgtccatgtctgcgagtactgcagctgcgagcttcccgggagcaacgcgagcagcgctgccaagaagacgaccaggtgatggcttgcacccgccattggagaagctctcatcaaatgcttcttgatcagcaagaaccagcagagaagcagagcaaatcaatctgtactgcaagaaattaatctctgtactctgatgattccttcaccttctccttctactacgatcaaggacagtgtgtacaagcaacagaggaatcaaggctttgatgtgtgttgatagtaccagaaagtaaccaaatcatcatcaggaagaggaagtgatcatcaaagatcacatttcttgccagcttgctccattcttgaactgacagtaacaagacaaaaaaaaacaatcatgttaactgaagaacactcatgcacatcactactaccatttcacaagaaccaaacaacaaatctaatcaactgcaccttacctagcttaggcagtcaccgactggaatagcaaagaaaatcttgctcagatgactgacgaactcaagaacagaacggataataaacaacaagagaaccttattacagtatactgaccagtgaggcctagtgcaagtatatatcctctgattctactgtaacttgtactagtacaattgctggcttgccctgcgctgcacatcactcacgggtggctggcagaagcatgaggtagctgcaggcatcaacggacaggtgtgtctccaacgattcagctggaaacggggagcaggcaaaagaccaaggactagcagtcccagcgttcactttttctcactgttgagtcttcagaaaaaagaaatatacacacacaccagtgccctgctcctctgctttcttgggatcacactctgattggtgcttgttaggcttagaataatgtgctgctttacgccttaagtttgattagtaattctactgattaattaggagttatgaaatcagtttgacaggccttagttttacttcagaatgttgcttctgatctactgttccaccaattgctttaggatcaaaactgaaacttcgatgataagccagtcctgaagcagtaattagacgttaggacatatgctggtactgctgcacatttttgcacagtaacaatctggcagtgttaaatgatgctttactctccaaatgaacttttttcccttggtgagtaccacatatcacatatggcccttagttcagcaccactgttagcaagtgtggtgaacattgcccttttttctttcagtgcttttccttcttttcttggattcttttattttttttccttttagcacttttacacctgatgatgcctctcctccttgctttgcataaagccaaggtagaggaagcatcaaagcacccagcaatcctggcattggaagatgcacataaattgcaagagacactgcaagtaattgtttgcactgaatctttgaactctgaaaacttcagataactgtttgcactgagtctttgaactctggaaacttcagatggagtaattgtttgcactgaatctttgagctctgggaagttcagataatcgtttgcactgaatctttgaactctgaaaacttcgtataattgttttgaaatgctctggagtttgtgagatttcatccatgcaggtgatggatgaaacattatgaaatgaatgccaccttctccacctaacttgagcagcgcactagctgtgccagtacactgtcctgcttagagcagagcacacgaaagtaattccattttggacagaatgaatgtcatgggcaagtgattttttggaacagattatgtacctaacacacatccatcgacttcacacaaaaccgtggccctaaaattcaatgccgtggagcaacgtgcatgtgcgtgttaatgttgtacaagtacggcgatggaactaacatgctagtagtatttcaacttgtaatcagggtcctaggaaaagtatgagacatcaattaccttttgttgtaggacacaaaagaattacgatgacaccaggaagtacatttgttcgtacaccatgggtggatgaatgtagtattcgtccagatttaaaccctaacattcacaattatttccttggagttagttaagtccaaatcttagttatgaaaatgccagaaatgtaattggctgaaatttattactgaaaaaaatatgtgacctttggtatatatgcatttgttgcacatatttgctgatacaacgagagataagctactcaaatgtatcctcaccctgaaaccaacggttactcttgaggtaccttaatttttgtgacaaaaaatgtctaataataaccctaattactgttgtcccgtcgtatgagtatgataggacaattgatcaaaagcatacggcacgagccactagcatgtactgcgtctactgcttcaaaagcaagagagaccgcaacttttacagactcatcactcatcaattaggacgtacggattactcgtactagtacattagtgctacaagaaatgcattctttttataggacgtaggtagtgtagtacaattgataattactttacagcagcctcggagaaaagaaattaacggtgttcgattagctgaagcaagaaatgcactcctttttttagaactaagaaatgcacccttgatataatttgaaacaaaaccttattgctctccttcttaatgtatttaaggcagaactactgccagagtgctagttacttaaaaaaaaggaatattacattatttgaaaaagtacctaaattttatactaaaattgttaataccttaagatacttaatatctagaggtattaaattttatattaaaaatatggtacgtctcagtacattatcaaatatagtaaaattaaaaaaaaaagctgtaggattctcctctcgttatatacagacgcgcatcagttaatccctgcaggtacagtacaggtatatcatgcgagttgagctacagtaacgcgcagaattcattactaccggaatacacagatcaagataaggagcgagcaattaatgtctctctactacagggtttaacataatgacccaaactgcaactacatcaaccgaatcgtttccagaaaaccatacagagaatttgtaccaccgaagattgtgaagcaagcgaacgtcccggcgacgaacaagccagtaattcgtgcccaacttctatctctcaatcctcacgcacgtgtcggggtccagtagcttcgctagcgttacacaggtgctgtttggatccgaagggctgctattaaatagccctccagaatcttgctatttaggagtattaaac

SEQ ID NO: 29507 - DNA, 12608 bp, Oryza sativa
  unsure (1)..(12608): unsure at all n locations
atcgatctatcgatcggctcgccatttagggtctgttcactttaatgtcaaaaaaaacttatcaaattttgtcattgctaaaaatttgatatagttgtcaaaattttagtatgatttcttatatagttactaaaatttgacagcgaattaaatatagctattctttttagcaacattaccaaaaattagtaagattgaaaatagcttcaaagtgaacaagcccttgctgtctacgctgggcggcttctggtccggtctggtggttggcgtttcccttgccgccattacttgctgatcgatcgccgaggccttcttcttgggttcttcctcctccgtcacacatgctctgcgcccaaggatatgatcgctccgatccaccgcgcgcgccgcggcggccacggcccacggaccacgtgtgcttccgggcacgcggggcgcgtgtcgtttggatcagaattagctgctgcgttattgtaagctcaagatactgaaagaagctatatagccgctagaagttcttcgagcagggccacagctaaaagagagatagagaggagagtgtctggtcaacatcacattttactactccctccgtctcataataggtgacgtttttgactttttatttgcaacgtttgaccattcgttttatttgaaaaattagtacaaatataaaaaaagataagtcatatgtaaagtacttttaataataaagcaaatgacaaacaaaataaataataattttaaaattttttgcataagacgaatgatcaaacattgacaaacaaaaactcaaaaagacaattaatatgggacggaggtagtactaaactactgctccctccatcttaaaatatactcccgccgtccctaaatatttaacgtcgtttactttttttaaacatgtttgaccgttcgttttatttaaaaacttttatgaaatatataaaactatatgtatagataaaagtatatttaacaatgaattgaaaagaattaataattacttaaattttttgaataagacgaatggttaaacatgtttaaaaaggtcaacagtgtcaagtatttagggacggagggagtaatggattttggttgtatctgatatatatactttcttatattttgggttggagtgggaaacccacacttcataaggctattgtttgttttgttatcatatttgtgatgtgcaatagttttttaagccttaggatccacatgttacgcgcttattattttaatcaaatatatttctaagaagtgtggccatcaatttgttaactacacttttacttaggcttacaaaatatgtccaaaagagcgcatacgtttctacgtaaaggccatgagcttagaaaattttctaagatgcacctaagtttgatggtattccacatgagacgaaataggaggagcaaacccctatatagtttgaaaaaagtacgaattaccccccacccctcaactatcgccgtcgactgaattatccccctgaatcacaaaactggacattattcactcccacgcaaaccagacgaattacccccctcgacccaatccgcggtggttttggtctacgtggcgtacacgtggcagtccagtcaatattctatttataaaaaaaatatgggacccacataccatactctttcactcttcctctctcttctctcccactctctgtcagtatatctcattcttcctctctctctcacagtcgcgggtcgcaggtggcggtgaacatggagccgtgacgacgacgaccgcggggcataagggtgacgtggagncggcggcggcggggcacaaggagaccccgccggcgcgggacggacgtacgtaagccacgacgaggagccgaccacacttgcgcgcgaagcaaaagcagcagccgacgccaccgcagagcaaaaccagtaggcgacaccgccgcaggagtacaacgccgtatcggtcgcgttcacctccatggccgtcaacgcatcgtcatcgtcccccttggtcgtcgtccttcactcctccatcgccatcctccactcctcatccctcggcgccgcctccgcgtcacagagtgagagagagagtgtgcgagagagaagagagagaggaagggtatgacatgtgggtcccacattttttttataaatagaatgctgactggactgccacacgtacgccacgtagaccaaaaccaccgcgaattgggtcgaggggggtaattcgtccagtttgcatagttggggtgaagaatgtttagttttatagttaagagggtaattcggttgaccacgatagtttagggagataattcgtacccttttcatatagggtgtgtttggttgcctgcatgaggggtggctcacatcccctcagcagaaatcgatgtgtttcgttgcctgcaccagcatatgagccaagctcggctgatgcaaaaagcgccgcacagccaggctgaggggaaacgcaagaatcggccgtagctcctcagctaggcccggctcatacgggacatttaactatttgccactcttgtgacattgcaattaacgatttgccatgctctgtcaatgacacatggacccttatgtgtttatgacatatgggtaaatagttaaaagccccggctcatacacgcgggggtgcaagcgtgggatgagtggatgcaggcgatgcggaggggtcaaagcatcccctcgcctccctcgtctcatttgttcgctcgcccaccccattggtcgtcgctcggtcgccgtcgtctctgtcgattcccctcttcttcaacggctccgactggcgcccatcagctccacatcgccagatccaactagctagcagccttgtgctcgagctcggacagatccaggaggaagaagaggacgggacgaagaagggcttgacgagaatacccggatctcggcacttgatggaagatgttgctgccgcctccattgtcttcccctcggtcttgctattgccggtgatgtgttcctcgctagccaccactgcacctctgtccttcacaaggtgcgacgggccagatccggtggccatggctccaaaggatctggattcagcggcctcaaactctgacgacggtggtgaacggcgaggcgccagggggaagagccgagaacggcggggcaccaggggaagaatcaagaacggcgagcggcggtctccgtcaagcagcgatgacgacgaggcttcgaggccttcatttctttcattttctttttacttttctgattggaactgtctatccatttgtcggatgatttctaaccaaaaatcactcagattttttctacccttagatttacatccaattgactataaaagagaataactaatacatatctacttacacaatatttttttcaaaattacagtgcacttacatattatatcaactaaatttacaaatgtaattttagttatataggactgtaattttatatttttaaagaaaataataaatacatatttacttacacaatatctttatcaaaattacagtgcacttagatgtcatatcaactaaatttacaaatgtaattttagttatataggattataattttatattttaaagaattatcaaaattacagtgtacttacatgtcatatcaactaaatttacaaatgtaattttagttatatattactataattttatattttaaagaaaataatcaatacatatctacttacacaatatttttatcaaaattacaaaattacaatgtgcttacatatcatatcaacctaatatacacatgtaattttagttatataggactgtaattttgtattttattttttattttatagtttcaaaaatttgtaaagtgaaaagaaccaggcctaccatccgacgcatggtattatccacgtatgcagcctccaccaattattgcataaatcctagcgaggaatcctatggatagaaaaacgtgaaatatcagtaaaaaaaaatcacccgtgagatgtatagcaaaatcgttgctgatttgtttctccctgattagaccgacagtaaaaaaagtccgtgtaatactccgtgctactgtttcgcacagtttgtttccatttttttttctcttgacaattagtactcacatcgcagtaacgtcacgttttgatattacatttgatctaaccaattatatttgatcatatttttttactacaatttaaagtgcatgaacttaagacattattatttctatataattggtaggattatactcttacaatagaaaaaaataattggattcaaagtatatgcgagcaactaaacacaatctcttgcatacaagttttcttatccaaccaaccaaacaacatcttacagaaaccaggtctatctaatacatacaaccaaacactctctattgcatcttactaaccaggccaaactcaacctggatgatgagacatacaagccaggctgaggacactcgagcagccaaacacacccatagtttcctggccacatagatcgtgacctaaacctgagcttgacagttcatcagtcctaacagctaggttggtgcgatctgagtttcagacatgcaaggcttcagtttaccctcaggaacttttattagctacgaacagtgtccgccgcaactctcggcaaccaaccacaaccaagttgcgtcgctgtcacaaaccgcatccaggcagccgcatccaggcagccacccctgccggcggatccgcggattgttgtactgtgtagctagctgcctacacagtacgcccggccggcccggtgtatgacaaatcggacagcagcagccactgaatgggcacgtctacaagtgtagtagggcaggatgtcatattgatcatctgcgatgggatggtccgaggttacattgacggtttttttagtagcaactactacctccatttcataatgtaagggcccctttgaatcaaaggatttatgtaggaatttcataggattcaaatcctatatgaaattttcctatttggccctttgattcaaaggattgaagctttccaaattccatgaaattcctatggaatggcacattgtatgtggattttggaggaaatttagcaagagctccaacctcttggaaaatttcctttgagtctatcactctcatccgattcctgcgtttttcctgcgctccaatcaaacgaccattcatgtgtttttcctgtgttttgcaatcctctgttttacacttcaattcctgtcagaatcctgtgtttttcctattcctccgttttttttaccctgcgattcaaaggggcccttaagtcattctagcatttcccacattcatattaatgttaatgaatctagacatatatatcgatctagattcattaacatcaatattaatgtagaaaatattagaatgacttacattatagaccggagggagtagcaagcacatactacacgagaatagaatagaatccttatttacagtatttacattaggtagaaactagtagaatatatacttgtaactataaaaagttatttcttgaggacctcattattttgtataacttcgtttacgtatgcctttggagaaaataaattttgaagcaacacaaccgtattataggtttgtttatagttggacgaccataccacgtggcacgatgcggtttgaggatgctcctcatgtccaaaaggatttaaatataaaattaaagcttaagagggagttcagtgtaaaagagatccatgtccagcttgtttggagcagcgaaatagcactgatagaggggactagagacacaatcatttggagatggacaagtaccggcaaatacatgacaaaatcggcttacctggcccaattcgccggcaaaaggtggaattaagggcaaccaccatgatttggaaagcatgggcgccgtctaaatgcaagaattttgcatggttattgctgcagaacaaaatttggacaatggatcgattgcaaatcagacagtggccaaattgttacttttgtcaactctgctacagagacctgtaaacaacacaacatttgttcaaggattgtccgttcacaaggaaggtctgggacagagtagccacgagactggagtgcaaccaagcattcccggcgcacaattcagaggagatactgattgaatgatgggaaaagaagacgctgcagcaagacaagagcaaaatgaaaggtatgcgatcactgcacatgctcctctgctgggaagtgtggtgtgaaagaaataggcgagtcttcaagaacgaggaactcttaatgtctcagctgatgatgaaagtgctggacgaagtgcagctatggtctgcttgtggggctaaagacatcgttttttccctttttttggtgattggtgattggctggcttaaatttccaaaaaaaaaagaaatccatgtgttttctttagaaaggtcgtgactcttccctttcatatgttccctagagaagaaccttttcatattgcccctctctcttatcatgcgactaatcctatgtgttgtgtcaccgatgcccacctcctcccattgctggttgcttgtgggtcttcccaagcaaggagcctctctaaccaaagacggtggtgatgacaaccatggcaaggcaaccgttgacggtgctcgtgcagcttgtcatcctcctctttcttcttagatcgctctctctctaagtgcacacgacatagagacatcgccgaaagctagtaggatgtcgtagagaggggaggggatgaacaaacgttcttgaaaattacttcaaattacaacgatcaaattcaatggcccaaaacttcctggtaacaattttagccaagcagagaaagctaatcggaacttttagggttcttccttaagaatttcgaagcagttgtgagttgttgttccaagcatgaagcacccctgtaaacacataataatatagtaggtggctagcagaaacaaaatacaaaaaaaacaagtaaaaataggaagagggcacacgggacaagacaaagggagataaagatttttatgcgaagttcagatcacaaggattctactctctattgagaagctttagagagttgggactgtagtattaaccctttacctcaccaaacaagtatctagaaagaagcctttagcctctaagccaacacccctaggtttcttatgattccaaatgaccgtaaagattcctaatttagataacgtgtttacaccacgacgggatgagatggcggtcgggacttccgacttcatatttcgcttatgctcatacttttcagccaaaacttgaatttttgaactttaaattttgagctaattttggggtttttcatcgaagtttatttttcaacctttacttttagatagctaagaacacgtatataaaagttttattcacaaattactttttgtttccaaatatgccattcgggttattgggccgtttgcgaaatttgtgaagtgaaagctgctatttatttatttacttatttattgagaacgtgaaggggaagttttgctaaggagtaaaggaggagtgtgtgcctcgagaacggtgtaaaagggatctatccggccctgggccgaaaatatctgggctgtagcttttgatgggctaatgtggggtgattaggcttctactgcaattcagtacaagtaaattcagtattactccgtacttaagaggaaaagaagagaagtgaagaggacgaaacggcggtgggctctcgaaacttccgggctccggcgactccgccggccgcgatctcctcctcctcctcctctccggctcttcccggagacgaccaactccctccttcctgtacgctccacccctctccctcgatctactcctctcgctttcgctccagctcgtccagatccggcggacctgacgcgatcgcttgcgcttttccccccttccgactactcgcggttcgatctagtgtctgctggcctgcagtgtgatatgtgtagctggtagctgcttggtctcgcagctctcgctgaagcctagaacatgggtgtggatctcgcggtattttagatggtgttttctttgctcttttttttttgttgattattttttttacgtgggttgattggttcgatcgtgatttcagctatttttggcctcgtagtttgctccggaggatcggatcgtgctaattgccaaattgattcaatggatttggattgtcctgtttgcagggttcggggtgctgattgacgcatttagtgttgtgtgcttgagtaatggcaataggggagtggagttagatgcatttggtcatgtggtgtctaagtcatgtctcatgcatgatgacgcagatgttgtagtacgagcacccgttagtattggaaaaattaggtttcgttcatctaggggagttattaatgtagtatataaatcatggaattgactgttctgggtactaggtgaattaaaaataggatttgaatgttttgcccctgcatttatgaattttcccagtggtaggttatgtttgcgagctgctatgtgacgtgtttaatggtggcattcttattaaaatttgtttagattgaaacaatatatttcgtataaatgaattagggtccaattttttacttgctgttgatacggatttgtgcaatggattagtcatccttagtcaccggaaaatatgtgattctaaaattgccctaagaaatgtgataccgcaaaaatgcaaaatgacatgaaatgcttgggcggtggtgatggtttctttcctggattgcttatttatatgttgactagaaaactaagtatgtactcttatgaagtataaataacacttgaagttggaactacacctgaagcacctttttttcctggcaggttcatttggtattctggtgcagtttgcagtggtttctggccttcttgacaaaatggtgaagctgacaatggtagcacgtgtcactgatggccttccactggcagaagggttggatgatggacgggatcagaaggacgctgacttttacaagcagcaagctaaacttcttttcaaaaacttatcaaaggggcaacatgaagcctcgcggatgtcaattgagactgggccatacttttttcagtatccttatgttctgtgtggtttttttatttccaagcatcgttaatgactgttgaatttgttccattcttttaaatccatgcattatgtgtgatatagcatatctgggtgctaaacatttacatctgaacatgcatagtcattcttttatattgttgatcaagttcgcttgttgcatccatgaaacattacatttcttttctggtgatcaagatttcatcgtatgtaggatagttgtattaatcgcaagtaaacaagaacattggtaaacatttgacgaacctatgtgattgtctaggttaaattaacaatcatacaatagctactctacttttctatagcattcaattattttttagcatcttacaacttgcaagcatgttgtacttatttgatacacttgttgatctcgttattagtatgtgaggccatttatcaaaactaactttaagatcataatcttatttaacctgctacttgcattgtgttctgtcgcgaaaagatggcattcagctgtcagctaatgatattcttgtaatgcattttttagcttctattggtttgctcagttcatcgcagtatgatcttgttgaaccttaattaaaataaacagttacatcattgaggggcgagtatgttatctgacaatgtgtgaccgttcttatccaaagaaacttgcattccagtacctagaagatctgaaaaacgaatttgaaagagtcaatggcagtcaaatcgaaacagctgcaaggccatatgcctttattaagtttggtatgtttttagaatttaattccagcaatattttcatttgtctaagttcaactggttcacaacttattcctctttctacctagacacattcattcagaagactaagaaactttatttggacactagaacccagaggaatcttgcgaaattgaatgatgagctctatgaggtgcatcagattatgactcgcaatgttcaagaagttcttggtgtcggtgaaaagctagaccgtaagtttgcaaatacctcttggttctaacattaccgtatatgtcctgttacaataaaccatcagatttctgtaacatgcatgaatcaggcttactatggaggaccttgtcctttcaattactttcatatatttgttcaaaagcttatttacaataatatcgaattactgacttagtctttctttttaattttcattgcaccttcatttttcttttttgcatttaactgccctgattctgatgtttctaaagatttatacccacctttaccttttcgctttcctttgcatttcattgtgtgataactgatattatggtttgattgaatcaaaatattgctcaatcttgcagaggtcactgaaatgtcaactaggttgacttctgacacaagaatgtatgcagataaggctaaggatctcaatcgccaggtaatccatttacacaattgcatgcactattttttgcagatgcatttgtcagctgagcttgagcatttttcattagaattattagagacatcggtattgatgttactcaaacaagtgaaacaacatttaaaattgtttatggatcaatttcttcagcatgtgctatgcactttaattagcatcaagtatgacattaaaatcgcctttactttcaagatcaaaataagtatagtcactataattggttgttgctgcaacagtaacaaacatctccatgagcctactgttagaagctgcaccctttggctaataaaataaaatgttgttttttatttgtgtttattagttcactatctatgggcagctggtcagtttcatcagattatagaagcacccaaacattattcagttgtgggtggtggctcaggagttctctccatcatttatctgaaggctttccttcagcagcatgtcggttcagaagtcatgactactatacattgtatccacattggcatttcgtagtttgtaacataatgtttgtcatgcgttgcccttaattttaatctgcatttgtctacattttatctacatctttcagcgtctcatttatggtatgcacaaaccttttggatttcaggccttgattcggaagtatgcccccgttgccattgtgatcggtgtagttttgatgctcttttggttgaagaacaagatatggtaactgcaccaaatgaaggaagctgggcctgcgttacaacactggagaaagaaaaacaaaaaaattaggttgattctggatcaatagtgctttggtgacgtgtatcccgtatctgcccattcaagcgagtacttcagctgcccttttaccctcctcctcactacaaagctattcaagtcaattcgttgtagcataggccttatgacggacttgattttgtaaatccttggaactgtacatataagagctctgtagagttgagttttcggtattgggatgggattgtattcttttgcaaactcaactcatgtaagaattcaggctgaatatcgtatactccatatctcttggacttcatgcccatgttgcctaaacgtattatgccctgattagttacattttgagtaattttatggtcaccgaagatgcatgtatggggagttttagattctgagaaatagggatccagctgatgagaatcttgataagctcaatttgcaaccacagcttctgattaattttctggaatttgcaaccatagctttttttatcaaaacgaaaagctgttgtttaagagagctgtagttgctagaaactctcttaagcaagctcttacttgggtaaaaaaattgatacctccgattcctgatttatgtattagggaccgtgaattcactgaccaatgtgccatctacaaaccacttaaaaattaggcttgataagttacgtggaatagtggttcgttccttgcaattccagctatctttgtcgtgcgattgcgtttcgtcttctacggtttcaaccactctttcagagagcaagaaactctggaattgccggcttcaaggattagaatgttttttctttatttcaaaaggatggattagaatgtttctactgctaatcaccatcatctcagcctctgatgatccacagttccacacaacactgtaagtaagtagtatattacaaaggcctaagctcccctatgtgaaaatggtaagccgcccgtgccactccaatcagctgatcattctgcagcagcaacacacacacgccatgacaccaaaccggttgcaacctgcagatgagacgattgccggatcacgaagatgattgatgaagaagaacgcgagaacagaatttgtcgaattcctactgttcgattctaacaagagctaatgtgcagagaaaggaaaaaaaaagaggaagtcaattcgatttgatcagcgaagctgaaccaacaattcgtctcacacctaggatgcggaggaagaggctgctgcggcggtgggatcggattcggcgggagacatctcgtcgtcctcctgctgctg

SEQ ID NO: 29508 - DNA, 778 bp, Oryza sativa
cttagaatttctgaaagaggcaaaggtatgttcaagaatctttttttctttagctttatattctgttttgtctttctgttaccatgtaattaggtagtctgtagtccattatagttgcggttggctgaagatattttcttctttagctctttcactctgcacactgcatatcacttctgtatgtacaaccagtttgaaacggcagtatgtatatttggatatccaattttatttagacatttgccttttgcagttttgctgcacatacaggcaataactttaatttcttagaacttagtaatccttttggtgcctgacatcacattattgatgctttctcttaaaaattattatatcagtacagttatttttccattcccatgatggatgccatttattttgccacttggatctcatgttttaaatattttgtaccaatctatattgccgatgataaccttattttcttttgttgatttggaacattctagaaattacaggaccaaaatatatccgatgggtactctctgatgaggcggcgattgttgaacgaccgtcttctacttgctgaaagaagctttctgcaagctgatggacttcagggaagaggatggttcaagcatctggtgagccttaagtgggtcagccatgaacccacttataggtcaaaataagcaggtctgcggcttattttggcctataagtggggttccgcgggtagccacttacactcttaagctcccgctattcataagtcataagtcataaccaaatttag

SEQ ID NO: 29509 - DNA, 709 bp, Oryza sativa
tgggccaggtcagtcaatctactaaattaccttcaaaatatcagttgcatctgcaattctgcgcgttgcaaaatcattgcaagaatgagatgtaaattatatgtgatctgaatgtgcaatcgttgttttttgtgatcaggtggaaggcgcattcgtgcaagggatcggcttcttcacgaacgaggagtacacgaccaactccgatgggctggtcatcaacgacggcacgtggacgtacaagatccccaccgtggacaccatccccaagcagttcaacgtcgagctcatcaacagcgcccgcgatcacaagcgcgtcctctcctccaaaggtgaaatcatcgtcttcttcctttgagcactgaaatcgtgaaggaaatcgaaatctgaaactgttttgtgatccatcgtggcagcgtccggtgagccgccgctgctgctggcgtcgtcggtgcactgcgcgatgagggaggcgatcagggcggccaggaaggagttcgccggcgccggcggctcgtcgctgacgttccagatggacgtgccggcgacgatgccgatcgtcaaggagctctgcggcctcgacgtcgtggagagagatctcgagagctttggtgcaaagcctaaagatagtgggttctttggcgtagctttgtataaacaccaacaataatctgtgcctggatttgcggtgatgtgggatatatgtacagaa

SEQ ID NO: 29510 - DNA, 1918 bp, Oryza sativa
ggcgaattcgagctcggtacccactatcaggtagcaagtatatacgcaactactagaacaactaggatgtatagctatcaggtagcatgtatggaatattgtgtctaggagacataacggcagaatatcaaccggatataacacctacataccgtgcatcaaaataattatttctccataaattttcttcatcacaattgtttgtataaattttccaggttgtttgttagctttaaactatacgatattttcttcatacccacaaaaaattaattataacatttttcattatcttaaaaggaggttaacttaatttgtttaaaacaaatatctaacaaattaagtgcaaattaaaaataaggtgattttccttttaagttgaatgtttaggtgctctattttttttaacaaatcctaaaaaaatattattatcaataaatatgttttatttataccataaagctgcccctccttctaattggtttcatacccaggcaatttttacatacatatatatgagtactagaaaaatgactgtgcgttgcaacgggtgaaaactattttaattttattattgttataggtttagttaaagttaaattcactgtggaaattcgcttgaatatatattttcttagaaaatcaggagctgcagttaggagtctgattgtctcaaggcatgcgagtgtattttaaagagatttctatacgactccttttgattttcaaaagtggactaacttaaaaacggagtcaaacacggatatgtatttccaaatgcgaacaaaacttaaaaaccgactcaaacacagataacctacaagtaccggcaaaatcatcttcaatttttataatagtagaaatatatatgagtgaataaagaaaagagatctacataccttattttttatgatatacttaatctgtagtatttatttaaagttctaaaatataaatctctactattataaaaactgaagatgtttccgtggtccgtcatccgtatttgagtcggttttaattttatgttttggttttaatctatatgtcttctcttctctacttttataaaaattgaaaatgtttttaccggtattttggtatgtcatctgtgtatgagtcggtttttaagttattttgcttttgaaaaaaatacatatccatatttgagtcggtttttaagatcgttcacttttggtaatacagaagaaatcatataagaaatttatttaaaaaaacttacatgctaacttgaggtgattggactcctaactccaggccatgattttctaaaaatatatatatccaagcgaactctcgcagtaaattacatcttaactaaaccgtacaacaataataagattaaaataaacttcacccgatgcaacgcaagggtatttttttagtttaatactaatagagtaacagtgagggggtaattatcaatttgacagtacggataaattactaaggatttcttcttttttttttcaggtggatgtggcgcatgcgtggtcgtcgtgtccaagtacgacgccgtcgccgacgaggtgaccgagttctcggcgagctcctgcctgacgctgctcggcagcctgcaccactgcgcggtcaccaccagcgagggcatcggcaactccagggatggcttccacgctgtgcagcggcggctctccggcttccacgcctcacagtgcggcttctgcacgccgggcatgtgcatgtccatctactccgcgctcgccaaggctgacaaggcatccggtcgccccgcgccgccgacggggttctccaagatcaccgccgccgaggcagagaaggccgtctccggcaacctgtgccgctgcactggctacaggcccatcgtcgacgcctgcaagagcttcgccggggacgtcgacctcgaggatcttggcct

SEQ ID NO: 29511 - DNA, 1820 bp, Oryza sativa
agaagttcttaaaggaaaaattggttagtgcaccagtgatacttgaagcagttcgttttttgaaaggtgttgtttcaccagctgaaggcacaacacatcctgaatacagagtcagcttggccgtcagttatctgttcaaattcctgtcttcccttactaatggcttggatgagcctgaaaatgctaatgttcccaatggttcatttactaatggaaccgcaaatggtattgttgattcctcgccagagaagcactcaaatgttgacagctcttatttgccaataaaatcaaggcaagagatggttttctctgatgaatacagacctattggaaaaccgatcgagaaaacgggagctgagctccaagcttctggtacatattctcttatcctaaattcctattctcaatccgagctcacatgttttacttttaattggactttcatagcctgaacatctgaacttgttatgcaggggaggcagtgtatgtcgatgacatctctgctccaaaggattgcctctatggggcatttatctacagcacacaccctcacgctcacataaaaggtgtaaacttcagatcatctttggcttcacagaaggtcatcacagttatcactttaaaggacattcctaccaatggaaaaaatattggatcatgctccccaatgctaggagatgaagcgcttttcgttgatcctgtttctgaatttgctggacagaatattggtgttgtggtacttacatctaaaccaactttcattcaaatgaggcagaactggtaacatgtctgaatattcagaaattttgtgaataaattcgagcttaccatgtcatattgccttgttgtcattcagattgctgaaactcaaaagtatgcctatatggcggcgaagcaatctgtgatcgaatatagtactgaaaatcttcagccaccaattctgacagtagaagacgctgtccagcataacagctacttccaagttcccccatttttagctcctacgccaattggtgagttcaaccaagccatgtctgaagctgatcacaagatcatagatggggaggtatgtacttaacacttttaaaaatagacagagaggttataattgtgtgaacgcatgacttaatatgctagtataatagtagaacaattttgatgcacactatctattgagcagcaggtgctaagaatgaaaggagcaaccaagattattatagttgagagttcctaacaattttaggagaaatacttacacccaatttctatttttttgttacaggtgaaacttgaatcccaatactatttctacatggagacacagacggccttagctatccctgatgaagataactgtataaccctctatgtgtcggcgcaactacctgagattactcaaaatactgttgcgaggtgccttggcattccatatcacaacgtccgtatcatcacgagaagagttggaggaggttttggtggaaaggcaatgaaagcaatacatgtgagcatctgactatgatgatttgcatttgcagaacaattatattcttgaactggtggaatttctcgtctaactctgtagttattcgtactacaatgcatatgcttttgtttaacaattataatagtagtacaatagtatttcataactaaaaatattgtgagaacttaatacatatttcattgttgtgggctattttaaaatgtgaaccaactatcgacggtttaaatgtctgttttgatagcgtcattagcatgaacttagaatttgtttggaatgcagaaagatctagatatgaccagaagtacctgttgtttga

SEQ ID NO: 29512 - DNA, 1024 bp, Oryza sativa
gcgaattcgagctcggtaccccatcgcgtctactctctcagtggacacgaacgccatcaggaggaagaacctccatgacttcgagagcctcaaggtgttttacgggaatagcgccggtgatccttcgacgtacagcctcgtcaccatcttcgacaagctggcgtcgtcgccggagtaccagcagagggccgccgtggtcgagcatttcaacgccggcagcaggtcgactctagcggggcactcttgcgtgccgatcacctacgacgtgaggctccggccatctccggggaaggtgtccatcatgaacgacggctccatcgccgtcgaggtcggcggcgtcgagatcgggcaggggctgtggacgaaagtgaagcagatgacagcgttcgcgctgggccagctctgcgatgatggcggcgagggcctcctcgacaaggtccgtgtcatccaggccgacaccctgagcatgatccagggaggcttcaccggcgggagcacgacctccgagactagctgcgaggctgttcggaagtcgtgcgccgccctcgtggagaggttgaagcccatcaaggagaaggctggcacgctaccatggaaatccttgattgcccaggtgaggatagcaatatagcatccttgtaaattcttgtttgagttttctcgtccttaaaaaaactaataactttttcagtaaactgcaagcatcagtaaagaaaatattgttttctgaaagatcattgtgtctgacagcattgtaaatttacaaatttgtgatggcatttgctcgttctcgctttcaggcaagcatggcgagcgtgaagctgacagagcacgcgtactggacgcctgaccccacgttcactagctacttgaactatggagctgcaattagtgaggtacacactaaagatacccagatacaaattacaacagaagctctgaaaatgcatttgccgaagccaatttgctgagcttgatctccttctcaaagctaatgcattgtccatccaaaatctgcacatga

SEQ ID NO: 29513 - DNA, 1229 bp, Oryza sativa
cttggttgcactccagtctcgtggttactctgtcccagaccttccttgtgaacggacaatccttgaacaaatgttgtgttgtttacaggtctctgtagcagagttgacaaaagtaacaatttggccactgtctgatttgcaatcgatccattgtccaaattttgttctgcagcaataaccatgcaaaattcttgcatttagacggcgcccatgctttccaaatcatggtggttgcccttaattccaccttttgccggcgaattgggccaggtaagccgattttgtcatgtatttgccggtacttgtccatctccaaatgattgtgtctctagtcccctctatcagtgctatttcgctgctccaaacaagctggacatggatctcttttacactgaactccctcttaagctttaattttatatttaaatccttttggacatgaggagcatcctcaaaccgcatcgtgccacgtggtatgaggtttccggtttccccaaaaaaccccttttttaaatttttaacaaacctataatacggttgtgttgcttcaaaatttattttctccaaaggcatacgtaaacgaagttatacaaaataatgaggtcctcaagaaataactttttatagttacaagtatatattctactagtttctacctaatgtaaatactgtaaataaggattctattctattctcgtgtagtatgtgcttgctactccctccggtctataatgtaagtcattctaatattttctacattaatattgatgttaatgaatctagatcgatatatatgtctagattcattaacattaatatgaatgtgggaaatgctagaatgacttaagggcccctttgaatcgcagggtaaaaaaaacggaggaataggaaaaacacaggattctgacaggaattgaagtgtaaaacagaggattgcaaaacacaggaaaaacacatgaatggtcgtttgattggagcgcaggaaaaacgcaggaatcggatgagagtgatagactcaaaggaaattttccaagaggttggagctcttgctaaatttcctccaaaatccacatacaatgtgccattccataggaatttcatggaatttggaaagcttcaatcctttgaatcaaagggccaaataggaaaatttcatataggatttgaatcctatgaaattcctacataaatcctttgattcaaaggggcccttacattatgaaatggag

SEQ ID NO: 29514 - DNA, 1568 bp, Oryza sativa
tcggcagcctgcaccactgcgcggtcaccacaagcgagggcatcggcaactccaggaatggcttccacgctgtgcagcggcggctctccggcttccacgcctcacagtgcggcttctgcacgccgggcatgtgcatgtccatctactccgcgctcgccaaggctgacaaggcatccggtcgccccgcgccgccgacggggttctccaagatcaccgccgccgaggcagagaaggccgtctccggcaacctgtgccgctgcactggctacaggcccatcgtcgacgcctgcaagagcttcgccgcggacgtcgacctcgaggatcttggcctcaacgccttctggaagaaaggcgtcgacgacgagcacgctgacatcaacaagctgcctgcatactccggtggcgccgccgtctgtacgttcccggagttcctcaagtcggagataaggtcgtccatgggtcaagcgaatggtgacacttcggcggtggtggtcaccggcgacggctggttccaccccaagagcgtcgaggagttccacaggttgtttgactctaacctgttcgatgaaaggtctgtgaagattgtggcatcgaacaccggctccggagtgtacaaggatcaagacctccatgacaagtacatcaacatctcgcagattccggaactctcagccatcaatagaagcagcaagggcgtagagatcggagctgtcgtgtctatctcccaagccatcgacatactgtcggatggaggcgcggtgtttagaaagatcgctgatcacctgagcaaagtggcctcgccgttcgtccggaacacggcgaccattggaggcaacatcatcatggcgcagaggttgtctttctcgtcggacatcgcaactgttcttctcgctgcaggatcaactgtcaccatccaggtggccgccaagaggatgtgcatcactctggaggagttcttgaagcagcctccatgtgattccaggacattgctggtcagcatctctatcccggattggggttcagatgatggcatcacctttcagacgtttcgtgcggctcctcgtccacttggcaatgctgtgtcatatgttaattctgcattcttggcaagaagttcagtggatggatcatcagggagccatctcattgaggatgtttgcttggcattcggcccctttggggccgagcacgccatcagagctagggaggttgagaagttcttgaagggaaaattggttagtgcaccagtgatacttgaagcagttcgtcttctgaaaggtgttgtttcaccagctgaaggcacaacacatcctgaatacagagtcagcttggccgtcagttatctgttcagattcctgacttcccttactaatggcttggatgagcctgaaaatgctaatgttcccaatggttcatttactaatggaaccgcaaacggtagcgctaattcctctccggagaagcactcaaatgttgacagctctgatttgccaataaaatcaaggcaagagatggttttctctgatgaatacaaacctgttggaaaaccgatcgagaaaacgggagct

SEQ ID NO: 29515 - DNA, 609 bp, Oryza sativa
ctgagcctgcggaacaactcgctgggcggcgccgtgccggcgtccgtgggtcgcatggagtcgctgaggtcgctggtgctcgcgtcaacaacctgacggggaacctgccggacatgagcggcctcaccaacctccaggtgatcgacgtcggcgacaactggctcggcccggcgttcccggcgctggggcggaaggtggtcacggtggtgctcagccggaacaggttcaccggcggcctccccggcgagatcacctccttctacctgctcgagcggctcgacgtgtcgtggaaccgcttcgtcggcccgttcatgccggcgctgctgtccctgccggccatccgctacctcaacgtcgccggcaacaggttcaccggcgtgctctccgacaaggttgcctgcggcgacaatctccagttcgtcgacctgtcctccaacctcctcaccggcagcgagccggcctgcctgaggcccgacaagaagccggcgacggtggtgctcgtcaatgccaattgcctcgaggccaccggcggagacgcgtcgcagcacccgtcgtcgttctgccagaacccaggccttgccggggggataactcacggcggcaggtgag

SEQ ID NO: 29516 - DNA, 16555 bp, Oryza sativa
actggtttgatgctttggtagatgctagttaggaggtggtcttttgcaagggctgttcctttttcctttaggccttgttcacttaattcagggaggagatttattccgtacctcgatattgtagtatagaattattccccctcaatctcctccaaaccgaaaaaagcctcagaggtattcctcgaaatgacgtgtccacgtgtgtgtaactgtgtatgtctaaactctaaagcttgttcggcagcaacagaaaatttcctagggagattcaccccagaggggggtttgggtttctcccgccacccaatccccttccagttcccctccaccatgggatgtttgtttggatcaaggggattggtgggataattcctaactaaacattaaaatttgaacacttcacacaaggcttaaagatacgctacaggaaatttcatgatattgtacagaattttcaaaatccatttttcttgagaaatcaaaatccaaaggccttgtccgtttccttgggtttcaatccccaaggggaatctatccagggagggagtgagtgaatccctcccatatcactcaatcccattggggtttgaatcccttgcatgatcctaatccctctcctaaatcccatgttcgttttgactgggatttcatacaaaacaaagcagcagtatactagttgcgtttgagctatttgtatgcatcagatcatgaaaaacattaagaaaaagaaagcctgttctgtacactgcaagtaagcactgctgaatcaaaagagctcaaaaacatggttgtcaccgtagcataaacggcaagtgatgtcacatgtgtccactcactacaatcagtaaatcacataaacaatgatgaattcatcaattttactcatgtcttcaggccatcttcatgccatcacctcagcataagaaatcttgctggggctttgcatgatggcagattgccagactccctgcaacacataatgaattcgaagacaaattagaagggtgaaagccccctaccaaatatatgcagaagatatctcgatcatcattatacagctgtgttcgtttcagcccactcccaacccctctccctcgttatccgcgtgcacgcttttcaaactactaaacggtgcgttttttgcaaaaagtttatatatgaaagttgcttaaaaaattaaaattaatccatttttgaaaaaaatagctaatacttaattaatcacacactaatggaccgctccattttccgtgcggggagatgggttcccaaccccagtaaccgaacacagcctgaaaaagaaaggaaagttcttgatttcagcgggtaaattttatgttcaaagagaatcaatagcatacaggaaaaacaatagctcgtattactaaagatgcatgctaactactcaagagtaacccccccccccccccccccccccgcggaggcagtgacaaaagtatgaaatatagtggttaaatatagccaagggataaacattaaattgagcatataaacatcacatatcatatacttgttgcccttagctgagctgacggctctaatgaacttcaaaaatccatatttgactttggttgtactgcgtatacttgcatatgtcactataattacaagttgatacatgtatgcattccttgtcagactctgctatctagcttgatcaatcagcatgcctagcttgtgcatagaatagaaaagttggattcatcaacactctattcagcaatagatgcataatgaataaaatccgttcaaaatgacagtccaaccgagtctgacaaacgagtgattgtagcttgcaactgtattctggaatcaactacaagtgaaaatcaaaatatctgaacgacagtagttgtgcgcgcttgtgcaacaaaaggagtatcacggaccaaccttttcccttctaagtttattggccatgagtaaaattaaagcaagaaaatctacaaacgaaacttatgtgcatcgtactatgctaaataccgaatatcgcgaattcagagttcagagaagaacacaagaaacatagtgtgtatagtgaatgcagcttgacagagatgtcaatatgactgaatgaaagcaatcttttatgttcttgtgttgcggttacaaactgtttatgctctgaggccaataaaattgtagcagtaaatctttttgctacgttttacaacatttttgctccttccatggttacttcagtagttcaattcatggattgctgatgatccatagctcatctgacacacaactataccactttagtttttaggaatgctacgatgggctcataaagtccaggaatcatccgaatatgacacacaattatgacactactatgctagatactggaatttcagagttcaaatttctgaccaagaacacaagaagaagaagaaaaaaaacagcaccaagaactgcaactcaggcctcccactcctccaattcattgcaagctatacctccttatcctttccgctcactcctcctcctgtttggtgctcgccaccgaccgccgccgccacgcgtgaggtggggatttaatggcatcaaggaaccctaaccataggacgaaggagagatgaggggagtagagatttaccggcgagaacgtggtcaccaaaggggactgccgccggaggggggggcatcgcggcgccgtcgccttcgtgtccgagtcgcgcggccgctacagccaccactgcgtcgccctgagcgctcgcaccccgtcgcgggggtttcttgaattcttcccacacgtcttgagtgggaagacgccgggatgggcctggttagaatcccgaccaggctgaaccgaacaccattttttctgtgggcctggattaattccgtgtgggggatgatggaaaaagtacaccgaaggtccctcaacttgtcatcgaattacaaaatcatcctccaaccgcaaaaccagatataggacatccttcaacttacaaaaccgttcactttaggtccttcggtggttttgaccccggtttcgtccgatgtggtggttgagtcagcatgggacccacgtgggccccacatgtcagggtgtacagtcagcacctttcttccccccttttcccccttcctcatctctctctctctcttcccctttacaggatgcccgccgggtggggagctcgtcggggcaaggtgggagaggacatccggcgggccggtgatgcggcggcggtgtcgtcgacgatgcgggagaagggagagcgtcaccggctcaccgcgcgtgcgacctcggggtcgagccgtcagagaggctcgggcggtggcggcgaggacgccaaggcgcgggactccgggtggcggcggcggcgtacgacgcgccgcgtgtgccggtttgggaccgattagaggagcagagaggattagggccaggccgtcatctcccgacgacggcggcgaggcaaaggaagggtggcgcggcgaggagggctcgacgaagaagatgaggagcgtgacgctgcaggaggccatggcggggctcccggagcacggcgacagccgcgtgaggtacagcgacgcgtggcggcgggcaaacgagggcggcgaaggcgagcccgcagcagcggggctaaggaaacagcggagacgcggttgaggagtggacggcgacgggcgggagcaggccgacggcggcaagggagttgggcgcgacatcaagcgatgcagtggaaggcgtcggcggtgagccgcctcgtccccgctgctcatcgtcgtcggtggaaggcgtcggtggtgagccggagatctctcgacgccgccatcgctgtcgcctaaccccgccgccaccgccgctgcccactcctacgccattcccttgacggggaagcgagggaacgaggaagaagatgagcgtggcgctgcaggaggacatggcggggttcccggaggtacggtcgtggtgcctccctcctcctctccgctctgctctgccagccaccgcgcgctcgcaggccgcctccgccctccgccacgcacttgcccgccgcgccctcacacgatgcctccgccggcccccgctcgctgctacccgttgctactcccctgcggcagagagaataaaataaagaagagacagagctactcccctgctcagctccgcgtcactgccatcgccgcccccgccgctgcggcgtcgctggtcgccgaaaatcctctcccgccacgccccatgtccccatcggtctcctccccacccgtcggccgatctacgagagaaaagtgagagacagaagaggaagggagagaaggggaaagaaggaggtgctgactgtacagcctgacatgtggggcctacgtgggtcccacgctgactcagccgccacgtcgaacgaaatcggggttaaaaccaccgaaggatctaaagtgaacggttttgtaagttgagggatgtcctatatctggttttgcggttggaggatgattttgtaattcgatgacaagttgagggaccttcggtgtacttcatggggttccagcccaatcccggccgttcccggcccaaccgaacaaggcgaagagtaaatcatgtccagctgtgcgcggcgccgcacgtttctttctagtattgggattagggtgagagacgagggctctaggagaggtggcggacacacgaacggctccgatcggctggggctgtcagatcggagggctgacgcaaggggagagagaactgttgcactgtagctatgtggaggcctctcgtgagccttgcaccgttcgcaggaaaactagaggtttaactagaaaggacctcgcgcattgccgcgggaagctggaaaacactgtttgagcatataatcatatgattatatgtacagaattcaccaactcgtaatatgtatagacataagaaaaaaaaatcagcatatcgcttgagattacataatggcagaaccaagtcaacttcatcgtgattacaaaatagtagaaccaccaactcaacttcaggtagatcccagttacaatatagacccatgttaaaatgacaatagtagcacacaactattacaagctcagattcctttttaagttaacatacgtagcagatagtaaaccacatgcatcaaaccataaactctactaaaagaaagtcatgaaaaaaggcgatcaattatatatgtagaaattcaaataatctgggacaaactaaccattatttaatcaacaaaagagtggttgaatcaaataaaatatgctagttagacttagtttccaagccaatgggtgtgtaaaatatactgcagaatatatatggcctgtcaagttaagtttgaaatattttctcgtacacaattgaaagcaacaattgtaacgatagaaatccaacaaaacaactccaactcattctcaaccaatacaattaactaaaaacctaaactgctatattattgtcatggtataccaaacgtaaattagaaaaattttaaaatatcataatccctttatgtcgaaatgcaatttaaatcttaagatataaatgcaatggtaatataatatggttagaggtaacaaccaccatggcatttgtgtagatcaaaagctcgtgtatcagtaacatccccaacaaacatttgacaatgacaacggtaagaaaaatagaacatacgcagaccattatttatcttgaactgaagatcaatgcaccgaatggaaatattgccaatataagcacctgatgaaatttgaacagaatcaatccatcatttgggagaaaacgttttactaaaatggacatgtgagacctaatcaatcctataactataaacaaccaattcactaaaaaaatattttcatgtgtcaaaaacttcattagtaatatccaatagacgaagaccctatttcatactccgatggataatatttggaatggattgacaatattttatgaaatggcaacagcaaaggtaacaccagatgcagatgtgtggcttactatttactactggaaagtaaatgaatatgtgagtaaaagtataccattggaagtcttatgctggacaagattatgcaaaacaaataaactaatgtcatcaggatacattttttacatgcctgtgcagtggttgcaatgtctaagcatggcacttctaataaaatggatagaaatgatcagttgtgtcataaagtaaatgagaggaccgttcatagcatgtgtgatcttgtccttattatgagccaacaaaataaaattttgaatgtagcgtagcatgctacacatgatatcgtccaagaagggcatgagatatgctatgcaagcataaagtaaggcatgaagagccaacagcttaaaagttgcactgggacataccaattggactggtatatagacactgtggcattgatcgccttgaagacaaacggaaatatgtagcgaactcatcatcgctagctagtagaggtgcacctgccaaaacaggtgtgtataacttataagcttttggaattggagaaaacaatacacagatcacagaactggaggcctttacacatggcactcaagagtcaagacaatagagcactaacttggaaccaagctagcagagatgactcagttgtgcgtacgatatcgatatcggtttggcgatggtcttccagaatgtgcaggcattggttaaagcagtacaccaatcacggctgaagcaagaaacaggaaggaatcacatctagacatgcccacaaagaaaaggcaaacattgaaaggcagttcaagcattgaatctcaagccaccctatcattatgttttcgaagaaatgggtgattgagtatgaaactaagggattagttcacaattaagctgaggtatcagctgtacaactaaaaaaaaatgtgtgccatgccaacgtaggaagggggaaaacaaagaaagaacttggtatgtagaagcaaagttggcatgcatattagaatgcagataacagatcaacacaaagagtgattaacagatcaacacaaagagtgatagatataagtgttaaaatcaattaagtgacagtattaaggagaacacatggcagattgcattatggttaagacaactgtggtgagttcagaaaagaattgatcaaaatgctggcatcaaaaggcagcagcaaagaagttgtatagactataatagtgtgaaattccttctccctaggatggaaagagcagttgatcaccctaactatctagtaagcactccaatgacaaaacaaactgtacaccagatgggtgtaatagactactaaatatttgtagatgatgaagatccttttcaagtgttgcttcaatgcaaatttgtgtctaatggctcaagttgtgctgaaataacgtaggcaaacattcccaaaactacagctggttcaattttgcataacaaagtagcattcaccatggtgggaatctgagaaggaaaaggaaacaggaacatacagttatttctggtttcaatagtagccattatattcatggaaggtagaccccaaaacctgtaagacttcaaaactataaagattgtcagaaggttatcagcttatcatcagaagtaatgctcgagtgatgaggtgaaaaaaatcttgaaagtcaaaacagggattcacaatttcccactaaaaatattatgtattacgagaaagctcaattggaacgtggcaccttccgctgtaattcttcagtaaaggagaatcaaaaggaatctaataaaggttaatggaaggaatgcacagatcaagtccatacatgatacatcaaatccggctaatcgagtgcatggctcaaagtccatacttaatagatcatgactacaccaggacccactcatgcatggagatatcgaatcttacacggtaaaatggaggcagtgttaaccttgaactgaataaaagcaaggtaaaccggagcatgcagatcgttgccaaaggaggggaaagcaagggcgctgctgccgatcttcttggacgccacctcagacctgcacacagtgctcatggagaagaaagggagccaagggcgccgctgctatagaaaggcgacgaaagaagccgtggcggcggaagatgcggctgtgcgagcgatttctgcgacgagagacgaggatcgaacatggcacgacgatttctgtgagggaggatggggatcgaccatggcggatgggaggggatcgatcttggcgatgtagtggcgtgcttgcgtggactggaagagatgacaggataaacacggaatggaagaggaagaaacaggggcaaaatgggaaagagggcaggcagtccgcacggacggccagattgcgcacagagctcatgatcagaccaacgacaatggtagactgtagctgggaacagtgtaacagtagcatgggcaaattgtaggtaggattattatgttctatagattaacataccacaaccggctgacggccagcgccataaattaacatatcagtactaagaacagatgatagaacaagtgtaacagctaacaaagtgttcccacataaaagaccaagatgtgtgtcaactactattagcttccctttcaaaatttccctttcaaaatggtcaccagcagcctcccttccaaattgctacagttgcccaacagtcccaatccacctccagattgcagtcccttcatacctgtcaaacaaaataagaacatagacttagatgaataatagtactatgctatgttgagttgttgattgaacatagacttcacacatattcaacaattatgaattgaatggttcaagtgaaccagaatttggaagcagtgtaattaccaaaccagttgcagggccgaactgataacagcctgacatactttgggatacaactgagcttagcacatctctgtcataaagagtatcatgagggaggtaacttatgaaatcagagccaccgacgactggcgccaaactgcatgcagaagggaggggtgcagacgacacgattctcccacagctcatgtcaacctgaagtaagtagtaagcaccgactgggaaggcgatcccatcccgatcttggttgaactcgcctaacatgaagtagatgatatgttcctctagcgagctcaggatggggtacattggtgtcatactcatcggcaggtttgcattacaaaattcttgttgattccacaactcctttagactgatctcatattctttcacccaagtgttactcttcagcagcagcctccataatgtcacatagcgatccccgggattgatgtactcaaggaatccatcgatggagatgaatcggatggatcccccagcataacccatggtgcgataaacttctggtgctgccacctgccctgtgtaccggacatcagcttgatatcccataggaagattgatgaagctgaagtccacccgatcaaccttgtcggagagtaggtcatcacaagagcaaaacagtacgccgcacaggagatccgcccaaaaaccatgtccctcaaacgagaaagtcaggtcggctacgaacgagctctcatcgtccagccactggttgggtaggttggccgtcttggtcagctcccacggcgaagaggacgacgaaggccacaggagaaggacatcttgccagttgatgtcgttgtcgccgtcgtcttctccaccggcgaactccaccttcttggccttgcccaggaagacgtcttctccggtgagaacgtcttcctcgtctccagtgagaacgtcttcctcagcgaactccggcatcttccccttgcccttggcgtcgtccccgccggaacttggcgtcgtcctcgccggcgaacttgggcatcttggccatgagaaccagtgcgtacgactggtcattatagccggggtggcggcgcgcgatgagaagtcgtgtggtacggctgacctcacagcaggaaggttcacaagggatcatggagagcaccttgccaattgtgtcatagatgatgtaggcgctacaaggagcttgaggcaggtcagatgtgaaaaccacaatgttcttgtcgacggcgtggacgaagggaaacaatctctctccactgctgctctctcctcctctcagggagaaagaggagagttttggggcatcggcgatgcgcgcttccagatccagacaccacaccaacgattcggcgtcgaagccggcttggacgttgtcgcccaaggcatcgaacccccacgcgtgacggcttttggtagccaagcgcaggcaccgcaagggtggtctctgatctgcgtaggcggcggcgtcacggctcgcgtcgccgtccagcacggaccaggaagggaaaagcggatacatggtggtggagaaggcgacgtagggcaggcagaagccgtcggcgaacgcaagggcaaggggggattgggaagagggatcgatctcgtcgtctcgatctgtaagcgccgtcggaatcgtcggatgaaggacgacacggatcgatgtgattaattagacggcggatgcgtagctacaacaaacacaatgcgagaatacggcgtggattgcctgttttggttcgagaacggcactccagagactccgcgggtgccacgctggtgggtgcgggtcagattgtataagttagcgtgggaatttttttaaacaaatttcttatacgattcattctgtattatcaaaagtgagcgatcttcagaaccgacttaaatacggatatgtatttctaaaagcaaacgaacttaaaaaccgacttatacacggatgacgtaccaaaataccggcaaaaacatcttctatctatctatctattatattactagtaaaatgcccgtgcttcgctacgggtaaaaagaacgtttaaatgtaataaatatttcaagaacggatataaaacactgtcccattttgatatactcatattgtcataacgcgctctctatcaactctcacatggcaagcgcatgatattatttacaaaattgagatggtgcttggactgtaaaatatcgtgttttgcggatgacggaaagaaaataattacttacttaaaattattgatttttgaattatccgttattgttcgtatattgtctgcattatgcaccacacacaatatccgtggatccacatagttgcctcgtgttgcaatagataaaaactaaattaaatttatgttgacgtaaaaattaaactatatatcataattatgaaagctaatggcatagccaaattatgaaaatcagtgttattattttttcaatgggagtattgttttccatttataaatcacattgtcaaatatcgaaaaaaataagaagcagattagacgtagagaaaaaaaacagaaataaaaactatggaagcagagtgacagggaagggataagaaagcagcagcagagcagtctcggacctctcggttcttccattctcaatttatctctatacacgatactctgttcttatcctcccatctcactctcttagacactggcagggacatgtaaaaaaaccgctccccatcactttccccatttctcctcctgctcagctgctctcgatgaatccgccgtcttcctttttctgctctttcctcttggttttctctcctctcatctgctgctctccctcctcgaccacccaccgacggcgccactccctctccgccgctccccctccttgtccctccaccgagcccaccggcgatggatccaactcccccgaactcgctggcgatggatcggccttctctgagcttgccgacgacagatccacctcccctgagctcggtccagccgtcgtcggcgttgggtggcgaatcagtcgacgccgatagcagatcgagctccccaacggtggattgagctgccacaacggtgcagttcggtgccgagcggattggggcggctttggcctttaggcggagggagtggtcgaagacggggggaggctgagcgagtcgtggatgccggatccggtgggtttttcttgtctcgtgatgtcctccatgatcactatttggtctgattggtgtttgttttgttggatttctcaggatctggtacagtggacgaatgtctggctcgacgtcccgttggtgcttcttctggtcgtccagtcggctctcaaggcctggctgcggcccgccgagtttgagagctcgcctgccccgtgcctgccagtgactgatgtccttgattcgccgtcagttccagccactgacgcctatggtaattttcatttttaagataatatatcatgttattcatgtgaaatcttgggatcatcttgcattggagcaattctgtttttgaaatgggggaattgcggaacaccagtgtatttccatgctgattaatttggaacatagcatagtgaacaaggtgacaggtggttatcttgatcttaaactgtctccaactcttcattgaatgtttctcagatgaattgattcatttaattcattaaagccacaggcatatgctgaccactgcatttcttgtacaatgttgaacaggtacatggagttggctcactgagttgatgaggctttgtggttcatggcagctgatggactcactatggatcaccctattatgacaacagaattctggacatcacatgagtgccttcttcttccctatgagcaagcattacctgaaaacattagagtgaaactccctcacctcatacgtgctgttcatgttgctgtccagatagtaacatgggttaccgacccgatgcatggtaacacaatgaaggctccttgtggcctcaagactcgctcctttgctacttttcagtatttgcttgttcctattacttctcagtagtatgtaactgaataattgtcttatttttgctggacaacctaattgcatatgcactatgctgctatgcagagagaagctgtttatagggtgtttgatggttgattgcggcgtacaatgtctgacaggtacgcggaagtttccgatgcttaatttgaattgttgatattgcaaattaaatcagtaaatctcattctaagtcttttaactcctgttattcattttttattccccgcacaacatacacacacgcacaagttatatctcaccttccagtatatatgttttttaagattgcttttgtattctagtagtttttatactgcataagagtagttttttttttaaaaaaaacagaacagttagttaatttgatttcattggtttgtagctctacgacttatggaatactgagatgaatataaacctaggtggtacctgtggattgtaatttaaactctacacacatgggtaatcttatatgtcttttcgatgaattaaaaagcttcacaattaagaaaacataatgtatttaaataataaaacaataacgcgaggatctctgcgtgcacaataagtttaggccattaagaatagaatgactgatctacatgatatataatagatttcaaggttctatcacaaagcagaattccatcaagtttatagtgacaaaacactaacttttgaaacattaacaaagttcaggagatcaaaactcaaccaaaaatagcaaaattagaagagacctttaggtgttctatctaaaagaatagcatgcaaagtatatttatctagcaagatattgattaggagattatgtactggtaaaaacaaataattagtttacattatgttaaataattagtttacttgcttgattctcaagtaatttatctctctgaccagaaggtctgcatgatgtgtctgttctagctggaaggccatattggtgtatgagaatctgtcaaatccctatggaatagcgggaactctccttcatgtccaagtctcgcagtcctatcttccgaagccggtaagcattctgcttccattcctacttttccaggcagctttcctagagcctattccttacgtaaaaaatgacctctcgtggtcctactctgtctattcgtttaagccagctgtgcttttcattttcttttatctttccgcgagggcctctgctttcctttctatccctttatttctgggggcattctaaggttttcatgatgatctactctgtggtgctcaattatattactgattgatgtcttacgtttttacagctgtttttgttcgttttattgagctgcaggagattagatcacttcattattttgacactaatatgatattccaacattgaatggtatcctattgtgctaatcattttcctatgttgattcctgtagaagtttattttcaatggcggacatgaactttgggagtggagaagcatatggtaggtgttttgcgctgccgccagttggaaatatgtaagttttacggtctctcaacctcaactccttcctgcttgtttgtgttgcatgatgtttcatggtctgcactgttcagtggatgtggtcatatggatagtcaacctctaaatgatactactactcgtactgaagtaagtacttctagcttgtgtggacactaagatctatactattatgtgggtgtggatgttcaaccactaaatgatacttatcatactgatttgtgcaaacattgataatacctctaaactgcacttagttagctgtgattttgagtgccaccacgcaatcatggaagcaatctcagaacaacttgatatggatgcatgatgcatatgtattgagtattttgcatgccactgtttgtctttatttcatattagaattgcatatagtgtagtagttgttcttgctcctactacatttgacctggcagagttgatgcaaagttggatcattctaaaaaaaattaatctggttctaaccttttcatttgtgtgtatgttaagagtgaaaaataattgctgccaatgcttgctatatgtaattgattttgtctgaatttactcaataatttaggtaaaaggtgggaaagtagtgagcaggaagtagaagaataatttacaaattccagtctatgagaggagacgaataattaaatatccagattcaattgtgattgttccaaaagttatgccaaaaaataaatacaattcttaatatgtgcatcattaagggctaaagaattacctgcgtccatcataaacgtagatttagtatcacgttgaaccagaaattgctcactttgaaaaaaataacaaatttgggggcatatattagtgccgagtgagagattgctcagtatccacaccaaattttgggtgcatatgagtcttatttgtgatatgtgatttcagttttttgtataggttgataagatgtttgtattctacttggacatgtaatttcaatagttggattctgtatgtaattcggtatgtaatttctatcattggactgtgtgcaatttttgggccatctaattgttcccgactctatttggcctttgtaatttctgagtcatgtatttgtatcctactaaatttgtgcttcaacccaatcggatggaaaaaaagaaaaccacggtaaaaaaaaccggacatccgaaaaaaaacagggtagaaaaccgcaaaaaaaaaccggatagaaaaaatcaacgaaaaaacggaccaggaaaccgtgaaaaaaccggacggcccagaaaaaccggacagaaaaaacgacgaaaaaaaaccgggttagaaaaccacgaaaaaaccggatggcaaaaaaaccgcgtgtgcgttcaggaaaccgccgacggacgaaaaaacctcacggaagccttacgaatttttttattaggtatagatgcagatattatattatattattaaaacagctttcaaagaagtcaccacgttccctgtgagggctagaaatttccacattaatcggagaaaaggaaaaatgtgagtccaagtagaaatacattttaaaaattattgaaattcagaattaaaataagcaatattgagataagagtccatataagaaccaaatacgagattaatcaaaatttggaataaaataaaataaaatttaaaattagaaaagaaaaggagattccaagtaggaatacgatttaaaaataattgaaattcgaaattaaaaataagaaatattgagagaagagtcgatataataacccaatacgagattaattaatattcagaataaaaataaaaataaaatccaaaattagcaaaaagaaattcccacattaatcggagaaaatgaaaaaggagagttgaagtagaaatataatttaaaaattactgaaattcagaattaaaataagtaatattgagagaagagtccatataagaacccagtacgagattaatcaaaattcggaataaaaataaaataaaatccgaaattagaaaagaaaaggagagtcaatgtaggaatacgatttaaaaataattgaaattcggaattaaaaataaggaatattgaaagaagagtcgatataataacccaatacgagattaattaatatttagaataaaataaaaataaaatccaaaattagcaaaaataaaagaagagttcaaagtaggaatacaatttaaaatttactgaaattcggaattaaaaataagcaatattgaaaaaagaatccatataagaa

SEQ ID NO: 29517 - DNA, 3482 bp, Oryza sativa
ttaaaaatggagggagtatctattatatactaaaactctaaaagtccattaaatttacactaaaaatttttagtattttttagtacctctcaaatactacaaaatttatctttcaaaaagacatatttatagtaccaaagttatgacgtaccgttccttgttggaatccaaaatgcacagttgagagattcctgatctcagacagccaccacaccagctcaacaagaagggctcctgccaaagtgccaaaccctcagcgcggaagacaatgcaatcatagtccatacatcgacgagccgcggcacaaggccgaagagcaagcctcgggagacagataagctcgacgcgcgagaaccagcactgcacgatctggagcgccacgagccgcgaccgcggcgcgtcgatcctcagcgcggcgtcgcgatcggcatcttttgcacccgcacagcgacagcgtccgcagactccggcagcattgcctcgatgatcaccacctacggcgacgacgacggctcggcggtgaagagggaacaggttgtgcagggtgaggctcgcgacgcggccgaacagctccggccgcgcgcggcgaggaacgacgtcaaccggcgcgcgtatagtacagcgcctggtcgcgctcctcgcacctggtcatcgcgatcgcggtgtgtagctcgagctccaggagctcgacgcggacgcggcgggtgtcgatggcgtcgccgaccacaaatgcgttgatccgtgtcgtcccacatccaacgagacgctaaccgattcggtctccctccctcctccgttccgttcagtcacctgtgaaatataaaaataaaaaataaatcgggatgtgccccgtctcctactagtaccgcgcaactacaaaagaaataaacccgcaacaagaaaagaaaagaaaaaaaaccctcgctgccgccgccgccgccttaggtcgtccacacaacggtgggtggccaggtggggcgccgccgcctacgcaattaccttggttgattcgccggattcacgatcatgtctcggacttcgactcctccttcctggtgtttgctactccaaaaagtacactgctccgactacatcgacggcgactacgcgaagaagcaagggcttttgagcctggatctgctatgcgaaagcaagcgggcttggggattcgacgacagcgacttggtcgatggtatcgacaccgaatcgatgatggagtacgtcaaggtccaagtgcgcgtcaccgatgcaccaaatctgtccttcctcacgatgacgctgggaggagacgaggaggagaaggccgtcttccccatcctccatgccatggacaggaatttacttgtgttcgacctcagctttcctgacaagatcgatggtgtctacctcatctacgatacaattggcaagaccctctccatgatcccggcgctatctagcctatctagccctgatgggatggcccataccactcaagttctcatcgcgcgccgtcatgctgctgttgatgatggttcctatgctctagcccttctgggcaagatgggggtggttgacaagccgggagagatgcctgtgatcagctggccagatgttatctaccaatggcggccatcatcgtcgatctcaccgtggaagctgatcaagaatgccaaccttccccaacagtggatggcggacaagagtgcgttctcagctgatatggccttctcctttgaggggcatgccttctgggtggatctgatacacggcgtcttgttctgctcttgcgctgacctgctctctgacgacgtcaaggatgtagactttgactccatcgatcttcctctagattgcctcaagttcaccccgcatagctggacaatggcagagcgtcaagcatatcgtaccgttggctgcactggaaactccatcaagttgatctctatgcacttcagcggatgcgtcaaacgtggtgcccccaaggtgaccgtatggcggctggaggtgtatgctaagatttgggtgaaggagcatgtcctaaatcttaagacattgtggacacaacctgcattcttggctgctaatttacccatggacatggcggccatgtatcctgtgctgagtatgcacgaggagcatgtcatttgctttatgctttggcgagtatgatctcagtgcctcaggagttgtcctacccagcaatgtgcgacatttccttcgtgtcgatatgcttagtgccacgcttgtctcttccgcacccattccttcggcttacagctatgccccagttgttgtgccttccgacctcacaagctatatccctcctactgcagctgttgccttccctactgttgctcctactgtctccaccgccgccattgccactgttgtctccccacctaatgtccctgcctcccctgctagtaatgcctttgccttacctgataaagccccgtaagtagaaaagttgttgaatgtgcatgataaagccccgtaagtaaaaaaaaattgcaagacttctatgtgcaaatgaaggaattaaatttgaaaatatacattgttttttaatattttgcgtttatatacatgtatgtaaaatatttgcataaatatacctcctccgcaagcggtgccgcgcttccattctgcgggaccgacggtcgtgcagcacggccgtgcgacaccgctcgctcccgcagtccgggagagcggcagcgtggtggagggcggctgcactcggtgctgaggcggtcgcacggcgcctatgcgcgggaccaaccctgtcgcgcggaaccatggcacgcagcaccgggccgtcccgtcccgtgcgtgcacgtgtcgcggccgacacgccccatgcaagcatcacctgtcaagcacccatggtcgcatgcaggcagttgagccagtcaaaccccacaatacatagtccctagcttaagggatttattaagccaaattaatctgtcattagcaaatgtttactgtagcccaacattgttaaatcatggagtaattaggtttaaaagattcgtctcgcaaattagtcacagtctgtgcaattagttattttttagcttatatttaataatttatgtaggtgttcaaacgtttgatgtaacatggtgaaaaatgttagggtgggatttaaacaggcctagggtgtgttcgctagtataggttcccaactaggaatacgcggaaaacggagcggtccattagcgcatgattaataaagtattagctaaatttttttaaaaaatagattaatttgaattttttaagcaactttcgcataaaaattttttaaaaaacacaccgtttagctgtttgaaaagcgtgcgagtgaaaaatgagagagatgggttggaaaatggaggtgccgaacacacccctaagctagtgcctgggatttgactgggtcaactgcatgcatgcgtgctcgacatgtgatgcttgcatggcacgtcaaccgcgacacgcgcacacgcgggacggga

SEQ ID NO: 29518 - DNA, 4503 bp, Oryza sativa
tcggtcccgcgttcccatcctacggagaaggtatatttgaggtatatttgtgcaaatgttttacatgcatgtatataaacgcaaaatattgaaaaacaatgtatattttcaaatttaattccaaatcttcatcggatggctgcagatgcaattgtagattttgggccagatgtaacagccattcgactgaaatgaggtccatctatatttgaagagaaaagatgggtctaattagggaaaagaagaaaatctgatgctagtgttggctggcataaactaaaatcatatttggggacggggatgttacttcaaatcttacttatgtttccctgacttatatgttatgatgccgccatgtgtccaaaaaaaatttatcactggtagcctggtagtttctccctttctctgaatgtggtttattagctgacttatgctgaatatgatgcttccaggttaccaaaccaacatttgcaagattcaattagtactagctgctagctagtttatatgtgaaagtaagtttggttatctgaaattttattttcattcagtgaattgttcctcgctttccactcacaatgtttactatcaaatagtctttgaaagtacgctgagttgtctgaaattttgatttcagtgagttgtgcactgctttcttctcacagatttcgtcagatgcttcattgcttgaggagcttaagttcgccttgctctgcagctttcagttagagactattgaagccatgaatcgattacaccctgttcgggtcgagtcgtcccactctctccgcgccgtcaaaaccttggaaccacatgctccgccgcctccgcgctcatatgctccatctgtgctccccgtggccgcagtctcgccatcatcgccgccgagcaccggcattttttttagcaactgaacgcgaattaatcccagctgcggtagcgcgagacgccatgcctggtcgccggagatgaacacccggccgaaatccgccgacgactccgacagccaggggtcgccggtcgccacgacctggtcacgcaccaaggacatgacggtcgccgcgtcgccgtgggcagcggggaggcggtatatcggcggagaggacgacggcgggaagctcgtatgtacccactgccgtggaagtagacgagcaccgggagattctgcttctccccagcgacggcggcctgtggcttgtacgcccgaagcttgaggccgcggccggcgtcgtagacgacgtccttccactggacggcggacagcgggggtggcgcaactccggtaccggagggagggtgttctagtcctcgaagcggaccaccgtgccgtcgctcaagagctggaggttagggccgcagtcctcgacgacgtacggcgccggcgtggaggatgccgtcgccatggccggtgaggtcgactcagtcatctcagtttgatttgaagctaaatacagtcatacagaggacgaatcgaatcgattaccctgcagcttggagaaatcatcacttcgggtgctaatatacaatgagctgattaattaggcacgacaataatatgcggggcgctgtcgcagcacgttgatatactaatatggagtagtttgtatattaatcgaagctaagctctagaaattaattgcttgcgcctatacgaatgtgaagttgcttgatagccactgcatttttcgttctgtgatctgacctctcctgtaatatgttgactattgagctttcactaaagggaggagtcgtcaaccatgtagcctaccctctccgttccaaaaataaaccaatcctagctatgtatctgaactgaacatgtgtgtccagtttcgtagctagggtttgtttttattggaacagagtattatgttgaaagattattctaaaattttgagggaatatcttttcattgtttatatgacacttaaataggtattttttaaaaaaaattaataaaataaattaatatatgattgatcacttcataaacatggaagttaaaatttaagttttacatgttagaacgaaaaaaaattgtaaatatattttaactagctgtaatttcattttttttaacttgtaagaatcaaaatttaacttgcatattttgtagagtgatctatcacatgttagtatatttttttaatattttaaaagtaagtttataactatttaagtgacgtatacataacgaagaacgagagtttaaaatttattctgagcctgtgccttctaagtaacagttgttcgtagcgaacttgcgtcaacgaccatccaaaatgggcaatgcaaaaagatcttgcaacactaatcaggcgcagatcttagtggcaacgacggcatgtgctgcacttgacgcattcatacagatctggtgctcgacacgccggttcatcacaacagacgagaaaatagtgggctactccgtagtggcggagccaaaaatttaactatatagggtcgattacttctagtttgtattctagtgtaattatttctctgttttttctgaatttatacataaaaatcaagttttataagagcgtttaaacaagctgtggagtcagcagatagattatgcgtgatccgccactgctactcggtaggagtacagtcgtacactactcacatcgcatgacgatgaaaagtcaaatcaccaaatcaaaattgcagtggtcaacaagcaacttcgcatccgtaggtgccaagcaattatcatgaatctgtcgaaattagccctcggcaactattcaacgaaatccacgtgcttcgccacccaatcgtctcacacttgcatcaaagttctaatcgattactactactagctactcctgctacaaatagtaccggaaagctcattcccagctgtagtggagccgaggagtcgattacagcatgagtcaaactgagctgcctgagtccacttcgccaagcgagagctcgccggccatggcgtccaccacgccggcgccgtacgtcgtcgaggactgcggccctaacctccagctcttcagcgacggcacggtgatccgcttcgaggactacaacatcctccctccgccggtcttgcctcccgcgctgtccaccgtccagtggaaggacgtcgtctacgacgccggccgcggcctcaagctgcgggtgtacaggccaccggcggctaccgtcgccggcgagaagctcccggtgctcgtctacttccacggcggcgggtacttcatcggcagcttcgagatggataacttccacgcgtgctgcctccgcctcgcccacgagcttcccgccgtcgtcctctccgccgactaccgcctcgcccccgagcaccgccttcccgccgcccacgacgacgcggcgaccgccatgtcctgggtgcgcgaccaggccgtggcgagcggggacgccgccgacccatggctcgcggagtcggcggatttcggccgggtgttcgtctccggcgactcggccggcgcgggcatcgtccaccacgtcgccctccgcctcgggtcgggccagatcgccgtcgacccggcgcgcgtcgcggggtgcgcgctgctgttcccgtacttcggcggcgaggagaggacgaggtcggaggcggagtacccgccggggccgttcctgacgctgcccttctccgaccaggggtggcgcctcgcgctgccgcggggcgccacgagggaccacccgctggccaacccgttcgggccggagagcccggcgatggacgccgtcgcgctgccgccgctgctcgtggtggtcgcccagctcgacctgctgcgcgaccgcgacgtggactacgccgcgaggctgagggcgatggggaagcaagtggagatggtggagttcgaggggcagcaccacgggttcttcgccgtcgagccgttaggcgacgccgggagcgagctggtcccggtcgtgaggcgcttcgtttacgggaacggtggtgacgctcgcggcggcgtcgccggcgtgttcaagtaaattcagccgaccagacaccgatcgctttttgtggcattgcgtcagctgccacgtgacagcatgagacacgccccagttcccaccatgtgatacacggccacggcccaccttggaagcctattggacattggattttaactaggcccactcatatacgacttgtaccaaaccaatcttctcaaaaagaaaaggaataagttcactcttggtccctctatttgtcacccagtctgattttatcccatgatcgcaaaactgggtacgacagatcctccaacttacgaaaccgtttaaaaaagtccctcggcagaatctgacactggttttggctgaagtggcgcttacgtggctattttaactcggtcttcatacgatgtggcattgacgtggcgtttacgtggcaattcgatctaaaaaataataaaatctatgggacccacatgtcagtttcacatatacaataataaaaatggtggggcccacatggaccccacctatcatcccctctctccccttcctctt

SEQ ID NO: 29519 - DNA, 16229 bp, Oryza sativa
cggtagccgcccctatgcgctgcccgccgctgctcaccattttcaggggagagagagaggggggtagggagaagagaaaggatagaggggatagagagagagaggtgatgacaggtgggatccacgtgggccccaccatttttttattagtgtgtgttacactgacatgtgggtcccatatattttattatttttggatcgaattgccacgtaagcgccacgtcaatgccacatcggatgaagaccgagtcaaaatagccacgtaagcgccacctcagccaaaaccgggtcaaatactgccgagggaccttatttaaatggttttgtaagttggggaacctgttgtacccggttttacgatcgagggatgaaaatcagactgggcgacaaatagagggacccaaagtgaacttattccaaaagaaaaataagatgaattgtatgattgctgttttttcttttcaatgacgaatttgaaattccacatgccatttgaattgttccctaccatttgtgcatttgcgagagaggagtatgacaggtgggtcccatattttttataaataaaatgctgactggactaccacgcgtacgccacgtaggacaaaactgctctggattgagtcgagggggggtaatttgtctggtattgaaagtttaagggtgaacgatgtcttttttgggtttaggggggtaattcagtcgatcgcgatagttcagggggaggggggttaattcgtactttttcttaaccactaatccatttgagatgcattgctggagaaaggggcatcggtcccggttgataaactcctatagtcccggttattcggtcgaggggggtaatttgtttggtattgaaagtttaggggcgaacgatgtctttttcgggtttaggggaataattcggttgatcgcggtagttcggggggaggggggttaattcgtactttttcttaactactaatccatttgagatgcaccgctggagaaaagggcatcggtccccgttgataaccccctatagtcccggttatgcaaccggaatcacgaatccgggactaaagatgccccatctttagtcccgggtgaaataaccgggattaaaaattataccaaccgggactaaagatggacccaggtcaggtccggttgctagttcttttttcttttttttcccattgttttaaacattgaatattgatttcactccatccccgaatcatccccagatcgtgaaatcccaaatcgatcatcacagatcagagaacaaaaggatatcttcaaatcctcaaatcgatcgtctccaaatacatcacaaattctaaaaaaaatacatcacaagttctaagaaaatcatcacaaatacatcacatatttacatcacacacaaatcaaatacatctaagatccgaatcataaattctcaaaaaaaaaatccgccatccaccaccctccgctggcctcgctcgatctgctctcgtcgatagaggaggaataggaaggagaggataagagagaggaggaataggaaggagaggataaggataaaggagaggaatgggaagatgagcaatttgggaggataagtcctagggattatatactgtgtatggtttttttacccactgggactaaagattaattttcaatcctaaaaatgcttggccccctgacagtctcggtcagaaataggaaggagagtgtaagagagaggaggaataggatcacctaggactaaagatcacctagggccgacagagttttaaaccgagataaaaaaaatcatatttagttccggtttctattcaaaccgggactattatgttttttgtccacccaacaaagatggtttatccagtagtgatgactaataggggaatgactagaatggatgcggagggagaatgattgttgccgagcaaccaaacaaagccttctggatagaagccatgttgctgttgagtggatgggcacataaccgaggaatcggtgccagagagcccttgagtccatgttgttgtcgagtgaatggcacatgagccgatgaatcagtcatagcccttgagtcggctacccgtgcgattcctctcttgacttcgcgtgtgggttctcctgtgcgaaaaggctaatggtcagcccatttcctttttggcccactcggttttggcctttccttttttttactaggccttgtttaattccaaaattttttttgtcaaaaacgtcacatcaaatatttaacacatgtatagggcattaaatgtgggaaaaaatcaattgcacaattcgtatgtaaattgtgagatgaatcttttaagcctaattacaccatgatttgacaatgtgatgctacagtaaatatttgccaaggacggattaattaggcttaataaattcgcctcgcagtttacatgtgaaatctgtaatttgttttgctattagtccacgtttaatacttcaaatatgtgtccatatacttcaaaaactttacacccaaagaactaaacacaccctaatcattttataggcttatggtcacttagctttctttattcggcagatcgagtataaattgagcctttttgttttcctactaggccatttcttatcatcccacacgtattttttgccttgtctatttttctaatttattttaaaaaattgattgaagttatatgtacatgttgtacgtacaaagttatatatgtatatgtaaaaatataaagtttatatgtataattttttattgggctaatgtgctactgggccagaaatcctcttgttggccattttaaaaaaaagagaaaaggaggcgtagagcaccggaaaagctaatacgcgcgagccggcggtgcgcgtttcgggcccagaaggcccagcgtcgctgtgctggcgcgcgtgcgtctcctccactttttttttaccttttttttttccttttttcccacttttttcggttttttatctagcatgttttgagttcgaaagttttaaagttttgagttgaaaattttcaaatctgaacttgaaagtttttaaatcccgacttgaaagttttcaaatctcaagttgaaagttttcaaatctcgatgaaaagtttcaaaattttcaaatcttagatttgaaagttttcaaaatctcaacttgaaagttttcaaatctcgagttgaaagttttcaaatctcaaattgaaagtttttaaaattttcaaatctggacttgaaagttttcgaatctgagtagaaagttttcaaatttcaaggtgaaagttttcaaatctgagttgaaagtttttaaaatttgaaacttaaatcgaaagtttttagatctaacttaaaaaaaatttcaatatgttagtaaaaaaatctctagaatctttcctaattactatcattagtgttaagtacattaactaatatagttacttaagactaaatggagggaggaatactcgctgctgacgcgcacacgccaactagcaacctccgtagatcacacccgtattggttttgtccatgccttattttttcgtttccaattgtgcgtcccttgtgcgtgattgaccgtggattagaccacccctctcctgtgttgttcttgggccaaagctggcgtggcacccatgttatcaacctgggtccggaatgcaaatatgataaatgtatatggtgattaaataaaactatagggttaccttaaatttattgtaaaactttagtaactaatactaataaaagtgatgagtgaaattaactcaattaaaaaagcggcatatgctctgttgctcaccttagcactggacactggtaggtgtgaagcaaacgtcagtggtaaagttggtatcagttggactccgttgtttatacgtcggtgctcgtccttttctgttcttcttcaatctgatttgcttaggtgtggaaccaacaccaaacctttaaatctactgctctactttttttttaacaactgtactatttgctggcatccgttaaaagagcaaactggaattgtttacacgtccctctagtctcatggttccagttctagtatactagagaatctgaacactactccctccgtccaaaaaaaaaaaaaggcaaacgttgggtttccgtgtctaactttgactgttcgtcttatatgaaatttttttataattcgtatttttattgttgttagataataaaacatgattaatattttatgcgtgacttatctttttaattttttttataattttttcaactaagacggacagtcaaacgttgaatacggaaaccagggtttatctttttttgggacggatggagtacgttataacccatgtggtcaataaaattgataataatctcaaaggatatccaaatcctatatactttcatagagttgaagaaaaagtttatacatgtaccataacccctcagcgtgatgtcttcgaatgatcaatccatagtctaatgtgtatagccttttttctatgattgatcaaggccacaaatctctttcatttgcaccttatttccatctctgccaaacaatattcccgtggcaaatgcccggaattttatccaataatactataaaaagtaaagagcacttgccacaattccactatccatatggcaaattgtttggagtagccgccttcggatgagatcaaggatacactacctacattcccgaacaaaaataaaaggaacaatatactccatggtgaactgctagatagccaccaggaatccacgatgcgacagcctatccatccatcgccaaccaaagcgcccgatggagcatcctctcactctcccgatcacgcaccagaatttccacgcggctgcaaacatgcaactctccggacgcgatgcgccccatcgctgtccaccgctcgatctatcaatctttcggcggcacacgccggaaaggcgagctgccggcgacggccagggccccctcgacacggccaccaccacaaccgaacaccctgttccgagccggtgaaaaaaaacgccaaaaaaccccacgtagcgcactagcgtctgtagctgcgccactgccaccgccaccgccaccgctggccaaagccaatccaagcttcccgttccgcccccgtaaaaaaaggcgttccaagcggcggcgtacttatcgaaatggagcttgggcccccctcctcaacacggtgcgaatgcccgcattaactagagcgctgcgctgtgcactgctcgctgcacgggtggcactcgcacgcgagaaagcacgccgcgcattcgcctctcacggcgaaatgctgtcgcagcccgccgcggcgctggctcgcttgccccccgcgtcggtgcgcgtcctcgtcgggttcggggcggcgctgctcgtctcgctcgtcgtcctccaccgccgcccctcctcaaggggggcggcgggcggcggcggcccccggaagtacgacccggccgcgcggttcctggccctgtccgagggggcgaacgcgaccatcgccgccgacctgcgggcgctcaccgcggggccgcacctcgcggggacgggcgcggcggccggcgccgccgcgcgggtgctctcggggttccgcgccgcggggctccgaaccctaacgcgggagtacacgccgctgctctcgtacccggggcacgcctccctcgcgctgctccgcgccgaccggaccctcctcgcgcacctgtccctcgacgagccggcggaagtcgggagccgcctcgtgcggccgtaccacgcgtacgccccgtccgacggggccgtcgcggaggcggtgttcgtcaacctcggccgcgaggaggactacctcacgctggagcggctcggggtgagcgtccgcggccgcgtcgcggtggcgatccgaggaggaggctaccgcggcggggtggtgcgccgcgccccgaaaaggagcgccgctgccgttctcattgccggccacgcggacggcggggtcgagaggggcacggtaatcctcggaggccccggcgacccgctcacccccgggtgggccgccacggccggggcggagcgcctggatttcgaccacgaggatgttaagcggcggtttccggccatcccatctatgccggtgtcgggcaagacggcttcggctatcatacggacactaggtggcccggctttgccggcggattggcagaccggagttggactcccggtggatgtcggcggcgttggacctggtcccactctggtcaacttcacatatcaggtataaaatacaaatcgcctggaggattgtctatctatgattactcgcttagagacaaggacgctgggtacgtttgcagggaaacaggaatcaaagccatggaccgctcctttgacctatcttgactgggttttccagtgataggctgttgccattttgttttcaacttaagagagacgtctgtgctgaatggggaaagagtcatcgtagtagtccatgttgtaaactgccgtgttgagattctggataagctcctaaattgtttgagctgtaaaagatgtcactacatttgcagtttgattaggaagcacagtaaccatttccttgtccgcttgactattttggtttcagtggacagtggtcctagcacctgttgttttattagcccttttttatatctgtggtagtgtgtacaaaactacaaatagcattatgcttgatgttgagcgtattgaccagcctttgctcctttgtagtgcatattggttaaacttagttagattattattgttacagatttatacagaatgagaaatattattgtgggcatactgagctatgagcaccaaatcattgagcacttgtgacgtaagttttgcaagtggtatgcttttatggctccctttgttatgttgctgtaggcctatttgtcattattctgtgttgtttctatatgctggatctgttgtcatgtctctcaattggatgagctatatatattggacaaataaagcattgcataatagctgtccgtgcttgtcctccaggcaagttagtgtttcaggatgcatcttttcttttgcacagttttgcatatttgtataactggcagatgagactatgttttagagttaagtacaatcaagaccataatggttttctcttatatcttatttaaggaggacaggaagatgggcatgatacaggatatttttgctattattaaagggtacgaagaacctgatcgttacgttatccttggtaaccaccgagatgcatggacctatggagcagttgaccctaacagcgggacatctgcgcttcttgatattgctcggcgtcttggaataatgctgcagtcaggctggacaccacggaggaccatcattctttgtagttgggatgccgaagagtttggaatggtgagttcatattaaagaaaattgagaatatgttgctgaacaccatgtgaaaaaggaaaccatgcagatgcccccacaccctaacattttcaaagtaacatatatggcatttgcattttatgaaaggaaccccacaaaaaaatcatatatagttggcatgttcgtagctatccttttgaatgaacttttctggttgatttgattcatctgtcacagttctcaaagatctcatttatttgtgtcccgtttatttcttttctacattttgaaggttcttttttccagatcggatcaactgaatgggtcgaagagaacctcgaagatctgcaatcgaaagctgtagcttacttaaatgttgattgtgcggtgcaaggaattgggctttttgctggttctaccccccagttggacaacctcttggtcgatgttacaagacaggtagagattaatgtgtttccattgcatttttctatgagcttgggttttcatttagaaacctcagtccactcagctatttataccaaattttagaattgttctgaagtgaagttatgtttattcattcagaactttttgcttctaggtaaaagatccagatgttgaaggaaaaacagtccatgatacatggaataaaatgaccggaggcatcaatgtaagatctcgaaggtttaaacatgcttttctatatacatattgagatgtactcaatccaggttgtcactagctgttctaaactggtttaaagtcaaacatcacttttataatagccatctagtggtcacactttgtacactacagggttggtaactttgaattatctatgccgacaactaatcttctgcatagtgagttactgagttggttgttcttttgttttgagtttttagtagggtaaggtatgcagttctacattgggtgcagttgctccaagtgcagggggcaggcccatatagatctcagttcctagagtgagacatcccccacacaagatatacttacgagatgtgctaatctggtgtcgtcgaatctttgttgtagtcgacagtctacatgacaactatacaaaaatgaaagtgaaaattactacttgctatgcactgatcttatacttctgacgtgagcaattccttctttctttttttcaaatccttacaaaacaggtaatataaatacatgaaattgttatttagataaagatatatcgatattggtttagtagaacgcatcagtggcacaaagaacgaaccaaaaataatagtaataaaagataacgataacttcatgtttcataacttcaccttatataggcatctagccctcaccaccttcatgggctaacgcaggcccctggctgtggcccaggtggcctggggcctgaaagtgaaaacctattcatagaaactagccaaatacaggctgggccaacccggaattaagcccctgaccaccttaaagctagttgggggtggcacctccaagataaccctctaattattaggactatcacatagtatgaattaactaattacttggtatctggctggttgatctttcaaaattgtttcgctgaaattctttgtcagaatttttgaaaaaccttctgaatgaaatatggtcaacaatttatccatcagcaatgattagttggcatgaacagctaattttgtaacatctggaatgactcccactcatttttgtgtcaagcccacgtcataattactccaagcactccaaatgatggcttccataaataccatggaaagctccaaaccttacaaaatgtcatttgctttccacgacaatcagatttaccatttaagggcgatacctttatgtagaaaaaatttccgttctgttgaagttgacatggctgtaccagttgaaggtgcatgtgaaagtcagctgtatcggttgcagagaataatcgctactcggttgtctccatcaagttgagcatgcaaggtctggatcccacatgcaatcttagtgctagtcaaaattcacactttctacatagaattgtggaataagataataaccaaattgtgtcgatggatattccagttccaataaattaggctacaaactacctgtacctggttatacattttttgtgttgcatactgttacatattaagaatatgcagtccgggtttatcactggactaactttggtcaaggagcatcaaggtgtgatgcatcacccagttgctcactcaacaactgtctcaagtcccactgtccctttgaaactcttgtttccgaccatgcaattagatgccttggcccattgcttctcaaggcctcaaccacatactaagtgctatacaacttggtccctaccatgttaacccagccaggacgtctgaaataattgtcctaactggcgcggggaaaacctcacctatatcaggcacatgtatgtcccactttcccatgcctatttaccagcgggtgcacaaatacaatgtagattgatgaggtacctatgatgtgtatgattaaaatcatgtgtatgtgtgaagtgtagaactgtaaattaggcaactaatttccacagccagttcacgtgtccatgacactccatctgtcttgttccctgtcttcaatgaacaaactgcttattgtggtcctccttgctgtagtaccttccatcacctcacttgtgtgcctgaagggtgagtttctggcgcaggaggccaagcattctgccagacgcccgaggagccattccatctacttcactctgattttgtctaaacttttttattgtgctgtaaattaattactatcgcttgctaccgtaagtgaaaaaaaattctggttatgatcttttgagcgtctaactcatatatatgttctgattatttactgacaatgaattcgcagatagaaagacttgccagaactgattctgactttgctccatttctacatcatgctgggatcccctgtatggatttatactatggaaaaggtattttaagcatgcaatcacgtctttctgtttattattgttaaattaacttataactttccttttccttctccaatatagcatgtaatatacggagaaaaagacttgctttttttgctcaaaaaataaactgtttttttctcaaaagagagaacagtatatgttttctaagcagaggacattaatgcaaccccattttttaggatcgttactgcttgctcattttttaaaatattttgttgagctatgtgatttaattttgtacatctctcaatcgtttcctggttccaagataaagttagaagagacaaaatatttccccatcaccccactttctagagagaatgcaggacatcatctaactggtctaatacgcagaatttcctggatatcatacggctcttgactcgtatcattggatggaaaagcatggtgatccactgtttcttcgtcacgtggctagtaagtagcagtaatgatcttttaaaatgattctgaaagggagaaaatgtgcaataccttacaaactacaattttgcttgttcaaattactgttaacttgaatgcactggtacaagaccagtcaattattataaaaattctatggactatcccatatagaactagacataaggtcgcagctgagtttggtatttttgtgctttaaaatatgttgtacacatctcttataatactcatcatgctcatttactttggctcaacagttgtggagatttggggactactggcccttcgattagcagatgaccctgtgctgccttttgattatcaaacatacgcttcccagttgcaggtacatcgattctttcagaattagcacaagcatttaacattttcatatgattggcatttatcatcctgaaggactgtacgtgtatgtttatgtagcatattcaatttttgcttatgcaatgggagcttgacccaaaaacagggttttgctcaaaacaacattgtaattgacaattttgaatgcacatatgctcaatctagttgaactgaactttagaacacaaatataagtcacgcatgatgaccaacttcatgggttcatagatcatattagagtaggggtatatttccttttcccacagcatcatggtctcatcttctgatgtacattttgaacttgcaatgtcgcaggagcatgcaaatgcattctctagtatgatggaaaatagcaaatgggttcatttgctgaatagatccattgaagatctttctgatgcaggcttagaatttctgaaagaggcaaaggtatgttcaagaatctttttttcttttgctttatattctgttttgtctttctgtttccatgtaattaggtagtctgtagtccattatagttgcggttggctgaagatattttcttctttagctctttcactctgcacactgcatatcacttctgtatgtacaaccagtttgaaacggcagtatgtatatttggatatccaattttatttagacatttgccttttgcagttttgctgcacatacaggcaataactttaatttcttagaacttagtaatccttttggtgcctgacatcacattattgatgctttctcttaaaaattattatatcagtacagttatttttccattcccatgatggatgccatttattttgccacttggatctcatgttttaaatattttgtaccaatctatattgccgatgataaccttattttcttttgttgatttggaacattctagaaattacaggaccaaaatatatccgatgggtactctctgatgaggcggcgattgttgaacgaccgtcttctacttgctgaaagaagctttctgcaagctgatggacttcagggaagaggatggttcaagcatctggtgagccttaagtgggtcagccatgaacccacttataggtcaaaataagcaggtctgcggcttattttggcctataagtgggtttcgcgggttagccacttacactcttaagcctcccgctattcataagtcataagtcataaccaaatttagaaaaaaaaaatgttgtgcgtgaccacgcttttatatttcttgctagatgtactcgcctccggaggactacgaaagcaagctctcgtttttccctggggtggcggacgccatctcccggtcgagcaatcgaagcgcgaaagaacagcaggcggcggtgcggcatgaggtgcggaaaatctctagggcaatccaaagagcagctgatgttcttagaggcgaattcagtaataggaacgaatctttatactctagcctttctgtggctccataaaaactgtgtataaataaaatcgattggggtttgagaaatgaaatcttgttcctgtgcgaaggtggttttatattgcgtttcttgacactactctttttagagggcattatgcttaattaaaacaagaagccaggattgcaatctgaacagcaacaacagaaattaggaagtctgatggaagtctaagctaagtttgaagaaactaggatcgcagctattatttgcaccggcaaaccaactattcctagcacctcaatttagtctttgttttttcataacagaaaagaaaaggagaccaatagcactttggaaaaccagtgcatgttaaaccgcccaccaactaccagggtttttaaaccgccgagcccggagttaaccgcgtagtaaggcaaaccctgccaaccacacctcaaaccccccttaaaaaaaacctagagctcatattagctagtactccctccatcctaaaatatttgacgccgttgactttttaaaaaatgtttgatcgttcgtcttattaaaaaattaattaattattaattcttttcctatcatttgatttattgttaaatatacttttatgtatacatatagttttacatatttcacaaaagtttttgaataagacaaacggtcaaacatgtttaaaaaaatcaacggcgtcaaacatttagtgaaagagggagggagtactttactgtacaccacgttcatattgctgtgagctcaaattaaatggaataaatataataacgaaaatcctaccagctacccacaaacggtagccggcaggaacagcccaaacctgcctgaaatggaaccgcgaaaaaaacggaaacgtgggtagcgcgcgcgcgcgctcgcgctcgcgcatctgctcatgccgttgcttagtattctttctcgtgcaattattcaactaatcacaaataattatagcgttaattttttcccatgcaaaatactccaactagccgttgccacacttccatgtagagacgaatccaccgtctcctctcctctcgtacgcacatacatagagccggccatggatttgccaaatcccaatctccccatgcaaaatcttgccaagatccacgagatcctgaaccaaatctccatctcccctccgtgagatctcccggtagatcatgtcccccggtgaggaggacgtggaagccagcagcgacagcggcggctccgcgacaaggcgttgcgccgcgtgcaagttcctgcgcaggcggtgctcccgcgactgcgtcctcgcgccccacttcccggcttccgatccccacagatacgcctgcgttcagcgtgtcttcggcgccggcaacaccgccagaatgctccaggtgatcactgatcactactactagtagctagctataccacacatactaccacactcatatttctaaacggaaattacacgagctggtatgttttttcttttttttgagcgtggtatgttttttcactaaaataattttaccattattaataaaaaaaataccaatgtaaatctagcagtatttcgaggtatcaaaatttctcttttcactatcacttggtagtgtgcgtgcgttggtttacgtcttctatgcaattgaaaaaaaaacatatggggctatattggtgtcactagctcactcactgtacaccttattcagttagaagttggcacgtgatcgaagttgttacttgttagtgataaaattgttgatgtgtagtgtaattggggaaagtgaattcatccctcgagaggatatcccgtcgtttcacatatgtcacataaatagttattaaaaaatatgaaaaaaatttagtaacatagattaatgtgaaatatatcactccacaaacatacaagtttaaattcaacttttacaagttgtaacaaaaacaacaaatatagttgtaaatgtgcgataactattttcaatttaatttgttatttttgttgcaacttatagaaattgaatttggttttgcatatttgtggagtgatatattttatattaatctatattgtcaatttttttttaaattatttaataactatttagatgacatgcaaacatgtcctctcgagagatgaaaatccacgtcctaataattgggctgcaaattggaacagagctatactccatatgttaatttcgcagtgatgcgcgtctcaattctatcgttgtattgcgtgcagcaactgccggtgcaggagcgcgggcgggcggcggactctatggcggcggaggcgtaccggcgggtgcaggacccggtgtacggctgcgccggcgtcatcaaccgcctccaggaccagatccgcgccgcccagtgcgagctcgcttggacccacgcgcagatcgccatgcacagcgccgccgccgcccacgcgcgtacgacccttccgccggggcagcgagacggcggcggcggcggcgcaccgtcgacgcagcaggctacgacgtctgccgcgtggcagctggaagacttcgcatctgaattctcgtttccttgattggcttcacaacacgtcgactgatgagcgatgagacagaaatctgtaacatcttcatgtaataaaactgcatttcattctcagattcagagtggcctgaaatttggcgccgcggtggagaacgctgcacacgccatctcgtccgttggatgaaaaatcaacggctctaattaacctattttaacaaacggcacgtcaagcgcccgataatatctaggttcggtccgacccaacaacgaccgatcccatctaaaaaagaatggcattatttttcctttttatcggcattttggaaaaaaataaactccctttcatttggatagccatgagacaagatagaacattaccatcaatatgattttatttttccaaaaaaaaaaaacacttttcttctgtacatatataccacatcaacacaaatccaggcacagattattgttggtgtttatacaaagctacgccaaagaacccactatctctaggctttggcagcaaagctctcgagatctctctccacgacgtcgaggccgcagagctccttgacgatcggcatcgtcgccggcacgtccatctggaacgtcagcgacgagccgccggcgccggcgaactccttcctggccgccctgatcgcctccctcatcgcgcagtgcaccgacgacgccagcagcagcggcggctcaccggacgctgccacgatggatcacaaaacagtttcagatttcgatttccttcacgatttcagtgctcaaaggaagaagacgatgatttcacctttggaggagaggacgcgcttgtgatcgcgggcgctgttgatgagctcgacgttgaactgcttggggatggtgtccacggtggggatcttgtacgtccacgtgccgtcgttgatgaccagcccatcggagttggtcgtgtactcctcgttcgtgaagaagccgatcccttgcacgaatgcgccttccacctgatcacaaaaaacaacgattgcacattcagatcacatataatttacatctcattcttgcaatgattttgcaacgcgcagaattgcagatgc

SEQ ID NO: 29520 - DNA, 15890 bp, Oryza sativa
ttttttttttagcgctcgaagctattttcgcagtcggacgtgttgcccgcctgcgaaaatcaactattttcacaggtgttgaggtgcaggcggatggcttgtccgcctgcgaaaatatgatttggccgcttgcgaaaagcctttttctagtagcgaggataccgtggcaacaagataaattatgagttaatcgttattttccatgatttagatatgttctgagcggatgtgacgacgggccagacatgatgtgaggaggctgagcgtgactaagctggtcagaggctagagtagcacatacgcttagggcctgtttagttcgcgaaaagaaaattttgggtgttatatcggacgcttgatcggatgtggaaagaggtttttggacacgaatgaaaaaactaatttcatgactcgcctggaaaccgtgaaacgaatcttttgagcctaattaattcgtcattagtacatgtgggttattgtagcacttatggctaatcatggactaattaggctcaaaagattcatctcgtgatttcccctctaactgtgcaattagtttttttaatttatctatatttaatactccatgtatccaaatattcgatatgatgtttttaaaaataaaaatgggaactaaacaaggcattacttaccttcgggtctctgtatgctatcgtactagttagttcaactgtatactaaacttttctgctaaagtattattattttttttccagtatgtcttaaatgtctttttatgctctagagttaagtcctctttcttttttcttttttttatgcccgctatatctcgcttcagtccgacccaacaccgaccgatcccatctaaaaaagaatggcattttttttgttccttttcatttggatagcatgactccatgagacatgatagaacaataccatccatatgattttatttttcccaaaaaaacaccttttgttctgtacatatataccacatcaacacaaatccaggcgcagattattgttggtgtttatacaaagctaagccaaagaacccttctatctctaggctttggcagcaaagctctcgagatatctctccacgacgtcaaggccgcagagctccttgacgatcggcatcgtcgccggcacgtccatctggaacgtcagcggcgagcctccggcgccggcgaactccttcctggccgccctgatcgcctccctcatcgcgcagtgcaccgacgacgccagcagcagcggcggctcaccggacgctgcatgccatgaaggacagcaacaatatcagaattcagatttgagaaaaaaaaaaggagcaaacgaagaagagattttcacctttggaggagaggacgcgcttgtgatcgcgggcgctgttgatgagctcgacgttgaactgcttggggatggtgtccacggtggggatcttgtacgtccacgtgccgtcgttgatgaccagcccatcggagttggtcgtgtactcctcgttcgtgaagaagccgatcccttgcacgaatgcgccttccacctgatcacaaaaaacaacgattgcacattcagatcacatataatttacatctcattcttgcaatgattttgcaacgcgcagaattgcagatgcaactgatattttgaaggtaatttagtagattgactgacctggcccaagtccacagcaggattcaggctctgcccacagtcgtacacgaggtcgctcctcaggatggtggtttctcccgtcagcacatcgacttccacctggagtgttcatgtgcagattttggatggacaatgcattagctttgagaaggagatcaagctcagcaaattggctcggcaaatgcattttcagagcttctgttgtaatttgtatctgggtatctttagtgtgtacctcactaattgcagctccatagttcaagtagctagtgaacgtggggtcaggcgtccagtacgcgtgctctgtcagcttcacactcgccatgcttgcctgaaagcgagaacgagcaaatgccatcacaaatttgtaaatttacaacgctgtcagacacaatgatctttcagaaaacaagatttccttactgatgcttgcagtttactgaaaaagttattactccctccgtttcacaatataagtcatattagcatttcccacattcatattgatgttaatgaatttagacaaatatatctatctagatttattaatattaatatgaatatggacaatgttaaaatgacttacattgtgaaacggaggaagtagtttttttaaggacgagaaaactcaaacaagaatttacctgggcaataagggatttccatggtggcgtgccagccttctctttgatgggcttcaacctctccacgagggcggcgcacgacttccgaacagcctcgcagctagtctcggaggtcgtgctcccaccggtgaagcctccctggatcatgctcagggtgtcggcctggatgacacggaccttgtcgatgaggccctcgccgccatcatcgcagagctggcccagcgcgaacgctgtcatctgcttcactttcgtccacagcccctgcccgatctcgacgccgccgacctcaacggcgatggagccgtcgttcatgatggacaccttccccggagttggccggagcctcacgtcgtaggtgatcggcacgcaagaaatgccccgcttcttccacctgttgccggcgttgaagtgctcgaccatggcggccctctgctggtactccggcgacgaggccagcttgtcgaagatggtgacgagactgtacgtcgaaggatcaccggcgctattcccataaaacaccttgaggctctcgaagtcatggaggttcttcctcctgatggcgttcgtgtccactgagagagtggacgcgatgtgttcgacgatggcctcggcgatgaacgagccctgcgcgtcgccgggagcccgcatcgccgacttcgacgagacgttcgtcttgcagaccttgatgtcgaaggagagagccccccagttgtacttcttcagagccccgacaatggcgactggcaacaccgggctgcaatccggcgatattccgcagttcattccaagatcaacgtgcagacccgtgatcttgccgtcggacttgaaaccgacggagtactttaccttcatcggatgccgccctcccgccatgatcatgtctgtcttgcgatcgaggtacattcgaaccggacgccgcagcttgaatgcggcgacagcacatgcagcggcaacctgtcaagcaacaggtacttctggtcatatcaagatcattctgcattccaaacagtttgtaatttcaagctaatgacgttatcaaacagagatttaaaccgtccatggttggttcacattctaaaatagcctacaacaatgaaatatgtattaagttctcacaatatttttagttatgaaatactattgtactactattataattgttaaacaaaagcatatgcattgtagtacgaataactacagagttagacgagaaattccaccagttcaagaatataattgttctgcaaatgcaaatcatcatagtcagatgctcacatgtattgctttcattgcctttccaccaaaacctcctccaactcttctcgtgatgatacggacattgtgatatggaatgccaaggcacctcgcaacagtattttgagtaatctcaggtagttgcgccgacacatagagggttatacagttatcttcatcagggatagctaaggccgtctgtgtctccatgtagaaatagtactgggattcaagtttcacctgtaacaaaaaaatagaaatcgggtgtaagtatctctcgtaaagttgtcaggaactctgactataataatcttctacgatcttggttactcctttctttcttagcacctgctgttcaatagataatgcgcatcaaaattgttctactactaaactaattcctccgtttcacaatgtaagtcattctagcatttcccacatccatattgatggtaatgaatctagacatatatatctatctagattcattagcattaatatgaatatggaaaatactagaatgacttacattgtgaaacggagggagtacctaattaagtcatgagttcaggagactataacttctgtatctattatattcaaagtgtttaagtacatacctccccatctatgatcttgtgatcagcttcagacatagcttggttgaagtcaccaattggcgtaggagctaaaaatgggggaactgggaagtagctgttatgctggacagcatcttctattgtcagaattggtggctgaagattttcggtactatattcgatcacagcttgcttcgccgccatataggcatacttttgtgtttcagcaatctgaatgatagcaaggcaatatgacatggtaagctcgaatttattcacaaaatttctaaatattcagacatattactagttatgcctcatctgaaagaaagttcaggtggtttagatgtaagtaccacaacaccaatattctggccggcaaattcagaaacaggatgaacgaaaagcgcttcatctccaagcattgggaagcatgatccaatattttctccaccggtaggaatgtcctttgcagtgataactgtgatgaccttctgtgaagccaaagatgatctgaagtttatatcttttatgtgagcgtgagggtgtgtgctatagataaatgctccatagaggcaatccttcggagcagggatgtcatcaacatacactgcctctcctgcatatcaagttcagatgttcaggctatgaaaatccaagcctctaagatgctctaacatgggtagcacgaatttagattgtagtattcgaaatagtaattaaaagtaaaacatgtgagtttggattgataataggaatttatgatgagagagtatgtaccagaagcttggagctctgctccggttttctcgatcggctttccaacaggtttgtattcatcagagaaaaccatctcttgccttgattttattggcaaatcagagctgtcaacatttgagtgcttctccggagaggaattagcgctaccgtttgcggttccattagtacatgaaccattgggaacattagcattttcaggctcatccaagccattagcaagggaagtcaggaatctgaacagataactgacggccaagctgactctgtattcaggatgtgttgtgccttcagctggtgaaacaacacctttaagaagacgaactgcttcaagtatcactggtgcactaaccaattttcccttcaagaactcctcaacctccctagctctgatggcgtgcttggccccaaaggcgccaaatgccaagcaaacatcctcaatgagatggctccctgatgatccatccactgaacttcttgccaagaatgcagaattaacatatgacacagcattgccaagtggacgaggagccgcacgaaacgactgaaaggtgatgccatcatctgaaccccaatccgggatagagatgctgaccagcaatgtcctggaatcacatggaggctgcttcaagaactcctccagagtgatgcacatcctcttggcggccacctggatggtgacagttgatcctgcagcgagaagaaccgttgcgatgtccgacgggaaagacaacctctgcgccatgatgatgttgcctccaatggtcgccgtgttctggacgaacgacgaggccactttgctcaggtgatcggcaatctttctgaacactgcgcctccatccgacaatatctcaatggctttggagatagacacgacagctccgatctcgacgcccttgctgcttctattgatggctgagagttccagaatctgcgagatgttgatgtacttgtcatggaggtcttgatccttgtacactccggagccggtgttcgatgccacaatcttcacagacctttcgtcgaacaggttagagtcaaacaacctgtggaactcctcgacgctcttggggtggaaccagccgtctccggtgaccgccaccgccggagcgccaccattcgcttgacccatggatgaccttatctccgacttgaggaactccgggaacgtacagacggcggcgccaccagagtatgcaggcagcttgccgacgtcagcgcgctcgtcgtcggcgcctttcttccagaaggcgttgaggccaaggtcctcgaggtcgacgtcggcggcgaagctcttgcacgcgtcgacgatgggcctgtagccggtgcagcggcacaggttgccggagacggccttctcggcctcagcggcggtgagcttggagaaccccggcggcggcgagggacgggacgagcacctgtcggccttggcgagcgcggagtagatggacatgcacatgcccggggtgcagaagccgcactgcgaggcgtggaagccggagagccgccgctgcacggcgtggaagccatccctggagttgccgatgccctcgctggtggtgaccgcgcagtggtgcaggctgccgagcagcgtcaggcaggagctcgccgagaactcggtcacctcgtcggcgacggcgtcgtacttggaaacgacgaccacgcatgcgccgcatccacctgaaaaaaaaaatgatatcctcagtaagttattcgtactgtctaattgataattaccatcactgttacttagtacagtagaaatccttaggtctactgattgcaactgcttgtattgcgcactgttgctgatgcagaaacatcatctgattactgatgaactgtcatgtcagtcactgatgaggtgtctgttaacttttgtgaattcaaagaaaatcattttctcattatctcaggaaaagcattgtggaaaacggaccactcagctttatggattaaatttaaggagaaaagctggaagtatccagaattgagaactgttatagtagttgcatatatacttgctacctgatagtgatacctatagaaaaaggacaaaagaaaaacaaaaaaaaaaaacaatttgcaggcggaaagctggatgattcgttttagaattgagatggcgctgtcgctagctacttcgctccaacaactgcaaataacacgataatccagtaagctactgggcaccttcttcttggtttgttctaattaatttattgctacactattctgcgcgatatgtacttacgtacagttaatttcctcttcctggaggacatgttttgtagtactccactagttttctcatgctgtgaaatactgtacatcagcacaatactagtgtactccagcgatcaggtgagctaaatggtgctaaaaaaaacagtactaattctgtggccacatccggaaaacaccaaataaaacagtaatagtactacttaactatacatggagattttacctggcgagaaaaactacacgcagactcaatcacttgaccgtcaaaacagactagaaactggacagactaagaaaggaatgaacaaatggaatggatttgaccagtatagctcaagattcccacgagaaaggagaagaagatcgagaagggagagagatggcagcgccgacatgcatggtggtggtagctctcaccttcgccgcagccgagcttggggccccggacgggggtccgcgtgcggaggaactcgagcagcgtcgtcgacgggtcgacccccaccgcctcgtacctctccccgttcaccgtcaccaccaccggcctcgccgccgccgcctctgaccccatctcgatcgatcgatcgacctcttcctcctcgtgtgacgagacggcgagagacgacgggagctattgccccccacaaacttgggctttggttgctctcgccgcttttgggttttgtttatactcggcgtcaacaggagtggccgcctagtggagtactcctccactggagtgggggcgcagcatgcgcgtgcgtgcgtactcgctgacgccgctgtacttattattagcgtttggttaatacactactaagtcaaactttaccacggttaactacggcatcgttcgttcgggtagactggggagattgagtctcgttttccacgcgtacgctttttaaactactaaacagtacgttttttcaaaaaaaaattataggaaagttactttaaaaaaatcatattaatctatttttgaaatttaaaatagttaatactcaattaatcatgagctaatggctcacctcgttttgtgtatctttctaatctttttaatcctcttctcctcgaacacaccctacgtctatgtttttttaaactctactacgtctatacacgtctatattgttcccccgttttaggttataagaccattttaactttgattaaagtcaaactgtttaaattttaactaagtttatagaaaaaataataatatttataatactaaattagttttatcaaatcaataattgaatatattttcataataaatttgacttgagttaaaaacattactatttttctctacaaacttgatcaaagttaaagcaatttgtcaaaacatcttgtaacctgaaacggacggagtgtatactagtgttagataagttcgattaatttgaatagttattggttgaaactaaccacaattataacaaggtattgatctttcaatagtagatttgtagtttaaatcttacagaattttccatcaagggatatatttgttttgaatgaaataaaaaaagacaatatatcaaaaatcataaattaaaaaaacagttatatttaagtgcactgtaactgtaaattgggtcttcaggaacatgaatcttgatgtgcaagatcctatatatggatgaaaggtaaaaaagcaggagcccaaaaaatctattgtaagtgaaatagcaaaaccattacgacaatatagcctttttaacaagttagttttcacgcgtcaatgatttaaaaagtgtgctagtattttctttttcctgttaaggtatggctaataatttcattttaattaatatttttattaacaaatggtgaccatgtatggatgggaactaacagcccctatcccccaaagtccaacgcctgcgtgatgctaccgtactactacgggcctgtttggtaaagcttcaactcctaaatttagcttcaggagttgggtctggagtggagttgtggagctgccgaaacccatttccatctctctagttcattttgtgacagaattccacccagctccgctcccattttagatggagctgaaactgtttggctgaacaccaattgtagaagaggtggagctaggggtgggcattcggtctaaccgaaaagttcggttcggttcctcgatcttttggaaaatttggtcttccgaatcataagaccgaccggtgttcaagaaaactcaagaccgaacacttcggtcttcggttagttcggttcggttcggtcttggtcatagaccaaactaaccataacaacagtttaaacagcaaaaaaaattaatcacaaaaaaaatactccatacaagatcgatgaatcgaagcaactcggataaagaactacaatatgatgccactagagcatgattcagaaaaaagaagaagcaaatcaaaacaaatcgatcttgccatgacttggatcccgtcgatccacctgaagctctagatcccgttgatctcccatggtcgctttcatcctcgaccggcctcctcagccatctaggtctccggcgcagcagggtcatcggagggagcacgatttcttccgccatgacaggtgaaagggcggtgccgaggcggaggcgtcctggctggaggcggcgccgacacggtggaggttggaggcggagggtggaagcggtgcagtggaggcagaggccgagcggcggtgagcgcgaacgcgtggtggatggggaggaatgcagcgttgaggagggggtgaggggcgtgacgcgtgaggcaagcagtgagagatagggtaggattagggtttatgttactgggcttattgggcctcgtaggcatgtttggccacaattcgattatctcggttaatttggttaaccgagcccaatgaccgaaatacccgaaataaatttggtcttttgatggctgagaccaaactactaatcgaatttctcggcctcggtcttttcggttcgattcttcggttcggtctaattatgcccacctctaggtgaagctggagctgcgtcaaacagactctacatcacttgccctggtttagtttactctctccggtgactgctgcgtgttggtggcatgcagcgagcaatggccgcgtttattttagcaggggatgagcaatgtgggtggcatgcagagagcaagattggtgaggatgagacgcgagaggagcagcgacttctccggtgacgacgacaaccacgtgagggccgggctggccgcttgctagtcgccctaacatgtggtcgaggtgcgatattattgttactcctatactgtacggtctagcaccgatttattcgtcgtaatcaacagtcaacactcaacactatcagggtgctactaatgatttttccggaagtgtttacatatgtactcacgccgttccaaaatataagcatttttagcatagtgacaagtcaaacatttttaaatttgaccactaatagcaaaaaaaaatcaatcatgtaaattaatggtattagatttatcattaaacaaactatcataacatacaactctttttatttaaacaacttacttttatagatattgttggtcaaagtaacatctcagagactatatcagagtaaaaaatacttatattttgggacggagggagaatgttcctactatatcggttttacacttaactttactaatgcgttgtcgacagatttttcgtggccgtatcaataagattcttttactgttggatctgtgcttacgatgggatgtgggcttgggaaaagcagtttttattttactgttggatctgtgcggttgtgtgcatgggaaaaacagttggatatatgtgtgaaagtttcacagtgaaaccaaaatcgcatgcacagatagtggattgatcttgatcttgataccttataatcgaacaagcttgtttcttccactaaaagttacatgctctctccgtttcacaacgtaagtcattttagcatttttcatatttatagtgatattaatgaatttagacatatatatctatctagattcattaataccaatataaatatggaaaatgctaaaatgacttacatcgtgaaacagaggaaatacaccatagctaggttatgtagttattgcacacgacttatatatacttgaagttacatacgaaatacacttgagttacatttataattatatttaaattgtaatttaattataaaataattacataaagttacatttaaataattttagggataattttctatcaaaagttatatactccctctatcccatataagtatttttggaccctgacacggtttacgagatgctactttgatcaataatatttataaaagtaagatattttaaataaaaagagttgcatattatgatagtttatttaatgataaaactagtaacatcaattttacataattgatcttttctctattaatggttaaattaaaaatatttgatttgtcaccgtgctaaaaatgcttatattctaagatactcctatatgacttctatttatatatacatataaggacatcttgcacgacgtggctatacgtctacacatctccttatctccaagaaaccaatcccatgtcactatgcggcggtcatcgtcatcgatagctatggggaaacttttttaaacactcattggatttcacctgtttctcgtacgtcaactaattaaatagctatagaagttttttaaaaaataataaaataaattaatatataatatatcacttcacaaaagcatgatcgaattcaactttggaagtgttcggcaggccggctgcaacggctgtggctgcgcacggtgagttcgtgccgcagccgtagccccggcagccgaacataccatttacaagttataacaaaaataataaatttaactatgaatatatatatactagttaaagtttaatttataacttgtagaaggcaaatttaaatttacatatttgtaaagtgatatattatatattaatttacatgcttgtatatcttatacgtttgggaattggcttgtgggtgttaggaaaaagaatcaaaaaacttattcttgttgaagcttccgctgtatgttgggctctttggcttagtagaaatgacatggttttttataaaacaccatcaaaatcctatttgtaggtgcttttcagggcaacgtattggcttcggggatgagctcaattacaaaggcatgatgaagatatgaaactaataaatgataaatgtcgtaaactttgagacgacaattatgcatctatttgccaacttcggatggagattctctaatagaatttagtagttagggattgttttcttctattggtgtctattagtttgtgtttgcttagttttgtttctgctatcgtgaattttctgtgtgagttttgtaataattggatgtagctttttaagtaaataccaagatgttacatttcattattaaaaaaatattatatattaatttatcttattattttctttaaaaatatttataatcatttagtttgtatgtaagaaacggatagatattccccgagagaatactcccttcgtactcgtaaaggaagtcgtttaggacagcaacacggtctccaaaatataactttgaccttttgtttctataaaaatatttattaaaaagtgatatatgtatacttttaaaaagtatttttcaagacaaatctattcatataatttttatatttctcaaactcaacaatttgagagttattaataatttatatttctaaggtttgacttaaatattattttaaacgactttttttacgagtacggaggaatagaatcatatccctaactccctatctagggaggcacatgcatacggcggcgatcgagagcggtccaacgcccaccatatctgctccgccacccgccacgtctagctagccgccacacgtccagctcacgtatgagctgagtaaagcgtcgcgtcgcgtcgcgctcgccacggcacatgccccaggcccgatcatcgggcgcgcgcgacatggacggcgacgcgcgcgtcctcgttcgtgggagcaggaggaccgagcgaaaaagccaaggcaaagaagaaaaagaaagcgagcgccacaggaaagcaatccggagccgagcggtagctagcgtccggaagaagcgattcccatggtcctaactaaaccagctggtccgaaccgaaccagccctcagaaaatggtccctggagtttgaaaacctctgaccacaggtaaaattcggctaaatttcgtccaaaatgataaatttagtttgatttattttttgaacttagaccggttataagatcataataaaccatccggtaaacttatatagtctaactttacaaaaaccgagcagtttccatccgtgtaacacgtaccggtcctaatcatacataactttagtatctatagtaagagtaaggtcaataagggcatgcccaacgcaaaccatacccttgattgctatgtgggccaaagccacaaaaacgatctcatccccccaatggaagcaataccttcagatggaccattttcaaattaaagctgcacaacagattaattgaacaggagcttcatgctacacaacgcggtgccacagcctaaacctagcttcagagcggcgcctcgcgtgagggtgtgcagagcgatcagtgggttcgcacctcctcgcaggcgcgtggtcctcgccactttttggccccgcgtctgacgtgtgcgcctaggggtacgctccacgtactcgcgttgggcatgccctaagagagcctattgctagctcaaaaaaaaggccgtgtaatctatagtaagcagcgcagctaatatctacaatagaaatactttaacacacatattttattctgtttgtgggacccactatattctcctatctcatccctctttctccctcctacccctttccgttatgtattcttctcttcttttcttaaccgatgagggtaaacggtgatggctgtctgacggacgcaggtgacggcagtggctggggtggatgacgatggcagtccggtggacgcatgagatggcggcaacctggttggatgagggcggtcgggcgacaaaaaaggcacacaacggcggcccagcgtacgcgaacgatggtagcggcccgacaaacacgtgcgacatgggtgtccaccgcggatgagtgcaagggccgtggaggaaggcagcaacggcagcagccgctggagatgtggtcgacgccgcggcggacgagggcagtggccgtggaggatgtaggaggttgtggcccgacggacgaagggggtgaccatgagggaaggaggcgacgacagcggccgtgatggacaggggcggccatggcagcggcagcagacaagggcggccatgggaacggcggctgcggacgaggatggcgaactccagcgacgacaacaactagtcaaccacggcgagaaaggttacgggcttgtggtgatgagggtttgagcaaggtcgcgacatctgagtatgagtgggccccactatcttgggccacgtctagagccgagcgactaattagttgtccgttcattctgtctcatcccctctctcctccagctcattaaaaaacaatctgacgtggagtccttatcacacactattaattttactggatttttcacattttggtccttttaaaaaacttatttagcaaataaacccctgaaaaaacttatcctagaaataatcctttttggggcgccagagtggctggcgccgtccccctgtcgacgtggcggtgcgatgctgaggtggctagggggagcgcactagagtggctggcgcccccccacccccgaaattttttatttttgttttatttgtttgatatttttttcacgcttaaggacacacaagaacataccatagaaaaattgaactcaaatggacgtaatatgtgacctgtagaatttttcctctcctctcctctctctccgaactatgcataggagagagatgtgcaacttttttatttttattttatttttttgatatttttttcacacttaggaactcacaagaaccaaccatataaaaaataaactcaaacggacgaaatatgtggcttgtggaatttttcaaagctctaccgaaaaacttctctcctcgaaaacacaatcttgcaagcggaatttggaggttttaatatcgccgaacccagcaaagcgggggaaaattggatgtaactttttctgtaaatgtccgtggatatattattttcctgatttcgagtccgtatgagaaagttacgcctattttaataaatgacacccgaatgatttttcgatagagctttggaaaattctacaagtcacatattttgtctgtttgagtttattttttctatggttggttcttgtattctcctaagtgtgaaaataaaatatcaaaaaaataaaaataaaaaaaactgcatctctgtgtactgtttaacttatggctatcatttcatgtggttatattttgaattagagattaagtaatttcatatagtggtagagtgcattatgtttaacatgttgatcaaagggttttactaaagagttatggtctaattttgatgaaggtgcaaagtaggctaagtggtatgccatatttcgttcgagtttaaatttttttaaagtggctggttgtatcgtgatcctaagtgcgaaa

SEQ ID NO: 29521 - DNA, 3431 bp, Oryza sativa
cattcgatgtgatagagacttaaaagttttagtcacatctaaataggacgttagaagtttatgtgcaccgaaaaattttgatgtgatgaaaaagatagaagtttgaaaaaatattttgaaactaaacacggtggtaatctccaaatgatttttcactgccatgactggatcacactttacgatgccagcagagtgttgacgagaatgctccttgatgtcctggatgacgcacctccacgaagaccaagatgtatttaggaccagcagatttgacttgcggctttgttcgttgctacctgagtcgcctccttaattaagatggcgtgggggcttacccaaaaacggatcgcagaaaagtaccctatagtttgtttcattttcatacttatggattatcaagaaattttatatccaaatcccatatgtcatgtctaatatgtggccatcaatttattagcgatatactccgtatttggctaggttgggtaagcatgtgtgagtgtgtgaggtgattggccatccaaacaggctcaactctccaagtctgaggtgattggtgatcgataattcaactgggcgtaactcgtgacagttactactgtactatatttttgctatcttaattacaccaattgaagtgccgccagctagattaaggagacttcttggttcttaccactttattaaaaagctaacaatttagagagccatagtagtatttaacagtgctttatggcagtaattgatgccaatctaattagagtaagtttaatagcacagccaactactggctctaaatcatctatagctaatctaataatccattcatacaataattaactataaaaatatactacacaattaatacccgatcccacatctcatacacacgtaacgtcttatagtacgtgttacagttaggtataaatttgtagcccgctttttttctctcttctattttcttatcgatacgtggttatagttggtttatataatgctattgtactgcaattgtacctgctgttaggatgagttgtcgagtttttcaaagcaatcatgtttaaagtgaaagcaatcgtgttattcgtttctggaagcacgatggcgttgcaggatcgaatttgactttggagcccgggaccgatcgagagagttgatgaaccagaataccttgccagttgctgcccgaatagagacaagttggaccaacgacccatcccgatcagattgtcaagctcgatatctttgtctaattggattgatttccattatcgaagagaaacaaatttaaaggctttgtctaattgatataagtacatccgacctgagtaactttattatattatattgatgatattgaccccagcaatagccaatcatgtaagttctgaaaatctagctagctcgtttgaattggagtagatcacagtgcaaacaataaaatatgtttgctagttatttctaccgataactacgacaagataaaatatatttttttcgtgaacgctacgacaagataaaatacatggacacgaaaccctcaacgttgggctgtttcttcaaatgagataagattgctggcccatacacgtggtggatgaatatggaccggcaaatcttatttcaactggtagcagcagaaaaggcctattactgtggatgagtcatcaggcaaaggtagtaacattaccatgcataatcgcatatgattttcatacatatactggttttttttcaaaaagaaaaatacttttcttcttcatgcatcaacaaacgagccagcagtccctaaagtttctctgtaggattagtttagtccctaaccttttaaatggtccaaaaaaatccttaacatttgtcataagacctagaatagtccttgggtccactaaaatcatcatatggatatgttatgtcatcattcatgcaaaatctatgatgaattgtccaatttacctttacgtatatcatagaaaaataaatataagggtgaattagacataaccatatgaaaaaatatacttcttttttcacccttttaaggtatatttttgctcttatatataccatatatattttttaaatttttccttttgttttttattttctatcatatagattttgcataggaaggtgacatggcatgtctatgtgacgattttagtggaaccagagactatattagcccacatgacaaatttaaaggacttgtttggataatatgaaagattaaggactaaaataacccaggagcgaaactttagagaccatattagctattctcccttaatgttgcaagcgaagccaatgaaccatcatcatctatctctaggctttggcagtaaagctctcgagatacctctcgacgacgtcgaggccgcagagctccttgacggccggcatcgtcgccggcacgtccatctggaaagtcatcgccgagccgccggcgccggcgaactccttcctggccgccctgattgatcgcctccctcatcgcgcagtgcaccgacgacgccagcagcggcggcggcttcaccggacgctgccaagatggatcgcaaaacagtttcagatttcgagttcctttacgatttcattgctcatgcgtttgagaaaaaggatcaaaggaagaagacgatgatttcacctttggaggagaggacgcgcttgtgaacgcgggcgctgttgatgagctcgacgttgaactgcttggggatggtgtccacggtggggatcttgtacgtccacgtgctgtcgtggatgaccagcccatcggagttggtcgcgtactcctcgttcgtgaagaagccgatcccttgcacgaatgcgccttccacctaaccaagatcaacaacattcagtttatacatatttagtattacctgtccaacaaaaaaatatttagtatttacattcacttttgcaatgatatgcaatattgggaaaaatcccctcatttttgtatgccatttaaattatcatcaaaaagtttaaaataaattaacataatatatcattattaggtatgtcattccataaagatgcaaagtttcaaatggacttacacaaatagaaacaaaaataacatattcgactacgaatattgaatttgaacatgcattttttgtgaaataatacatcacatatggttcaatcttgtcaattatctatctattatattattaagacagctttgagaggagacactacgttcgctgtgggggctagaaattcccatgttaatcaaagaaaaaaaaatctacaccattagattgtgatgggtccaaattatgacgattgagatttaatacaaatctatataaaagttttgatttggaaccctttacaattcaaaatatgatacaagcacgtgttcgtgttggcaggaaacagtcatggtacattagttttcctttcctaattaactaaag

SEQ ID NO: 29522 - DNA, 8732 bp, Oryza sativa
caaaaaaatatttagtatttacattcactttgccaaatatatgcaatattgggaaaaatcccctcatttttgtatgccatttaaattatcatcaaaaagtttaaaataaattaacataatatatcattattaggtatgtcatcccataaagatgcaaagtttcaaatggacttacacaaatagaaacaaaaataacatattcgactacgaatattgaatttgaacatgcattttttgtgaaataatacatcacatatggttcaatcttgtcaattatctatctattatattattaagacagctttgagaggagacactacgttcgctgtgggggctagaaattcccatgttaatcaaagaaaaaaaaatctacaccattagattgtgatgggtccaaattatgacgattgagatttaatacaaatctatataaaagttttgatttggaaccctttacaattcaaaatatgatacaagcacgtgttcgtgttggcaggaaacagtcatggtacattagttttcctttcctaattaactaaagcatgaaaaggaacaacaatatataggaaaaagaacaacaataggtaggcaaaattttgaatagttccgattcccatcgtgacttgactcccatggttatgtccgattcccagtttcccattgttactgtgtatgacccaacaaaatactaggcaacaataaaataatcaccccttctagcattgcaatcggtaaaacagaatgggcttgactgtaggaaaatattatatgtaggctcagcatttttttgtaggatataggctgaattcgtcctaatcacctagcttcaagatgaacatcgatcaaaatgagcggcccacaaccagcgtgccgccaccacatcagtaccgatattatacaaagaaatcctccacaaaactcagctaaaatataaccaaatttaagagcatcgaagatacagagaatattgaaaaaatatgtcacttccaatacatattaaaattatggacttaagacttaaattttaggcccatacaccgaattgagtgcatttgaaataaaaaataaaataaattccgataattgaaaataattataagagttcgagtagaaacaaaatatataaataactaaaatataagaatgaagtatatggattttttttaaaaaaatagttcatctacaacacaacggtgacaaatgagaataaaaagggaagagacaacaagcccaatgaaccccaaatagaatcccaatgatgattagaggagggacgacaagcgtgccattaagcagcatggtgacacggtcatggtggttggcgggacttttagaaatttaaaaaataaattccaatgataattttgtacggttttaaaaatcccaattccaataaagaggggaggcagcgggtggggtgtaaaggagtacagtgatgccgtttgacgggacttttggaaattataaaaacgaaacccaacgagacaattaactctaaaaaatataagatccagattttaaaagttctcaggaggataaatagaagccatggtaaatctatatggagtaacgattgatatgacttttaaaaactataaaattataaacccatggatgataaaggtcggcctttcaaaaccctaaaacaacgagaaaactacttaacaaattttaagtaaaatcatgtatagaaaaaattttatatggatgctagccgtgcaattatgtgggtcaccacgttcgctgtggggctagaaattcccacattaatcagagaaaaagaaaaaaagagtccaactagaaatacagtttaaaaataactgtaatttggaaataaaaataggcaagagtccttataagaacccaatacgagattaattaatattcggtataaaaaataaaaaaatctgaaattagcaaaaaaggaaaagaagagttcgactagaaatacaatttaaaaattactaaaattcggaattaaaattaagcaatattgaaagaacggtccatataaaaacccaatacgagattgttaaaattcggaataaaaaaaataaaaaacacgaaagtagaaaaagaaaagaaaagaaaagttcaagttggaatacaatttaaaattaaccaaaattcggaattaaatataagcaatattgaaataagagtacacataagaacccaattcaaaattaattaaaattcgaaataaaaataaaataaaatccgaaattagacaaattaaaaaaatttcaagtaggaatacaattttgaaacaactaaaattgaaaataaaaaataataatattaaaagaacacaatacgatattaattaaaattcaaaacaaaaataaaataaattctgaaattagaaaaagaaaactaagatttcaacaaggaatacaatttataaataactaaaattggtgataaaatataaaactaccgaaagaaaagaccatctaaaacacatgatgagattaattaagtaacatgcctataaatgattagagtagtggtggttgataggaaatttaaaaactattaataaaacaccaaatagaatcctaatggcgattaaaaggagtgacgacgggcaggccgtgaagtaaccgggcaaggtggtcggcaggactttcataaagtaaaaacataaacctcgatgataatcatattcgattttttaaaatctcagtgaatataaaaagaagaggcagccggcgggtcgtaaaggagtacagtgacagtgccgccgacagttggcgggacttctagaaagtaaataatgaattccaacgatagttatgttcgatttttagaaacccaatgaaaataaaaagtaggcagcggaagggctgtagagtagtatagtagcagcgtttgacgggatttctacaaattatatatatatataaaagaaacccaatgagacaataacctttaaaaactaccaggtccattttttaaaggttcaggacttctaatagtaaaaaaacccaatgataattatgttcgattttaaaatctcaatgacaataaactagggaggcgatgggccaacgtataggagtacagtggcaaagctgctaatggtttggcaggacttacagaaagtaaaaaatgaacccagaaagataattatatttgtttttaaaatcccaatgacaataaagagaagaggtagtggacgggccgtagaggagtataatggcagcgtttgacgcgacttctagaaattataaaaacgaaacccaataaactctaaaaactatacaatccaatttgtaaaggttctaaggaaaataaatagaaacagtggtagatcgagtaggcaaataaaaagaagaaaatgacataagtaagtggtagcaactggtgtgactgttaacaagaacttaagacaatgagatatctatttaataaattttaagtaaaatcatattaaaaaaatatataattttattatgggtgctagccgcgcaattgcgcgggccacccagctagttaataccatatccagtaaaaaacgataataaaacccgaatccctcaacgctggaccatttcttcaaatgaaaaaggaaaaagtatactttgactccctcaactatgacccgagtatgattcataacctccaaccacaaaaccaggtatatcgactcctccaactatcaaaactggtgcaaaccatatccatgagtggttttggaagcggttttagctgacgtggcgcctacgtgacagtgttgacccggtcttcgtcacacgtgtcgttaacgtgtcgcttacgtggcattttagagtaaaaacaaaagaacaaaaatacgtgggactgacatgtcatttacacagaaaaatagtgggacccaccgacatgtgggcgccacaagtcatctcgtgtgccgacaggacaagccaacggagacggaaggccagcgaaggccatcggtgccccggtggccaataagagatgacttattgcctcgaccgccagcgaaggccatcgatatacccggtttcgtggttggagaatataaatcatactcggccaatagttgagggagtcaaagtatactttttccaatgaaaaaatgattgccggcccaaagcccacgccaactggcagcagtaggcccatcaccttggaaaagccgggagatagatgggctgggcttcactcgatcaaccgaaaactactgtgattttcgtctcaaaaaacaaggaaaaaaacttggtggattcttgcatgaactcgtcaaaatcccaagccaagccaactccgtcgtcgcggcgtcgctcacatcgatggcaccgcaagccgcgcgtcttttctcaatcacaacctgagccagtgatgctatatatatgtagacatgaacacgatcgatcgaacagcgtggtttgttcactgattctcagtgaagcatcgatccccaagctgatccgttgcggccaatggcttctcgtaggatcacgctcgagttggcggccgtcgtggtcgtcgtcgccgccgccgtggccggttcactcccggcgacgaccgcgtcggcgacggcgtaccgggtcggcgacgactccggctgggacaacggcgtcgactacgacgcttgggctcacggcaagaggttcaaggtcggcgacacgctaggtaataatcaaattgagcatcagtttctcctaaatttctagctcaaataattcaggcagacatatgtacgagctcatcaatggcgtgatcgatgtgagatgtagagttcttgtacgcggagggcgcgcacaacgtggtggtggtggaggacgaggggagcttcgaggcgtgcgtggcgccggcgaacgcgccgacgctgagctccggcgacgacacggtggcgctgaaccaggcagggcggtggctcttcatctgcagcttcgacggacactgccagtccggcatgaagctcgccgtcgccgtcacccactagctggtgttggtgtcatactctcagtcacgtcagaatggctagctcactctcaaataaaaagcaaccatgcatgaatgatgaatcaggctcgggaaacacttttaatcacctaggtggagatccacccatttattatatgtcaactaaatgggtatgaaaaaattcaaaaaatttgacaagatagattcatatgcaatatatcactccacaaacatgcaagttcaaattcgacttttacaagtctctactactttaaaaaataagaagtacttccatcgtccgtaaaaaaaccgtgcgaaaaaaccggacgaaaaaaagagtccgatccaaaaaaaaagagaaaaaaaccgggagaaaaaaaaagtagagtccgattccctacatccctataaaaaggaaaaaaaactttccgtacaaaaacaatccgattcctgtattgtactcccgtaaataaaaatcctgagtccgagatccgcacagctcctctccgtttcaatatataccatgataaaaatacatcttggtggaaaaaaaattcatgtgccgaattgaagatctgtttacgaaaacggaacctacaggacgagagcattccgtttttgtatgattttattttttgggtttgcacttgagtccctgtaattttttatttatatttgagtccctgtaatcttgcaataaggtatttgaggttatttttttattaaacaaaataaaaaaaggtgagaacaaaagaagaaaagtacataaaaagaaaaagaaaagccgcacctaaaaaaatctctactattataaaaaataaaaattgaagatgtttccttggtatgttattcgtatttgagtcggttttaattttatgttttagatttaacctatatatacctaataaataaataataaatcggtatccctatctctatcactgctcttctctatctttatctctatctctactacttaaaaaataagtgcttccatcgtccgtcaaaaaaaccgagcgaaaaaatcgggcgaaataaagaggcagatccaaaaaaaggagaaaaaaacgtcctatccgaaaaaacggagcgaaaaaaaacaaaaaaaacctggcgaaaaaaaccgagggaaaaaaaccgggcgaaaaaaagagtccgatcaaataacggagaaaaaaaccgggaggaaaaaaaggtccgatcaaacaaacggagcgaaaaaatggaaaaaaaacaaatttgtccgatccaaaaaatacgaggcaaaaaacagaaaaaaacgaaacgaatcggtaaaaaaagggcgaaaaaaatttaaaaaactgtccgattccaaataaaaagaaattatatgtgacacggtaaaaaaatcgaccagaccgaaaaaataaaaaaattccaatcaaaaaaaggggcggagaaaaaacaaacatgtacgatcaaaaaaagccaaaaaaaaaggaaaaaaatcgaaacgaatccgactccatcgactcggtaaaaaaaagggtgaaaaaaatatataaaaaaagtccgattcaaaataaaaagaaactatatgtgacgcggtaaaaaaaatggaatcctatttatatctagaaaggttcgacactataagaaagtggtgaaaaaaacctttcggtaaaaaaatgcactaaaaaataaaaagggcggaaaaagtctaatttatattcgtcgttttagtagtctgtttatatctcttctttatctctaatctaatctaatctaactatttaaatagagaagtttctaccgtatattaaaaaagaaataaatgcgtgagaaaataaaaacggtttaaaaaatgcgtgaggaaaaaatgtcagaaaaaagcataaaagaaaacgcgctagaaaaaagttccatagtccgtaaaaaaacacacgagaaaaaaatatttccatcgtctataaaaaagaaaaaagaagcatacgtggaaaaaaactattagaaaaaagcgctaaattgatagacacgtggtcggataggatccatcgacttttttccatctcctacacggcttttgtttcgtcatctattctcctgtattggagaccctgcacatcttcgtaggcaattatcatactatttttgtgaagtatagctactattcttgataatatattatatgaaataatcttagaaaataaacatattttaattgttatatagagaagagtggacagggactctattttgtgtagacttgaccatacgaggcaatgtaggatttgattggttgcaagaataagattaaaagaatattttagattatatgcatgttgtcatatgaataatccaattattttaggtaaagcaaacatcgtaaggttgccatcatcgaggttgggctattacatttaagatgttccaattttctgattgtcatcgacatggttatgcatgaaaaacgtatattatcgttacgtttttttcacccgttgcaacgcacgggcatgtttgctagttgtatcaaaaataacaaatcaaactctgattagtataggtatattcacaattaaatttgttatttttgttacaacttataaaagttgaattttaagttgcatgtttgtatagtgatatattatatatcaatctatcttgtaaattgttttaaaatttttttatgatcatttagttgacatgcacttaataagtggacatccgctcaagtgtttagaatccaccttcatcaggctcgtatagtcttgttcagtttcaggccttcatgaaaagttcagaaatgcgcagttcaagcagcatctagcagaatttatagagtgaaagagcataaaggcattggttgtaaccgctcaagtacgtactgtactttggtcatagatatttggcgttttgtactctcgttgactaaaaaagatatttggcgttttaattaataatccttggcagcgctcctttggaacaaaagaatgttgatttgagatttctacactactatggaatgactccattcaggggattttttgtggagttctaagattaggttagatctcatggaaaacaagcatctatccgaacaaacggtttcaataatttgccgcattttagaattcctaaggatttaactgtacatatcaccttaatttctacgttttttatgtctctatgtgttttttttcctacgttgcccatgagccaaagcccacaacaagatttttcacacaaatcagttcaatttcaacgaaaatcctttgaaattcaaaagttccaaacaaggcacactaccatgggacaatctacatacacagacaatctcaagatatattggctcagtctttcgaatatgctcataagggtaatgtgtgcatgtgtatttataagggtgagtacgtgcgcattatgagcacctggacgtctgcatttgtactatgttttaaaaaaagataagaacgacaaacttttattttcaaatctgagcaagaaaagatggtaggacaccccagatcatcagtattataagcagacaatgagacgaatagtggtagtttcgttaaccgaatgaaattaatcatcaacaacacgagaaataaaaacaacgaaatcgcatctaacatgcacgcacagtataacacaccaacgacacgaagaaaaaataacactacgaaaatgcactcactgatgactgacacgatcaaattaaagtgctcgactatgggtactagaaaatgttgaagctagagcgcgagcatggccgcggccgccgcggtcaccgccgccgccgccgccgcgtgcgcgacgcgcgcgcgcgcctt

SEQ ID NO: 29523 - DNA, 1312 bp, Oryza sativa
ggctgagactattaacactgcttgctatatttcaaattgagttttcttgagatcaaaacttggaaaaacttcttatgaacttcgatttggacatcaacccaaagtttcacatttgcgtgtttttggttgcaagtgctttgtcttgaaatctggaaatttagataagtttgaggcacgttctaccgatggattgtttcttggttaccccacacatactcgtggctatcgtgtacttattttggagactaacaaaatcgttgagacttgcgaagtttcttttgatgaggctagtccaggtactagacccgatattgcaggtacattgtcacaggatcagggggaggatggtcgtatttttgaagacgagagcgacaacaacgacgacgacgaggtcggctcggccggtcagatcaggcgctaggccggtcagactgccggcacacctccggtcagactggcacaggaggtgcggtcagacccgccagggttgtcggctgaaggttctggtgatgctgttcgagatggtcctccagaaactacaacttcgaccaatactgatacagaacgtggatcaacttcagaagtcgcggctcctttgcacattcaacgacgacatccgccggaacaaattattggtaatataggtgagcggactacaaggtctaaggtaacgactcatgatgtttgtgcaaattctatatttgtagcttcttttgaacccaaagatgtgtcacatgcattaaactgatgaatcgtggattaacgccatgtacgaagaacttgaaaattttgatagaaacaaagtttggactttagttgaaccaccttctggacataacattattggaaccaagtgggttttcaaaaataaacaaaatgaggatggtttgattgtgagaaataaagatagacttgttgctcaaggttttacttaagttgagggtttaaattttgatgaaacttttgctactgttgctagaattgaagcaattagagttttgttggcttttgctgcttcaaaaggttttaaattgtatcaaatggatgtgaaaagtgctttctaaatggttttatacaggaggaagtttatgtcaaacaaccacctggttttgaaaatcctgattttcccaatcatgtttttaaattgtctaaagttttgtatggcttgaaacaagctcctagagcatggtatgataggcttaagaactttttgcttgcgaaaggttttacaatcggaaaggttgacaaaacgctttttattcctaagcatggtgataatcaactgttcgttcagatttacgtggatgatatc

SEQ ID NO: 29524 - DNA, 7598 bp, Oryza sativa
atggagaattgcaagccaatttcaacaccaattggttctacagctgtgttgaatcctgatgaagatggtcaagctgttgataaaaaggaatatagaagtatgattagatctttgttgtacctaactgcttctaggtcagacatacaatttgctgtgtgtttgtgtgcacggtttcaagcttctcctcgtgcttcacatcgtcaagcggtcaaacgaataatgaggtatttgaatcatacacttgagtttggaatttggtattctacttcatcttctatatgcttaagtggatattccgatgctgattttggtggttgtagaattgataggaaaagtactagtggaacatgtcattttcttggtacatcattgattgcatggtcttctaggaaacaatctagtgtttgctcaatcaactgctgaatctgaatatgttgctgctgctagttgttgttcacagattctttggcttttatctactttgaaatatcatggtctaacttttgagaaagtacctctcttttgtgataatagtagtgctatcaatattgctaaaaatcctgttcaacactcacgcacaaagcacattgatattcgttttcactttttgagggatcatgttgagaagggagatgttgaattgccgtttttggacacaaagttgcaacttgctgatattttcactaaacctttggattctaatcgttttgcttttcttcgtggtgaattaggaacaattcatccttttggcatggtttgagggggagtttgtatcccatggttttatcaagcaataatatgacaatgagaaaaattgagaaaagagagctttgttatacatatggtattttcttgtgcatgctagcaatactatgaaggttgatttgtctctagcatagcctgtatgtattctagtcctttcatgagatttagattttgcttttaagggagatgatgcatgacacttaaattctctacttgaattaagcaaatatgcaatgttgatgctagcatgtggtttgatttctaaatgctttatatatatgctttattgaattgttatttctcaaatagctttaattgctcattgtgaaaaagagaataaaaatatgaaaaaaaatgaataccgaatccttggaaacagtcttgacgacaaggacgtattcaatgtgagcaaaataatgggtgccgaatccttggaaacagtcttgacgacagggacgtacccgtaataaaagagaacaatatgagcaaaaaggctcaagaaaagaaaaagttgaaaagattctcttggttattttgtgctaaaggttatttgagaaagagtgataaatgcaataggtatatgtgtttagtgtttattcttcaacctatgtgtttgctaagatgttgcattataaatcgtatgaaatcatgaattttgattgttgattcaagcttaattgtaaaatctttggttcatggttatactttaatgcatgcttgttatattatagatgggttcatcttctttttattgcaacacatgacatgatatgctatatgtatgctaagctcttgaacattaaagaacataattcctatgcttgatgaaatcattgtcaaaagggggagaagagatgagtttttgagaagcaaggtgtatttttagagcatgttttttggttaaattgggaatttctttcttttaaaaagggggagaagttttcttggttcaattgggaatttctttcttttaaagtttacttttggatttttgagcacgatgtgtacgtttgtatgaagtgtgctttttaccacttttgtttttatttttccaaacaccaaaacatttttgatgggtttgccaatgtgttcatcaagggggagattgtaaaatcaaatgtgtttttgattattattctgtgatgaacaattgggaattggagattattggttttgttatttggaatttattcacgaagtgagtttggagatgattggatttacaggtgaatcgcatgttcattatttcatgtgaccggtcagaccgggcagtgtgtgccggtcagaccggcgatgatcgagcggttggaccggccagcccgcggtctgatcggctgacgttgtatcggtttcgggttgttcgtttggatatccgtgattgtttcattattatggcttctagatggatactatacgtatgtaatactattgtttgctactaatgagacaaattggagataacttggtctcggaatatggtttctttgtttatttcatgtgtaggtgactcgatgcactagagggtttcctaaggtttttaggacttctagtatgagtttggttcgttactttaggctgcctacctcgggtataaatagagggggagcgtgaggcttccggtattgctttagagagcaattgagttgagttttgagttagggttttgagtttagtcgaatttttttgtaaggagtgctgttggtgcattttgtaaacacagagagaatcaataaagtcgttatccactttaagagttcttcgatttgtgtttaccgggttttggcggtgtaaccgacgatataccggcggcatacgggcgatcagaccggcggcggcaacagtaagcggcagctgatctcggcggtcagaccggagatctaatcgcggtcagaccgatagcaaccaggcggtcagaccggcagagcaacttcggtcagactgcgatctgtcgaattcgagggtaacttttatttccgctaaaagttttcggtttttgggtatatcaaccattcacccttctctggttggcttagtttttgtaattcgatcctacataatcaagaaaaaggaaaaagttcaacaagtaatataatttagaaataactgaaattcaaaattaaaaataagaaatattataagaatagtacatataaaacccaatatgagaataattaaaatttgaaaaagaaaagaaaataaatctaaatttagaaaataaaaatgatagttgacatacgaatacaatttagatttaactgaaatttaaaattaaaaataagaaataatgaaagaagagtctatatagaacttgtcaatgttctatatatggaatactctgtactctactctatagtatgtcaatgatagagtgctggttatacacttgccaataattttcacaggatttgttatttcaacaaaccaagtaatcgacagcataaacagcatcctagtgatacaatgcctattccagtatttgttttcaagcaagacgaaaggattagggatatttcttttatggtacaattgttaaaaagcgtgggctccacgtgctcttcatgtagctggcatgcgaaaatcacttacaggtatacatgcgaaaatagatttattttttaatgcgggtgagtaaagatgtccgtctgttaaaattgattttttttatatgagtcttttaagtagccgtatataaaaatacatatcgatttttcaggcatgatcattattgttcgcttacaaattataaggggtactcgtacagaaaaatcgtgaatggcatgcggtcaggaggggaagccgagcattactggtgcctctctggacgtctctgccgttcttgtgtgggcgcccggcaatgaggcgtgcagtaaattagccaggcgagtgtggcgaactgacgatgggtatggccctgcagcaagaatggcgggactgcacgagcgcagagagtcggttcgtggagattatcacttcgttcgataattagatgaatgaacatgggatcaataaacagaagggcaataccgttaagggataatttcgttactaccccaatattgattttaccattgttttataaggtttttgtttttagccccactttttccaattgaatgaggtgtttacctatttttgaccgaagggactggagccagattgaggtaaagtaatagggaaaataatttttcaaaatattgatttacttttgtgcccatagagaatttggtactactgtgaccgtctccctccactccacaaacttccgatatttttgtcggattatccgataggccgtttgccagataatccgaaattattaatatatgtaaccactctatctattgcatataacataagttggtacatccaatagcctaattcatcaattaacatagattttttagtctaaggcttttatcgtctcatgtcacactcacgtagctatatttttatattatggacatcatgtagctatatctatactagtataaaaaggggaaattatctccttgcaatcctacaagctaaatcaacatgttgatcctaccatcatctgcatcctcatccgtatcgctctcatccctaccgtccactacgattcaccctcgcacagcaactccatcctatctccaccgtgattttcgctcccatcaccacgcgaagacttctcccgtgctactcgctattaccgctctcgaaccccttcctgccacacccccgcgccgcggaatttccctgacctgccaccatcgccgtgtcctcctcctccccacccactgccgctgcatcgcctcctcctcatcgcctacgcgtcgtcctccttcgcactcacctctgctgcatcgcctcctccacacggcctccgcgttgtcctcctcctcacccaccgccgccgcgtcctcctcctccccatcacccgccattgcctcgctgatctcctctctcagcgccaccatcaatcccgcggcggtcaccgtccccgagtcccctttgccggctcaaccgtcgtcgtcagatccaccgacggggtgaactcggcaacggtggtccagtgctcgatccctaacgcatgtcgcgccgtcttgtccaccgccgctgcgtcctcctcctccccaacacccccgtgttgctgtgcctccctgacctgccaccgctaccgccgccgcgtccgcctccccatcacccacagcgtcgtccttcgcctcgccgataacctctctccgcgctgccatcaatcccgtgatggccaccgtcgctgccgtgcagccgtcgtcgtcagatcctcctccaccgccccaacgccggttgtgtcgtcctgcccgcaacacctgcgcaccctccgccgcttgatattcctgcgagttttattaagaaaaatactttttttcctgctgttgttacacttgctgtgtggagagaaaactttgtcagaagctaaatattgttgttaatgttcttggtcaatcttttttcaggcattacagtttgcaactgagctatggcagaaattgtgatggctccatgttatttgcaccaactgattaactgaactatgctatacacatgggagactttggttaaaggattagaaatcagagtaattggaaaaagatacatgtccaatgctaatgcaaaggcttgtagaaagattatgtagagtgtttacccgaaataatctctagacactacaacacgatcatgtactctgagagccttctagctacttcagactgtgacagtgcttacctctaaggtattgtttcccttgcactctgaattaacatgacaaattctataataaattatatgcagatatcaatttgatttacctccgtacatgctgcaatagaaaagtgcaggagctgaaatatttcttcgccaggtcaagcagaataggaacctaaacggtcaggtataaccctaaggttctttattatgtttcacccgtgagtggtcatgtggtggtttgtgtgcatctaactactgcatcgactaacagttcaacatgccctattgatccggtgctaatccccaagagctacttgattaagctcactacacaaaacaccgtggatatgacttcatttggtgaatattaatgtatatacattatgtttcgtgatatgtacatatagacatatcaagtaatggttttgttgtttatttgtagttttgttccatactccacaaaagtagaaaatcaatgattaagctcaattatgatttattcctagcagcttggtttatgtgacttgggactgctaaacagtacacagcatattttgtttatagtgctctagataatatggaggctctagacaatggtgtcttggagctccttttggttaaacaacatatccacacaaacaaggtacattatgcttgctctcaggaaaaaaaaaagggttcattttattcagtgattatgcttttcctctagaaatcattagctgtagtgttagattcacaatttcattcatttgcaagatattcaatggaatttctatgtgagtaaattgttgtgcatatgaaggtgcatttgacaaaggtcaaggggaattggcgaactaatcagtacgacaactgttggtcaactaattatactgtcttgtgtttagttttaacaattccattgtttcaggctacccaaacttcagacagaggcagaggagcaggaccacatgaactccttaatatagatgatcaacatgtctccatatctatccaggatgttggtcagaggagattttgttcttttatttaccattgattggcctctagttgatgtatctaatttcatatactccgtaagcacaacatgaaggtaatatccatacgtgcaagattatttcttacttttagtttttactattttataagataacagattttctaaggtgcttgggaggcattatatccgttgatggcttctaatctgacaatctgtaacaaaaggtagatataggaaggtattacaaatgtgggccaaggtattaagtaaaaattgggtggagggttatataggtaattttgtacctgatatcacattagaaggcaacggttgtttccaactaactgctgagataaactcggtaactacacttgaaattaggtaacggggaagaactagcaatactacaaattagcgacatcaaactttttgcaatcctgcatgcaactttgtaaataaaaacatagccatataactaagcttgatcctattcaagtaaggtcgtatactgtcaaaaataaaactaagcttgatcaaacaagaaccaagtaataatgcaatttagttattggaaattgtatgagtgccgtcataaatgaaatatacatatcaaggagccgattaccatctacgccatggagaaatcaaattgcaagaaatcaaattgcaaggagtgaaggttatcgaatgataatgattaccatataaaataattaattttctgtgtttacgttaatctctattccaaagttaccctttcagaaattaatggtagattttaagtagggaggaaggtacctcccatacctctcaagcaccgtaaaagcccccgtaagataattgttcactgagtcaagcaagggcaaagacctacatttgagcagtacctattagtcactggtggagaaaccatctttgctcggtcggccaaaacccacaatagtcccggttgtaataaaaatcgggattaaagattatctttagtcccagtttaaaagtttagagctgctttttgatctttagttaccaaccggcactaaagatctatttctagtccccgaaggtaacaccaaccggggaaaaagatgcctactatctttag

SEQ ID NO: 29525 - DNA, 626 bp, Oryza sativa
ttacttgttgaactttttcctttttcttgattatgtaggatcgaattacaaaaactaagccaaccagagaagggtgaatggttgatatacccaaaaaccgaaaacttttagcggaaataaaagttaccctcgaattcgacagatcgcagtctgaccgaagttgctctgccggtctgaccgcctggttgctatcggtctgaccgcgattagatctccggtctgaccgccgagatcagctgccgcttactgttgccgccgccggtctgatcgcccgtatgccgccggtatatcgtcggttacaccgccaaaacccggtaaacacaaatcgaagaactcttaaagtggataacgactttattgattctctctgtgtttacaaaatgcaccaacagcactccttacaaaaaaattcgactaaactcaaaaccctaactcaaaactcaactcaattgctctctaaagcaataccggaagcctcacgctccccctctatttatacccgaggtaggcagcctaaagtaacgaaccaaactcatactagaagtcctaaaaaccttaggaaaccctctagtgcatcgagtcacctacacatgaaataaacaagaaaccatttttcgagaccaagt

SEQ ID NO: 29526 - DNA, 9541 bp, Oryza sativa
ctgtcccggtgcatccgtcatcacagaaacaataggagcatgtgaagaagcaaccatcttagcatgacgacacggtgggcaaaccaaatcaagatctttcttaagtttcggcaaaccacgaacaagatccaaaccacttaacctagtgagatgatcaaaaccaacatgtccaagtctacgatgccaaacatcacatctttatcaaacttagcaaccaaacatgttatcacaggtgaaacagaattttcaaaatcagctttaaacactcttccatagcgagaaatattcaacacagaatcaccacaagaatcaaaaactttacttccagttttcttaaagtgaacctcaaaattttcatcaacaatttgtgaaaccgaaagcaaattgtactttaagtcctcaaccaaagctacattcttcaattcaaatttttcatttaccttaaccaaacctgtagcgagaatgacacttgtagaagcatcaccaaagataatcgattcagtcttggatgcctttttaagagaggagaaccaatttttatcaccggtcatgtgccgcgaacaaccggaatccacgatccacacgttctccttccttgccaccaaagcctcatgatcttcatattctatatccgattcaccacgcgccatgaagcaaacaccggagatgttctttcccttatcttcatctccagtctcaccacctacatcacttgatggttcaaatgcggcgtagacttgatcaaaagcattcctaagattctccttgaacttcctcccttgggatgtacccttttacttgttgttgttggtcttctcaccatctttgtcttctcttttgcctctcccaagcttaggacaatgcgaacgaagatgatcaattgaaccacattcaaagcaacgatttggaccacctcttttcctgttcctggcattattcatagctcgagcaattctattagcaaccaaagccaaatcctcctcctcaatctgttcgagttgatcatcggatgtggcattaaaaatagccagaaaagaagacttaaatgaagaggcatcaacattcatagaagaagatgatgaaaccaaagcactcgacttaaaatcaactttccgagaaagaacattcatctcatgtgttttcaattttgtgtacagtgaatccaaagtcaaagtagacatgttaacagactcctgaatagatgtaacttttatctcccaaatagacatgtcaagaccattcaaaaagtgacgagaaatctcagattgtggataattagcatcataagaagattcaacagatctaagatcactcaaaattttattaaacctagaaagatagtcacatctcaaatttaatgtactccttttttaaaatatcacgatgaagttctttaatgttatttgttccttaatgagagttactcaaagcattccaaatctcatgagcagttcgaaaatgcgcaacatgatcataatccgaacgagaaataccactcaaaagaatgttgcgagcttcacaattttgttcaaacgcagttttttcagcagcagtattaatagcttcaggaatcacataagaatgagaaacttttctccaaatataaaattgcatcctactacaccaatgagaaaaatccgttccatcgaaaacatgaggcttagttcaaaacctagcaggagtagccatggcaaaaactctaaatcgataaaaatccaaagcagaaaacaaggctctgataccacttgtaggatcgaatcacaataactaagccaaccagaggggggtgaatggttgatatatccaaaaaccaaaaacttttagcggaaataaaagttaccctcgaattcgacggatcgtagtttgaccgaagttgctctgccggtctgaccgcctggttgccgtcggtctgaccgcgattagatctccggtctgaccgccgagatcagttgtcgcttgctgtcgccgccgccggtctgaccgacgcttgtcgccggtctgaccgccggtatatcgccggttagaccaccgaaacccggtaaagacaaatcgaagaactcttaaagtggatgacgacttcattgattctctctgtgtttacaaagtgcaccaacagcactccttacgaaaatttcgaccatcctcaaaaccctaactcaaaacaaaactcaattgctctctaaagcgataccgggaagcctcacgctccccctctatttatacccgaggtaggcagcctaaagccacgaaccaaactcatactaggagtcctaaacaccttaggaaaccctctagtacaagaaagatactttacatatataaccaatcgtaccaaatttggactccttccaaattcgactccgcatcccatcaactccatcgtatgccatatggaatctccatcaaccacgtgcatcaactctagcctaagtatcccgcatgatctctgaccaccacggacgtcgtcttatccccaagccgactcccggtccatcatcgcaaatactctcccgaggcatcgagtcacctacacatgaaataaacaaagaaaccatattccgagaccaagttatctccaacttgactcatcagtagcaaacgacagtattacatacgtatagtatccatctagaagccataataatgaaacaatcacggatatccaaacaaacaacccaaaaccgaaaccgacacagcgtcggccagtcagaccgcgggctggccggtccaaccgctcgatcaccgccggtctaactggcacacactgcccggtttgaccggtcacatgaaataatgaacctacgattcacgtgtaaatccaatcatctccaaactcacttcgtgaataaattccaaataacaaaaccaataatctccaatgcccaattgttcatcacagaataataatcaaaaacacctttgattttacaattgtaggatcgtaaagggcctttcctaccccaaaagctagccattgaggtgaggggctcccccacttatatcttaggtcctttgcccttccacaaccaatgtgggactattcaacaatctcccctttcacacattggtgtccctcagcccttcaccgccccttcaccatatccgggcccccaccggcccacggtccatcaggtatacaggccccgcaggcatccacggtccatcaggacgacacacgtgtccatcgggccagagatgttaacctagcctagctctgataccaattgtaggatcgtaaagggcctttcctaccccaaaagctagccattgaggcgagggggtcccccacttatatcttaggtcatttgcccttccacaaccaatgtgggactattcaacagattaatgtggaaatttctagtctctatagcgaacatggtggcttcttttcgagctatattaataatacaatactccattcatttcaaaatataaagagttttgcttggatgagacaacctatccagattcgtagtactaggatgtctcatccaaccaaaactttttatatcttgggatgtaggggtgaaaacggagcggatattattcgatccgatccgctccgctccgaatccgtccgatgtgaggatatggtaaggatttttggatatccggcccgatgtggatgtggatgcgaattttatcatgcggatgcggatgcggatatggtatcaactatatccgacggatacggattatccgatattttaactggattatccgatgtactgtttagcggataatacgcaactttcaagccacacaacaactctatttagcacattttacatcgggcggcccatctagcccatctagtgtaacctaatccaatcctcccctaaatctctctctgtgactcttctctcagtcccttctcctgctcccacacgcgccgccgcatggcaccataggtgcgccgtgccaccgctgcagcctgctggcgccacctccgccgctcctccttctagtccgtcgacagtgtgctgtgtgctgtaggcagtgtgttgtatggaactagtgtgttgtgtgctgtatgtagtgtgctactgtgctgtgtggctgtgtgctgtatgcctatattgttgtatgtctcattgcctcatgcctatcgtacttatgagtgaactactgaactgaacactacatttttaaattttaagcaatgcagtgaactgctgaactgaacacttatatcatgtttttttgatggatgtgttatattaagcaaaattatattattgatgtgttttggttggtttttcctagagagctgagatcatgttcatatgttgttttgccatcgtattgcggctaattgtattgccgccctcttgttgtatggattgaatacaaacttgacatccgacaactttttgtccatttccgaaccgagtccgcaccgactccacaccgaatccgacatccgaaataatccgctccgcatccgtacgtcatccacaccctctccgcatccgcttaaaaaaatagtttaggatatggtatagctattatccgtccgaatccgctccggtttcacccctattgggatgaaaggagtacatagaaatcacaaattttgatttctgaactgccatttgtactctctagttagtaattgcttcattaggactgccacgtgattcaaggaaggattctgcaaacatgtcagcaatatatttctgcattgggtttccaattgtaatttcattgatagatacagaaactagtcggcaatattttcttgcgcatctaagttacgtagtatatatctttctcaaaacttcacatgcaattctcgaatagagtatttagacatgcagacttaaggactactgaactctctaacaaagagcgcgacgacttcgggaaaaaaaaattacagcacacatatcccttcacaatttcaaatagacaaaaagcagagaacgtgttgcagatgtaaagcatagaaacacgtaattggaggtgtataatgacagacacacagtataatatgttgtgcagaaaaggtagctgtatttagctgatattatgttatgactccactaacggatttgcaacactaaccaaaattaaaccagaagtgtatatactgctaaaacaaatatggcttaaacaaaaaggtatacaagggattatcttttatttagataggcctagtaatggatgactcaacatgctgcactgcacggttctaaataagaacataaaagatattgcttaacgtcaaactactgaaagcacacccaatgcaacagttcttcacagaagtaacaaagtcatatttcatctctgccagtcacagttaactgaatttattatttcagaacataacaattagttggtagtacagatctaatcgcatgaacgttcagtaaaaagaactgccgccttatttaactccgagcctttatgctaacattaattctcatactattccatatgactaagtcattaaatagaacaccaaacactccttgtgaaaatataatatatagtacatcataatacatattgcaggaaaataaagacagtagcgtcacgttttcctcattttacataggcttaaatgggaccaaactgcaggtttaccttctccaagcatctaaagtatatgatataaatatgttgagaaatcctgatttgaatcttgaacttcacatgcttttgtatgcacactattttaaccttgtataaacatcaaaacaatacaatataatacatcgacgtgttgattggaactcacacgcttctgtatatattaatcagttgatacataaaatccacattatgttatcaaattagaatggtataatctgtgaaaccaaaaagcatccacaaatggcatttacgcaccaaaaattcaaatagattactatctattaaatacattcgaggaatgatggtcaggctattctggatatgccagccaaattactttccacatgtagcataattgtgcgtgtggttttaatttagttcagttggaaaaatgtatggaacaattcaagggcagcaataatattacacatcagaaaataggactgccatagccaagggaatgtattagtggtaaaaacttactaggttgcggctttaaataaagataactcattaacttgctgacatagtacgacactaaaatccaaacaagagaaggtacaaatataacatttgaacataatacaagactgcatgtgtatcatatccgagagcagcatggtcataaagacctatcaaagggatcagatattgacaaatcatgggtgtgcttgttcatactgaaatcactcgtatgggtagttttaaatgtaaattgagcattttgagatgctttcttttctaattgaagccgcctgtgttgattggccaaccatttctgattgcaattgttaaggccagctaactccatttctcttagcgcttttgcattcagaacaaagaacttggcaaagtcgacatctgacctccttcctccataatttcttatcaccacttttttgagatggaactgaatgcattctattggatttagcgggtcatacctccgcgtatttttaataaccttaaacggttgagactgtaaatggaaagaaccatttgaaagcagttgctaactggttagcaatgtaatacttgacaagagtataataaaaaatgggaaatacttacagcaatatacagcctctccaagcaggggaagcaactgaggaagtcaacaactgcatccagattagggccatcagaatcaagaaccaaaaccttcacacttcgcattgaggttgtaaggctgacagcagtcatttcctgcagaaaagaacacatcatatcaagaataatagccaccatcatttagcaatgaataatcgtgatttaatgaaacctgctgctacctgaaaaatcgttgttccaaggtggagttgagatatgccatcagagagtggtcccattatctccagtttaggcgccgcgatcacccggatggccgccacgccatcattgggacaaagtggcagtaatctttcaaggcaaggggcatcctcgatgaccacctcctgcaactcggcaccagcaaatccattccaagatgcagaagagaagccccaggatttcgaatagaagccgaagctcctgagagatgcggagttgatgcgaaggcggcgaacgccgaaattcccctgcagcagcaggctctccaatgcagggcagcgtgacagcacgccatggatggcgtcctcggagatagcgacgctgcacagcgtgagctgcttgaggcgagggaaatgcagcgtcggcggcatctcgtcggggaaaccgcagctgctgaggtaaagcacgacgagggtgggcgcgaaccgcagagcggacggcggcagcgggtacgcctgcgcctgcgcctcgcgctccacctcgtagctgaaactaagctcccggagatcggcgagggcgcgggagcggagccatccgtccagcttggcgtgcctgccgcggaggcggaagcagtggagggagaagcggcgggcggggccagggtgttcggcgagaatcttggaggcaagggcgacgcgcttccgttcctggccggagagatcgtaaacatcgaggttgaggggcgcggagcgccacagggggcgccaccggcgggagacgagctgcgtgcgggcgccatacttggtggggaggagcgagatgatttcgccgaggatggcgtcggggaggccgctgatgaggtcgaggccgccgctcccgggtggctcctggctgctggaccgctcgaatctacgcttcttgcctgtgggcggcgccgccgccgccatcgccggcggcaaacgagacgagggatttgggggttttggtggaatggggaactagggtccgagaaggcgagaatgtgtagaggacggcagactggaccatgtgccgttcggtggatctgatgccgttggtgaggtatggatggctgtgattgatcttgtctttcggcgtgcttaaccagggaataataatggagggaaaaagaagcgggaataggaggcgcacgcgcgccaaattttgtttttgatggagcggtgcccgtgctcgagattttttttttctatatacatgatcagcgtgttttctatcaaatcgttactcaaatatttagaacccagtacgactcctccatccgaccggtgtaacagcttctgcctgaatttcgtcaagctaaggctgtgtttagatccaaattttggatccaaactgcagtcattttccatcacatcaatctgtcatacacacacaatctttcagtcacatcatctttaatttcaaccaaaattcaaactttgtgctgaactaaacacagcctaaatccagtgcttgctaactttgtctcaatattctgtttttgcgtatatacacacataataaaaggtatagtgacatcgaaaaccataaagtacgaagtatactgtactgtccaatcattgcataaaaataaacatgctaatgtcttgtttagttcgtcgattgaaattagacctagcacttggaaggaagcggcaacaagtttgtaggttcgtgctgcacgcctacaacccacgaagattgacgttccgccttgttggtgatatgggcccggagtatcacgtttagagggaggaggccacccccaagcccacgtggctcccctcgaggggggtcgagcccagggtggagcagcggctaccccctcccaacttggggtcgggctgccccgaccccctccacgtatcagcccacgtgtacagggttaggtggacacgcctgatgcccacctaacccatttaaagcagtccttgcagccgtgtcacgcggcatttaatgcggcatgttgcgcatctgataggtctgtgaccgatctgtgaccggtccgtgaccggtcgattgatcgatgggacagtggctgtgaacccccaccctgtcagtgtgccaggcgacgtgctgcgtgctctgtcccgtcacatcataatgagaggctttttagtctctcatcatagccggagtcgatttatccgctctggtcaaacaggagcccaaaagtcttcatcccttaaatggcgactgacaggggcacccctcgtgtcagtcgccatttaatttgacaggccccatcatcaagacgacatgcgcttggcttcccaagttaagagacaagacatgcatttaatgcaaagattgtaatatttctccactaagttaggttgttggacccatgtggtaaccccttaaggtataaaaggagatccaggcctacttagggagggggatggacggattgaggggggcagcttctgcccctcatgatcaacaccttctactccaataaggagatcttgtaatttctcccacaatcagcatagcaaaggagtagggtattacgcttctcagcggcccgaacctgtataaaccccttttgtctcatcgtcttggaggggcctaaccctctcaagatcacacagtttcgctctccaagccttcgaatctcacccactgcccccggtcaaacctaaaaagggag

SEQ ID NO: 29527 - DNA, 574 bp, Oryza sativa
taagaaggcatcgaggaaggagatcaagaggaggataaagaagcttctgtcatcgctggggcagaaacaccacatctctaaggtgttcttcagatcacgttctgaagctgccaatagcaatgctgtcattgacaacagaggtggtggtcagagtgacatggagacttttgtgtccgcgaagagctccgagttgtgttcattccgtaccgatgatgacgactccgagtcacgatcgtttcgtctcagcccgttgccaatcttcccaaccggaggtattgaattccagccacccgcctctccagtgaagataatcaagaagctcccatttgggtatatcatcggccgtcagctcgacggcgcccccgcagcagcggcgccatcaacgaagctctcattgagcttcaaaaagatgatgcataggttggttgataagtcaaagtcgaagatgatcaagaagaaagtgttacgtgctctcaagggaagatttggaggcggcgagcgacgaggcagggatggacatgtaagggaaggtaaggagagcagcgactatggtgaccgtgatggtgatggagac

SEQ ID NO: 29528 - DNA, 8700 bp, Oryza sativa
ttcctggttttgtggataggacaccaggaccttgtcgcctcgaaagttgtccttgtcggctcgtgattctcgtcggaaggacaagatttaacaacactatgatccttctcgggctcggatgtcgtccatgttctgttctccacttttgcgggaggatccttcgacatggaaccgtccagggttgtaaccacagcgttctcgctttcggtcattgatggaccagtcaagattggcaccgtggtgtaaaccaggaagacgatttgagtccacatcagtattgtcgaagtagaaacaccttggttgatgccagggttgacgctgttgtcaacgaagcttgatgacatattagtagaaccttgagcaccaagttcccctacctgacacgccactgtcgatgggggatacccgtagaccggatatagagggtattggggtacgctggtatgaggatctacatagtacgacatcaagcaaacaaaagacaggaattatactggttcaggccccttaataggtaatagccctaatccagtttatatgggattatatgacggaaatcacagattacaaagggaatagtggaactctatgataccgacgagatcgtagtcgagttggttcaactagatcacccggcgacttggctcctgtaggctctggcttcataggctgtggtggatgtgttcgcggtaagattcgattccttaggtcctcccgggggtcccttttataccacaggttagttggtctccaagtataactcagagacatcggaccctacacgatacagtgacaacccagttctatccgagtaggaatccttccatctgtggactccgtgatgaatttccttaacgtgtacagagaacgtccgtatacgcacagatataccatatcgatatatgacgtatatccaagggtagagggtataccttatccgtaaccctgacagccgctgctttgaaagatgaccttgcaagacttgaatgtgaaaagaaatctaacagtgaaaatcagattattactaagaatcttgcttcacctagtaaaatagaaccaagtgcctcaaagaatgaaattaagttgaagggtgttttgctagcttctaaatataatattttcgctctagatgagccagattcttgttactatgctcttttttgcaaagatcatatacccacattggttactactcctagtactttatattctttgctacccgctattactaactttttgcaggaatatgagggtgtttttcacgatgagatacctccaaggatgacccctggacgacagagtgaacacggtcaagaagatgggattgagttgaggacgactccaattcaagaaggggaggatgatgaggacatcatttcatcggatacgcacataacttcacactttccaattataattccaagtccaagtccagttcggcctccggagacaacactgacttcaaacggacctagtgccttcatgccaactccgatttgggtgatcttggacttcatggaaagcttatctcgctacctttcaaatgcatctggtctgatgtccaaattcatctcgagtcaacaagaatcaccaaaacaaaacagtgttgttgctgaaaccgaacttgggccttggaccttgtaatagactaggcccatctcggaagtttctccctccacctccacgaattagtacttaaccctagctttatttttctctataaatagctttgtacatcctgaaaaacaatggggttttgtttagttgaattttgctaagtgctattcaccttgtctctagtcctcgctctactagtcggcgactatagattcagagcccccaatattcggtgtgttgatttgacgggtcgattggatctaccacttcaatcgcaaccatttctttgtgcttaattacctattcgcaatatttagattgcatcttatcttgttcttgcagtgttctctcatttgcattgcagggatcatcaaccgcgcgccacggttggtacaacatcgtttgtggtttagcgattgcacggcattctggacatgttctaattggtagccacgtcacaaacgtcgcactcgatcaaagcgagagttatcccctcaccagaagatcgggccacgagagagagcgtcatcagaggcccctttgatgccaccctttaagaattgtgttcttcgtgacccaatccttaacaaaaaatatttagggtgaatctcaagaaaagcatgattatcttcagctagacgagaagcataaataagattcattttggcttgggtaacatgaagaatatttttaagatgtaatgtacgatcaggggtatgaatcaaagcgtgaccaatataatatgttcaattcccatacctatgccatttgcagcatgtttttgatcaagtcaccaaaagaatttttctgatagtaattactactagtataaaataaaaaggtatggaaaagtgtagcaaagttataatattttgaaaccatttttggaagagaaatctattcatacaattttaaaaaagttgaattcaaaatattcaaagtgatattatattaattgtcaaagtttaaacatggtactgcacacatcccaaaaagacagttaactttagggagagcaagtatacaattaagaacactgctacacatactataacaattttcttgtccttagatggtgaatttgtcttaattaagaatttcaaattcttgatacactaaggccgtgttcgggcatccaggttcccaacacctctccttccttttccgcgtgcacgcttttcgaactgctaaacggtgtgtttcttgtaaaaagttctatacgaaaattgcatattgatccatttttttaaaaaaataactaatatttaattaaccacgtgcaaatggatcgctctgttttttatgcgcactgttccagttgggaacttagccagccgaacacagcctaaatatctaaaagaagtataaaacgtcttagtcaaaagtagattcataaccaaccaataattttgagaaatatgaactttttataaatatgaaaacggacataacgtaattagaaatttgcatttaaaattggttagaacgataaaatttcatgatttcctagctagcttgtagatatcaactcaaccaccaaactcttcagccaacaaattgcacttatatgggctactagctcattataggctggtaatgtttaggattaattggaaccatgccattataacttttatgattttgaaatattttattactattcgtctatttggagaaatgtcactataattttgctgttattcgatagatggcactacttaactcgtgactgtattttctaaaatttttagatcagattgcccatttcttcttccttcatcgatctccctctctatcacatgtagttatgttcatcctctcttcgctcatccaactcgaaatcaaacactcaagaacaagttcttcatccattcaatgaagaaagggagagctagagatggatatatagaggggtgctctgctcacttggatagatacggacctggtcgaattggatatattcgaattgggatcgaacagagatcaatacgagccagtaaataaaatcaaacataatcgaattgggaatcagaagaggagatagcacgaagatctcacggtgctgctgttggtatttcttaacgacattactagaaatataattcccagcaatggcgcagaaacacttctggtatattatggttacagagttcattcgcaagcgcatggatataccattgtagcatttcacccgagagtattccaagggtatcgtatttattttatctcgtgaaaagatcatgtagagagaactcaactaataatttatatatttcttgtgataatcatattctaagcaggggttaagataatccaagggtagagtgacacacaagcattactactcatcctcataataaataatctaagttaggtggaaagaaaagaaaaagagaatctattcctatacttctaatatacatagtatacatacattctagttaactgatatactagctaataccctctttccgatgccctcctggtatttcgagaagccacccctgactgccgagttccttacgacaacccgtcatgaccatccaaccggggctaaatacggaggaataccctccccagaaaattaacttaggattatatataggcgcggaggaatacccatactgacctgtcactatcagcggcccacctctcatccgcaatatataaccccaaataatgatatcccgtaatctagacaccacgtctaaactaccagatactactctaatatcatgtcatgatatagagtaattgcataagcaaacactatacgcgcaccaaagcatctcccagataagctagtagtatattcagtataacatgaacataatgcaaagttggtactcgtatacttggaaagtatttcaataccagaaatgtatttagaagagtattctaataaaagtacaaagcttacaaaagaggaaagaaaagctactagagccatacccgaactcttccgaaggcttccggactcctgattcctattctaattctattccaccagctagatactactaaactaaacttgagaggaatgagagagctcttccttgaggtgtgtgagtgaagtgagaagatgaggggtttatatagcctcctaatgacggttgtgacggttggaatagttagaaataccctccaaccgtcattgggagctaatccacaccgttcagaagaaaccctgcatccagcggcgatgaggggggttcggccgaaccaccaggttcggtcgaacctagggccggcccaaccagcccatggtttggctggcggcctcctctgttgttcttctccgcagacttgtgaattttggcccagtttgtcgtgtcaattctgagttcttggcccattcatacacaagtctggttctcgacatcgtccgattgatttatcgtttgtgttgatgtcgattctcctccactttattgtcattctctgcaaaaggttagtagacctaatactagtggaatattattattctaacaaacatatgcattgcaagcaccactagttctcctctattttggtaatattgacggttgaaactgatcgataacgaccgtcaacagccgccaagtcgccactgtctcctcttcgctgctgctctcatccgggaggaacgtgagcggcgtgtcgaggctgatggcaacttcatagcccaaatctgagtgaggcactttagccgtaggggcttctccaccgccgccggaggtgtcgttctcgatcggctgatggatccccacgagagtatctcctcgggtcgatggcagcagcggcggcgcgggctacacgctcgaacaaggtcatccaagtccgtggacgagcggtgcccaccctcattgaccaccgtggaggcaggcggggaggacgtggtggcggcggaactctaggtcgaggtcgcgctccatgtcctcgttccttggctcgaagatggtgatgttcccgttgccgacagtgtcgttaagcgccttctatgccagcgctttcacccatgcttgtactgctgccattggtgctgagaagatgaacaggagggaggagggaatgaatgaagaagaaagggtaacttggtaaaaaagaaagaaatagagtgaagggtaagtagtagtatatatcaaattatgatggcataccttcagatagaaggacagtaacgcaattgctatctcgcgcagatgcgccagattcttatctctcacgcatgcagcaaaccaactgcacatgcatgcatgtacctcggtctccacccgtgcagatgcattacacacacatgcatgcaccttggtcccacacatgcatgcatgcatgcatctatacgatccttctttttttttatgttttcaacataattaatttaggatgtagtgaaagttatcaaaatttctattataagatatttttaataaaaaatattttttataattcaaatttaaaaactcgagttgaaagttttcaaatcagagttgaaagttttcaaatctcgagttgaaaggtttcaaatctcgagttgaaagtttttaaatctgagttgaaagttttcaaaatttatcttgcaaatttaaatttccagttgaaattttttaaagtttgagttgaaagatttcaaattttgacttcaaaatcatcattagtgctaatcacatgttaacgatgggccagcgttaggaatccccggacagtaatggtatatatcaaaattgtgaaagttacaatggcatggatgcaattaagatttgctaacaatacttaccaataccacataaatattgtcaaaatgttggcattgacataaacttacccatattgcaaatatttttccatggttacaaaccaaataagctcatcgttgcggcatcggtgcaccactctccctgccttttgaaaccaaactcgacaaagaaaaaccattttatgggaaaaaacaacagaagggaaaaatctataattgaagaaaaaaggaaaaacaaagatagaaaatttctaaataagtagaattcggaagaaaaaaaacttttaaactgaaactcaaaaggaaaatattagtatagaaaagataaatgatgaacaattgaaaactcctgaaaaaatcaaaaaggataaatgaatgatgaattacattatgcaatgttctacagtaacagatgttccaaagaactccaagtctacaaacattcagttgatactaattaaagttggatcattttaattattttccttgaatgtggaaattatcagctaccttttatttgttttcacccaaggaacttagtacattaccatttgaaatactcccacagcttccaacactaggagatagacctgtcaatatctcttttcggtggattcatcggccacgcgacacacagcagccacctccgatgggaatggtaaaggccattcccttagcaacgatctgcaacacagcatgcagggcaactgttacaagatctcacatattttcagctcgcagttctattatgaagggccgaactgttatgaaaataaatgtacaacggagataaattttacgtgaaaaacccttgagggaaaaaactatagacgccgaccggcaatgatcactatagaggagttagatacaaacgcaggggatacattgagctgtcgcaccctccctgtacggcttacaagggatatatatataggagaaatctaggagtcctaataggtaaagactcaaagtcctaataggaaactaatcctataatgcagtcctattagataactaatccaaatatattgttggtccaaaattcggatcacatatttaacacaaacaactgcaaataattaatttgggatgtttatgagacatcccattatgaataaatgagactgattgtcattgtcatgtcttagggccagtttgccatgagccacgttttctgaaccactaatttcgtgcaaaaactttatatattttattaaaaatcaaataaattcacttctgtaatttataatagtccatacttaacgatgcgctaatggcatgcctcgtttcacgtggtgctgataagctcagccaaagctttacaattgaacatagtttccaaatgactttttctctgatatgttaccttcattcttaaacagatgacatttttgaacatatgcaagctgtcaaatattaaaggaaaaggtttattctacaaccttgcgcttttaaccatggtttagaaattcaccctgtaactttctaaaccgttcatcctaccgtcataaactgaggtagtgatgtggttttggcttattcagtatagtcccccatccccatgccgttcccctattttcttcttgctcctctcctcactccccttccccactctgcttcagacccccaaccaaagtacccaatcactgtgtctcagatcatccaatggaggcaacagcggaaaatagtccatatgccacatctttgttcggagttgtatttcgcctatggcttaaggtacgggagaaatttcggtactatatatttaagaaggttgggtaagttttggtgaaatggtggtgaagaagttgtggcattatccaattattggttatgagtaaacctccttttgtatattattttagtgctcttggttgataatatagtttattatgccttgtgcaccaataaccctctatgtagcttggttatcgacggttggataaatggttcttcagtttatttgtagaattttagctccttggataaaattgatgggggccaagatctaaactcaaaatagagctatccaccaatcacaggcagtctagaaactttatggagctcaagggaaatataatactcccttcagacgaaaatataagaattctagtaattctatgacaaattaagcatcaggataaaaatctagaaaacctctcattaaatagggtaatcacttctgattcattaattatcggctggttttgagtgacccttgcgaattatgaggaatgagtggcttcaaagagtgcaccagataagatgaaaatccaagatatactccatctgtcccaaaatatagtaatatagtactccctccatcccaaaatgtttgacgccgttgc

SEQ ID NO: 29529 - DNA, 14464 bp, Oryza sativa
ccgttcgtcttattcaaaaaatttaagtaattatcaagcttgctttcctatcatttgatttattgttaaatatacttttatatatacatatagttttacacatttcacaaaagtttttgaataagacgaacggtcaaacatgtttaaaaaagtcaacggcgtccaacatttagggaaggagggagtattagattagacacaatctagttttacaaatctagacaacatgtcctgattcctgattcataatactggtcctatctagtagtagattgatatatgttagaactatcagagtattaattactgctccagtcgtccttatattttggaaaaattttaaaactcctatagtccttatattttagggcggaggagtatatctcaaatgtgtgtaacagttagcatccgactaattgctaattcatttcctctgtttacctcaaagtatggctaatccatgtttttagcaataatcacattacttgatgtggtacagagttttttttggcaattattgataacaaaaaataatcatcaatgagaaatcattctgctaaactattacatttcaaacatcaccatttttagggctgtgctttgttaagatatacttcattggccaatatttcccaatctttttatactatttcagggctcagccgttttattgccaaaattaatattagcctttgttgtttatcttgtcattcattcttgtatatctcaccatttattgtttccatatcaaacaagaactcaaacatatctgccaagataatatctattaatagcctaaaaaaattttctatttcccttggctttatcctcatcgtttcctccacctacatgtacatctcaccatattctccccaatttccacaaaacaatttagagagaaaaatacagatcagaagaatgcttcaggttcaaggctctcttcgtgtccacactttctcctctgctgccatcgtccatgccgttgaaacctctgatgaagattctgatccatcccacttctgcgccgtgccgcagaacggtaagaaggcatcgaggaaggagatcaagaggaggataaagaagcttctgtcatcgctggggcagaaacaccacatctctaaggtgttcttcagatcacgttctgaagctgccaatagcaatgctgtcattgacaacagaggtggtggtcagagtgacatggagacttttgtgtccgcgaagagctccgagttgtgttcattccgtaccgatgatgacgactccgagtcacgatcgtttcgtctcagcccgttgccaatcttcccaaccggaggtattgaattccagccacccgcctctccagtgaagataatcaagaagctcccatttgggtatatcatcggccgtcagctcgacggcgcccccgcagcagcggcgccatcaacgaagctctcattgagcttcaaaaagttgatgcataggttggttgataagtcaaagtcgaagatgatcaagaagaaagtgttacgtgctctcaagggaagatttggaggcggcgagcgacgaggcagggatggacatgtaagggaaggtaaggagagcagcgactatggtgacggtgatggtgatggagacgatgaagatgtattttggaggaaggatgtgagggggctgcgctgcaggcgggtggaggacaacgatcttccatactgaaggagcaggccagtgtatatggtgggttttctgtcatgcttttgattttagaatgaagtattgactttcactggtaaaacatctaaacatttggactataagtttgtgttctatgctttttgttgtggtggaaccggatatcagaagtttgggagtgaaatcggcttgaaccttttggaccaccttgtgcctgtatttagttaaaacttttcacttctgaataatatattttgttatatatctagatctgtcttacaaatgccactgcagatatggtttatatttattacttttattgcattactattagcaaaattgtgtgtgcggataggattgatttgaattattatatgttttgcgatgagtgctagcaattacattgatttgaaaatatactacatccattttacttccttactctgctgaacctaaaacttatcatagtatattaatgtatggaaaatatatcgagtcaatttgcatatttttttaatctaaatatacttggagcttttcttggaacatatcttagaatatagggatgcacatagtttgttcatagtagtaaatcaacaatatatgctttttttttactactaatactacctaaaatgtttttctaaaaaaactactacctaaatgttaatttctactctctcttaaaaaacatttgatgctaggaaaactaagttatgctcataaatgtacttatatagtgggtgtaaatgggtataacaacttacaaattactcggtcaatatattttttttttgaaacgaaaagtggcaaaagacttgttgaatatattagaaaaagtaaacaaacatgcaaaacagtttagagagaaacaatcttgggggggggggggggggcggtgatgggacaactggaaaaagagtacatattctccaaacttgggagaacaactaggaagacccacagtcccttaaaaggatactcgttcagtataataacttgctaatccgtgtaaaccagtgctgaaacaagccgtacaagaaagttgctacacaggaaaattgatctgaatctacagcaagcttgacgatatgtacgcaccaaaacaggatcgaattagttctgatttaagaaaactaattaattcttaacggaaactatttagatcatgaaaaaccgagctgccaattaaacatgtttttgtaacaatcagaaatcacaatgaatcagtgcagtcaatcatgatatggaagaaaataatctcattgtaaaccagagcctgtgcacctaacaagaagtatagtagtaggcgatataagatccacttggcaattttttgatgagcaatctaagagaggggacgagagagacgagaagcgggtgactaattagttgctagcctccacgctcatccactgcactcttcgcatccgtccaccgccgtcatcctcatttatcatttagtcgcggctatcatcgatgccctctgctgccaccgccgtggtcctcgtccacctcggctacggtcctcatccaaggctgccgctgccgccatcgtgttcgtcgctacagcttgtccactatgctcgccacgtcgcgtccgccgccgttgccctcatccatcaggcgccgccatcgccataaccctgttccgctgcagctccgtcctcatccaccctagccgccgcgagcgctgccatcgtccaacgcatccgtgtgcagtcatcgtcgttctgaagagaagagatgagtagaagagatggtactatttgtgttcatagtactatttgtgttatattatttattcatacttttgacattagatacgctatttattatttcttatagatgacagatattttctgaactaacaacatgctctcttattgaccttgctatgaaggtccgagagttggtgccattatgctaacaagatcactgccaaatcggtgtcatagtgcagccttgcctctatcccaattcacagaggaaaatttactatttgctatcctcctaaaatacacatggccaaatatcactctcctaaatttttattcccaaatacacgtgtactagcttcgatggagtacaagagcccgtacatattcaatgaagcgccaggggaaacaataggagatggtgtcatgcagtcttagacggatattgttacatatactccctccgtctcataatataagggattttgggttgatatgacacattctagtataacgaatctagacagacggtttatctagattcgttgtattagaatatgtcacatccatccaaaatcccttatattatagaacggagggagtactatttgtttaatcaagtactcttacagtcttattgtttggcttatgcttatccatataagccaaatttaaataagtgaaaggtgaaacccaaaatgcaaaactactgtgccacgtcatcaagaaaagatgcaccgtacgattttagcttcagaagttacgagccatcggattccctgattggcgaaatctcttctcgatccttcagcaaacttcttttgcgcgtaggtccttccacttccctggctcaaaaaaaacaaaacaaaacgaaaactgcgttccccatctgttcccttcgccgatcgccaattatctctcgctggactgcccgtccgccgcggggactgctaatcggcgactgatcgcgcgcgcctgcggccgcgcggtcagttatagccttcccctatatacacctttactactgtactatgtttatatatttatacatacatatatatacttttgaatatatacataccaaatcatttttgatgtataaaaaatatatacacatatacaaactttacatacatcgtatacaaagtttatatttgtatatgacgtatacaaactttgtatacaacatatacaaagtgtatatacgtatgtatacaaatgtatacgtacctataaaaacatgtatagaaactttgtaacgtattaaaaaacaaggaaagaaaaccagagaaaatatcaactttgtattgtatatatacaaagtttgtatacatatgcataaaaaaatatacgtatataaagtttgtatacgtgtatataaagtttgcatacgtgtatataaaatttgtatgcgtgtttacaaagtttgtatatatgtatgtaaactttataaacacatacacagagtttatatatgtgtatacagtttgtatacacatgtaaactttgtaatgtaaaaaaaagaaaaagaaaaacaaataaaaaagagaaacagaacgaaaaaaggaaaagagaaacggagcgaaaaaacaaaccaaaaaaaaagaaacgcgcggcgtccgccacccccctctccgcgcacgacacgtgtccagtcgtgcgcaggggggcgcgcgcgactatccgcgaattagctctttcggtccgacgctgcctccctcctccccagtccccaccggaaacagattccctgactttgtgcagtctgcagttgtgccactgatatgtggaccctagtttggtatgacccacatatcagtggcacaactgtaaactgcacaaagttaggggagtctcatccgtccccaccacctacgcaaccgccctctgcactgtggactcagatcgtctgcattggctcttgtaatgcagagaagttctctgcattagcccagatctaccgttcatccaaaatccaacagatatgctcgtttggtgtctcttcgtataaaatcagcaaaagctcctgagtttatacagtgagtgagctaaaaaatacaaatttaataagatacaaaatggattccagataatatatttagcacgtaaatattgttgtttgctctcaccttcctccttgctacacttgaaaaaaggatacacttcctccgttacagaatataaagcatccataattttacaaaaaagtcaataatagtaacttttgattaatgttcaggctaatactagtaatatgtatgttcagtgttatatatgtgatatcattatattcatattttaaaatggtttcatatattgttaattttatagtcattgataatatattataaaaaaattaatggtaatatcgaagacagtgtaaaaaacataagctctttatagtttgggatggaaggagcaactgctttaagaggaaatcgtcatatgaagatgagggacatcatcttaggaaaatcatggtgagtacagcgccgttctcacagcaaggtgagctactgaggagtttggaggaagaaacagttatacttatatttttagtcaaataaaagctcaccgttcttttaccgatgagtggtccagatttgggctaatgcagagaaggactcatctgctgtagcaagagccaatgcagaggatccgacctctcccacctctcctcttgcttgtggatggctatcctcccaccggatctgaacatccctagcttggaggctcatgatctagccaccaaatcccgccaccgcaggaggccgccctagccactgccatgaagtggagcggctgcttcgaccttacccccgacaaggcgcgatggtagcggcaatagccatggagctcgaaaggtgccacctccacgctgacggaagcggctttcccttcccagtcattggagcgcaatggagctcaacatgctaaaatctcaggtatgcttcatctacaagcaagattccttcatcgcactccttggaattcttcattctttcactgatggcgcgtcaagatggccaaagccaatatgcaaccgtatgtttagctgtccaatatttatcaccataggttgtgcatgttaggtgtttgataaattgcttgaatagatatactaggcaaggttggtgatagggatataccaattgcaaaaaatcaagaattttgcctcttcgtatatatatgcagtaatgaaggttgctacttgaaaatccaaagtacattctttgctaattttctgttattgaagctacccaatagcctaattagaaaaaaaaatggataatgacatgtatctgctatctgctattctgctattctgcattccggtagtatgtacaacagtcaacagatactatctgcaaaaaagatccatggccttctgaggcagataagactaaagccaatggctttcaattgatattatttagaaatttatgtttggttgatgtaacttatggtctgatggatttaactagatacaaaacttaaaactgatgtccctcaagtcaacttctcagctcagaatctttgcatttatttcttaatactaaattcatggattaagagcaaatccatcaaaaaaattccaacaattccttaggagggattggccggttaggctaggcggctagcattgtttgatgtgtagatcagagtggcccatgttatgccttataattaccataactttgcacgaatgaccttaggagcaagtcttgatgtgcatatttttttgttataacttacatgctctgttcatacaatgaattaaagcttaactttttctatgcatcaattgattgattacttaatgttcaattaatggagtgctaccatcatttcagaattgcagaatggatcgtttatatatcttattttcctctttccaaaagacaataattaagttgtgagggtgacattgctttgaacataatccatggcaaaatatatctcatactgcaaatgattttataaggaaatgtcatggcattctcaaattggttttaaagttagttgccctcatgcatagtttgtttctcaaattattgaagagccacaaacattttgatttgtcgactgatttatatgtttataccaggacgcctttgggactatgctctgtcatttatgattcaaggtgaaaccgggtgattctccgaggacaagattgctgattttagtgaaatattcaaggcaatagaatgcaaaaatatcaaggaatgccgatctccctccccactcgtttcctccacaaattgaatgcaaaaataggttcctatcctcctcctcatcaattcccccacgttttgccctcttaattcgtcctttaatcatcaaatttagtctccgatgaaccgccgccattaatggcaggacgtcatactctccggccgttctcatcctctccccggccagccgcctcgttcaccgcggcctataaaaaggagtaccgacccccccctctctccccacactgcagccctccccctcctctctccctagctgccgcgttgccttcttctcgtgtcgtcgctgctgtgcaactccggccgcccctcgccgacagttgggacctcctcggagcccagcatcgccaccatccgcttcgcagcaacctcctcttccccagcctcgcctccgtttctcctggagaccgccggaagctcgtcctcgctggtgagcagtggtgacgtcgccttcatcctcgtcctccggcagccctccctcctcgctggaggattgcctcactgcgctgtcaatgctgttggcgtcatctcgttgtcttcatcatcggtcgtgcctcctcgctgcccaaagactcccgtagcgccgccccgttgctattgcctccctcctgtcgtcgttcccgtcaagacgaagtgccgcctgtcgtcggtgtcaagtccgcagcgccaagcccgtcgttgtccgccttttcaccaagctcgaggattgctggagccgtcccctcgtcgttgacccgttcctctctgtcgcccttcgtcgccgcgccaaggttttcgccggtcgccaccgttgttcccttgccgcgttgtgtccatggtgagaacctcttccgtcgctaccctatcctcgtcctccccgtgtggtcgccgcgtggattgcccacgtgtgcagctcacgtggtagtcccggctgccaatcgctcgatcctttctttcttcgagcgatatttcattgcacataatttaatagtataataataataataattaaacaactcgaaaatatccactttaattgcacttaaaattcggatggtcgtttctcggccatacgagctcctaattgacccgtcgaaattgtttaatttttgttatagcttgaagaacccgtgtttgttatttttatatgttgttatcgtttctttcttagatttgtagccctgttttgttgatcgtgtagctgtcgtcatttcggaagtttctgaagtgcagatcaagtcatctaaagaccttctctttgagcaaggcaagtcatgccatattccttgaacatagtgaatcccattattgcaaaaactacgttgtttcacttctatatgaatcgcttttataaattatatgacgctcactattatttatttaatagttaatattcatatgatccttgttatatagccatgttattgaattgctacccatgctcttgacaaccttagtaaaatgataaaatgactagtatggctccctatatgatggacttattagttgctttaggttgggcttatatacgcttagatcaaacatagaatctctttttatacattaacctgtgggtaacaactaaaatatgtgagaatgatgattaggtggctggttgagcctggacatgatggaatctcattcaaaactctctaaacctatttttggtggggcgtgaggtgcatggttttgttagaagcacctcggccactgtaaggaccggtcttcggacctctgttgcgaagcataacagtgcaaccacaagtctaatgggtaaagcctgactagaagtccagatcatctcaaaacaaaggccatcggtatgataggtttggggccagggaaggctgactttgacctggcgcaagagggggcttatctcgtcccgggggatccagcaacctttaccttgtcggggaccagcgggtggcgaaaccttagcgggtccttctgttttgggttgagctaggaggatagtcttgacatgatcttgacttttcgggttcctttgaggtatcgcgatacatggttgacatgaaatcaagtattgtgtcttgtgggtaaagatgtacacctctgatcagagtaaaactattcgaatagccacgccctcggttatgggcaagcctagcaatgtaccaaagttagtgtttttcttctaagtgatggatggaaatcatggcactttggacaggcggttaacctgggtttaaggccggtatgcgtgggttcgtaaccatgataatattgtttagatataggaacgagtttaaactatgctttaaaacattaaaatattgcaactttggctttacgcaaaaatgaaccctattatgccaactctttgttccctttgcattataattcatttcccggcatagctcacttgagtacggtggttgtactcattttcttgctcaatctttccctctccagtcagaagcttcttgaagaagaagtcttaggtagagtcttggcttataccccagttgagcacctgtgaagatggagccgtaggcccgctagtccgctgttgtttttcttttgttgtcaggcttaatgtgcctttgtaataatgtaaatattatcgtgataattaataaagatgtgtcttttgtatcaagttgttgtggtgtaccctggcttttcctgggacggggattaatacactagcggtcgggaaaggtattttctgggcgtgacaccattaaaaatccactgcaatagtttgatctaaccaatgaaacatccatatgcatagaccgaaacatcaaaaattaaaaaaaaaacattctagacatacctcttctttctctcatatggttggccaccgcgtcagcaccggatgctgccctagctgtggaggggacatcgttagcgatggcgtgcagctgccggggatggcgctgtggacagtgatgtcgtacgacccccacccgctctagcatccactctacacacatcgccatcaatgcgtagaacttaaccatatctgtgtcactgctgcctccgcggagagttcagcgtgtccatgtcgccgccgctgtggagatattcgtgtcgccgccgtcattgtggacaactcgtccatgtcttcatcatcactgccgtgagatcttggccattatccacgctgttgcagctatgcaccgccgcagccttgctctcttactagtgctatgagtttctcgtgcatcagccacctccatggctctatcagggtaggggaagagagggacggatagagagagagagagagaaagaaaagcgagaggagttgataagaatggctctatcacggtggggggaagggaagcaaaggagtggataagaagtgagttgccagcgtgcatccggtatattgttttcctccgaactaccgagacgaagccttttcggaaaatttaactcgcttctttagatgccatgttattcttcataattccttttttttctactagagcctcatgaatgtccattgtgcccctcttcaccccgttaactctctttgacatgacgagatactagcgatggaggagaaactatttgagctcgcagacaccgttcacaagtatgatgacgcacgtagcaatggcaatgggttgcagcagcgtggtagaaggtgaaggcgcgggtgggggcggggtagggggtgcggcggtgagggggtggagatggcccaagtcatgctaccaccagcaaagcccatcaaagaccgcaccgtcgagaaagcgcacatgattgttgtcgaggcgcagactcgctgtggttattatcgatgggaactttgatgctgatagctccattgagcccctcatcggcaacgaggaggtcgaccccaacaaagttgtcaccgtctccgcgcgtcctaagtagcaagtagttaaataacccacctgagccctaaattaaatgcacggggatgtgtgtattagaaacatgctgcaaaaatctccaaaatggttttattggattaaaattgtttttgtgtgcattgcataatccttgttacttgaagccactccattttcatcattgccacaatgttaaaagcaaaattggatctatagcaaagttatcttttttttgttttgtagcatcgaaagttcattgttcactttagtagaacataaattcctgccttttccctacatagcatttccatcgctccaactccctttctagttttctttgactgaaatcgacaaaaatggcaagacaattgacactatagggccaatttattcttgtccctattttgatgttcaatattaattttgcctctgctttttagggtttttgtttatgcccctggtttcttgaagcgaagccaagttttatctctactttagaaggagatgttagctgtgttaaatttttagcaaaaagacatccatacccttgcttgctactgtacattccgaactttggcagattcaaatcatcaaagaaaatctgacagattctagcgcagcaagaagtggcataagcaataaagcaagcaccagctccacatcttttcttcagctagcaagcaaccagcaactcctcacctcttcagcaagacagttgggcgttggcagcgatgccgcgaggccgtgagagacaacagcatgacgcctcaccgacgttgtgccgccaagcaggaaaggccacgccgaagccatccacaccacgatggttggacgtaggggtgaaaatggagcggattcgaacggatagtagttataccatatcctaaaccatattttttaagcagattcggagcgggtgcggatagtgtacggatgtggagcggattgtttcggatgtcggaaatggtgcaaagtcggtgcggaatcggtctggaaacagattaaatttatcggatgttacgtgtgtatgcaatcaatacaacatcgagttagcaatccaaggaacattaatacaataatcaataaatgacccatcgtaataattatatgattaagtgctaaacatcatgaatacatgatgtccataatataaaaactagtaatcgtgcacgtgcaaggcacatcatgcaaatataaattaacttgagatcagcatatcaccgatatgacaacaataataagtttattaaatttaaagtgtacgattcatttcacatcaaataaagaataaataaacatatattcaagccatgtttcattgaaatacaaaagcataagataaaataatacaaggtcctacgttgtatgaattaaggattagacagaaaaaaaaaacctcaaggttcaagagaatgtggaaaatggagataaaaggcactttgatcatccgatgctattggtcataaaaacattgtgcttacaattgtataagaaatggccacttttatgtgaatgtgtgatcctcaacttctcctagaagttttaaataaattagagttgcagatatatattatgatcatttgaacctgacaaaacagcacaacatggtcaatcagctttgttagaaaatacaaaaaccctgcaatatttctagaaaatgaacagctaacttgtaactccaagtagcatatattgcaacctgctcttagaatagctttcttttttaaaaaaaaaaaacttacacttaatgatacttagacaatgtaatcccaagcttactgacagtgaatcgataagccaatatctgattgaacatagagagattttaacgaacaattgtgcagaatatgaagaatgagaagaactgaagatacaactaactcgtttgttttgaaacaaaccattccctcaagctagctagcaacattgaaaaactaacacaacttgcactgtacttatgaagtgcatgcatcgtatcgatcaccagattatgctaaagagatccatcaagcaaggatgcatttagaaaacattcagattaaaatcagttatgatatatagttcagctgctaaaacttttattgaggtcaacaggttacaggtagcgaatgactcagaaccaatccaatgggccaatccgtgataaaagaaaaggtggcaaccgtagatctttatattagatgaggttttatacttgtgtgatactggaatatcagttcaagctattttctgctagctatgtcataataaggtgtgagatttgggtacctgttacactttttttaatagcagcctaaaatctttttatcatcagcaaattgatccatgtacacataaggaccacttaggtaccacgaacctgcagcacaatgataatattcttcaacacatcattgatttgcttgctcagggatggaagaaaaagtcaagggggacaacataagagcaatcagacaacaatatcaagaaaaacagtagttacctttttgtatttgtgaaatttaaagaactactactatgctggaccatgccaatcaaggttgaaaataacaagccaatataaaggcaaaattaattagattcatggaatgcaatttggttgcacgctcctagcgcagaggtcgggaacacaacccaccttgtgcttcaataaaatgtctctaaagaaagatgcatcatttcttttaatatatctgtctttggatccactcaaaccaaattttaagagattggtccttggacaggttcattgtgaggcaatctaagccttggtaatgaaaagataaacactcaaattcctggaccagagaaagggatcaattttcatagtcagagttagaattgttctatgccaagttgagttcatctcactggtggagaaagaggctttactcccgattcgtaaccccctgtagtccggttttcaaatcgggactaccaatccgggactaaagatagtgatttttagtcccaggtgaaaaaaccggga

SEQ ID NO: 29530 - DNA, 718 bp, Oryza sativa
  unsure (1)..(718): unsure at all n locations
ttattttaggatctccattttcttcgattaattcgaaagatgcttctattttttttaagcacgtataaactgttaattcaggttcaatgctacgaaatgcactagttataacctgtattgaaggaaagatcttctgatactctttccagagatcttcaagtctggccatggaaattgacttggctgcatattctaggtcagtgtttatgatagtttctctattctctctgaatgcggaaaaaaaagcttcattcaacaatgatagtaaatccctgggccggtaaagggtaaattgcaaacatcgcttaaaaccattcctccctttaagatcatccgctgtgcatctatcccaaactcgttgatctttctcaatatctagcttaaatgctactttcattcttttagctgacagcattaggagttgtgcccagtcccaatgcaaccttatgacttgaccctctatatttctcgagtaatcaggatcttcctttgatagcgacctaaatatattaatccttaaaaaaattattggacgaatgcattttgctttttgatttaattcaatagatgcatatgctagacctgcaatgattccaattcctatattatccggttcatacgcctcatctaagctatccattaatatgacaacttttctgtctgagcgttcaagaagtgatactattatattntctatttctgagatattcaaattgaa

SEQ ID NO: 29531 - DNA, 725 bp, Oryza sativa
  unsure (1)..(725): unsure at all n locations
tccaaatcaaatacggacaagcagtgtctgttataccaaaaattcgatttaattaacacatttacaagcnctgtttttatgtgtgcaatattaaataatatttcgacggtttcaaaaattgttaatgaatacctgtcaggtaggaggcctgatatgcctgtcgcttttttaacctctgaccaaaacaagaattcgggttgttatgctgcagaacctaatgacgtgcacctggcgcgctattttcatcttgatgaacgggatctggccttcattaaccaacgacggggcaaacataataggttgggcattgcgcttcagctcaccccagcccgttttctgggaacatttctgacggatttaactcaggttctgcttggtgttcaacattttgtcgcggtacagcttaatatccaccgtccagaagttctctcccgctatgctgaacgggacactacccttagagaacatactgcattaattaaggaatattacggctatcatgaatttggtgattttccatggtctttccgcctgaagcgtctgctatatacccgggcgtggctcagtaatgagcgaccgggtctgatgtttgattttgccactgcatggttgcttcaaaataaggtattactgcccggagcaaccacactagtacgtctcatcagtgaaattcgtgaaagggcaagggtaccgagctcgaattcgcctatatagagcgaaccact

SEQ ID NO: 29532 - DNA, 5778 bp, Oryza sativa
gaaatttgggctaaatttctgggcgtgacacccaggccgctgtgtttcgcatcaacacgctccggggcggcgaggtgcacagcctcgccctcccgtcgagcacacatacgctctgcagagtttggttcgccaccggtttgtaacatcttggtatcacgagaccatgatcatgttcgccgctgccgcggcgccatgtccactagctctaacactaccggcgattggaagaagggcctcgatgcggtgattgagcgcctggacgccatctgcggtcagatttctgacgtcgacaaccaacagcaatcgcaccacgtcgcaatccaacatctggaacatgctcaccgcgatgctgatggcgatcgtggcgatgatggctgtcattctaattgtgcaccccgctaccacaagctcgattttcccattttcccaaattcaatggccaaggtgaacccctccttttcttaactgttgtgagcagtttttccgtggtcaacggacaccaaaggaggttgtgagcagtttttccgtggtcaacggacaccaaaggaggggatggtttgactcgcgttgtaccatctgcttgacgtctcgagtgcgaccatggtactgcttcatggcaccgcttctctaacaaacaatcaagcaaaatatagaccaacccaattgtacagtggtttttggagaccattatagtcatccatccgaagaacgggatcataaaaccatcgaagtatcaccagcgaagcaatggcccaatgttgtaggatctccggatctcccattatatttgagagatgaagtgaatgattcaaatcatcaaacaaatataatgaaatatcttacgcctcgagagaagaatattagagacattgctggacctttagcctaccagtcaacttcagcctgagatgtacccgtcaaaccactcgaaagtggcgaccagatgtgttacatattcaggagacttgacaaaaatagctaaagatttacaacatctcaaatattcttaactcgtactcatgtgaatctagttcccaggatgtgcactagattcacacttttatcttaagcatggaaatcatagcaaaatacacttaagacgaaaatgatctaaatcacaactatttcatagttacataggccgactagccaatgatctaaatcacaactatttcatagttacataggccgactagccgaatatagtttatagaacaacggaagcttgactacccaatcctcaagcacaccgactaggggtttaccccattaagttcaagtcctagaagaagcagacgaaacccgcatcactcaaagactaagtctaaaacctgcaagcaaatagttaatccaatagcaagagccagtacattattagaaataatgtactggcaagcaccaagacaagcctaacaccctacttgcaaggcatataatcaaagaaggcataatatggttccttttagcataaagcaagttttatttgcataaaatacattcaaatcatatttgcgaataaatgaggaatttgacaaacaaaatgttgaaaaacttgaattttaagtttgggcctcatgtggtatacatatgttgactagttgtataccgatagggggagagtgtgcccagactgatctaaggactatactcaatgtctgttcattatgtttaccgtacatccacatgtgttattatggggtgaccttggcctactaagttaagtgctggtctaaccttgcattcgggaggccgttgtagcattcgggaggccgttgtagtagcgatagtgcctacgagtgaactgtagggctatttgtgtttatgtgtgtattgcaaaggagatgactgtaccaatccgctttttatgtgtatgatgtttatgaggggacgactgtaacgttccgcctcacttttatttatggtttggtagggaacgactgtactgttccgcgtgaggggacgactgtaatgttccgcctcacgtacaacgttgagtgccacataggaagcgattgtaccggcttgcctatggcgttatattggtaaagaccccccaatataatgacattaagattctagaattagtgtggaacaacactcattgtgctcatgcaaggattagacaagacttaatgtaaaagcctcgttgtgacctctagactcgcttaatgtgtagagtgtggtggtaccgacgggtatcggacaaactagagcgattcacattatgtgggtaaagctgtacaagctcagcagagtctaaaaactaatcgattagccgtgctcacggttatgagcggtatgtggatatgtgttgagtatagacttatgtttaatcttctaaatgctgaaatttaacttcaaaatgtgatgagatttaagaatgatctccttgctactatggatggcaatgaggtgcatatttatatatgattaatgcctactttgatggccatatgctttgtttgtcaaattcctcatttattcatttctgtccagaacttgaataaaatcattttttcaagttaataagagcccaaatgacaagtactacacatactaagcatggctaagcattatagcaatctagtgacatctaaactcatatataaagtggcatagtcatattgttcctaaggttaggaatgtgggatatggatatatgtggggttagggtgataatgcaagtaataggagtttgtctaacaagtttaacaaaattttaatttattagtgtccaatcgacatgcaagatttgcaaatattttcaataaccttcaaaacataggttcaaagtgatcaaagagagggaggtgggacttgccttgcaactggaaaatgtcagcacctaattcacttcttcaccgtttaagcaatcatctatacaaagtacacgttatgcaattaaacaccgaaatatgcgaaaaatccagaatgctctaaaatgcttgatttgtgcataatggataggtactagtataatatgaatttaggtgaaagaatttctattttatctctttttatttgagagttatgaattttataagtttgctcggtatagggtagtatttacttaggtactattgtgaaatgctgttgtaaggtgattcttattaagtttatgtttgctgaggtgaagatatgtgttttctaagactaacaaatttggtttcacaatttctagagttaacatgaattctttatgtattttacaagttataacgtgttctaggcatatagtctctatgtgtacatggttttggagatttaggtccagaacttgctctaacttgctagtgatgtataaaatgagtattttagttagctaatctaatcttagttcataattttagagtttatattattttactacatattttataaatagggatggtctatgttagttacttaacctaccaacctagaaattgttatgagttaagtttgctaagtctttgggaattaaggttggaactatgacctctctggtctaacaagttttatttttggtttattcatagctagagttcatcttaaatacttctacacatatattttgcttaaccaatactaggtgattaactcctagggtatctaattaaagattagagctataacctgtacaaaaagtgccatattttatttactatgttgaagcttaccattttctggttctatagaaacttggttcactctatttggactaaagatgaattttctacaaattttacaaattaaaggctgctcaatgttggttattccttacataaatatttgaggcttttattatacagtaagtatatgattttattttacaacttggaagtatatgttttgatgactctatagaacttgggtttactcaaaaaggatctaagatgaattttatataaacttctaaagttcaacttatctaaaactattcattttaaagataatagttttagaggcattaggtacaaagtaagtatattattttatttcactttacagtagaaaacaaattggtgattctgtggaatgtgaatttaccctaaaatgagttgagatgaattttatatgcattttataagtttgtgcatgctttatgtatattttttctcaaataaattttagaggtgaaatttgtactgcaagtgtaagtttttatttcataacattaaatttcatccttatatgagttcacagaaactttaatcatctcaaaatgagttatatttgattttatatggatttttacaagttttaagtacttttcttatataatctcagattttgtttctaggggtccgctgtcagtcatacggacaatatgcaaaaaggcccttgagatttctagaaaccaacccgtagtcctaggcccatatgtcagtgtttagtatgtttatttaaatttatttatttaaacgttatatttaaataaataaattctcatgaacgttatatttatttaaattctcaaaacgaagtccctgcgagaacagagcgccatggccgagctcgatctcgagctcgccggcggcaaacgatgactcgtttgggggtacgaccaaaataaaaatgaagatcatgttattgtgattccattcctatacttttctcggttagtggacatcggagtaacgccggcggcgagtccgagcggaggatgttttggcatgggtaggcatgttgtgccataggcgcgaatcgactaagggagtgcatgcatgtgcttttctaaggagtccagtgtgctcaccgagatgtaaaacaaggctggcgaagctaggttgacgacggcggctcgtgtaacggctcggcggcggcaagaacctccggggtgaacggcgacggctcaatcggctccaagaactatcatgcatgtgtgtccatgaggttagtgaggccagagagatggtgtgtgcgcgagtaatctaataatggctcaccggaggaggcggaatcgacaatggcgacggcgaccggaggtgaagaagacggtggccgatctccgcacttgctgcgccattgcctgggattcttgaagggttttgaggaggacttcaaggagaatatgttggcgcgacggctcggcttggcttggtctacagcggtcggaacgacgacgagaacccgacggcggcactcggtgcgcgctccggagcaacgatggtgaggtccgcgttcccgacgatccgctgcaccaaatgggatgaaacttagaggaatgaagccggcatcctgagtagacaagggaacgcatgaagggaggagatgaccgcggctcgacgacgattgctgccgtccttcttcttcgcggccggttacgagattgagagcgccggaggagcagagagccttctccctcggcttcttcggtttgagagtgaggagtagtgatgggtgaagcggctgggagggaagagatcaagagatgttgggtttggagcggcgacacgtctcggccacgcgtcgacgcgccccagagctcggtcggctctctctctctctctcgttctctctttttctctcagtctttagatcggtgggaaggttctgcacagagttggagctagcttgtgacaccgtcaggtgggcccagggcgaagtacactaggctggagtgtggggatgggtagaaaactgtgtgaaagagatttttggacgaattttcagattattttctcttccctaacttgttaattcatagattaattcgtgttgcatatgaggtcgtgtggattttattggaggtaaatgaatgtacctagttaacgttttctactcaaaaattatgga

SEQ ID NO: 29533 - DNA, 2704 bp, Oryza sativa
agttgcatgttttaagtagagcctacatgaattttcccatgattttatcttgcacaaattattttagataattagcaagacttttctttatataggtttccaatttataaatggatctacatagttgtaagaaatttatttagactactcttgacctgaggtggtatcatttgacttcattttcatgtctttataattattgctcaagtgtggttataggtttgcttagtgaatctttatcttttatttatgctcatgggtcctaatatgcaatgccaaccaaaaatccaaatgcataaagaagactcaagttaaaatatgttttatgcaagtatgcatgcttacacttgtgtttgcatctatgctataggttaaagatgaaaaagtttgttctcaaattttattcatgcaagagttagatcaaagtttacctaggtttaaaatggaaatttttggctcccaaaaataaaaaacttaacttccaactattttgacaggaaatttttaaggtctaaaatttgggtatgttacacccaaacccaaaccagatttgctcctccgctccaccatccatcggcgcaaccacacgaccctcacaatcccttcactagtgccagatggaccaccggtgaagcaaagagatagaattggaggactgttattacaaagaacgccatcattttcacccatgcgacgaagctaggtgaaacgaagcccatagccaatcacaccccataaaatagaccaccgagacaagatggatagggaccaacactagaagatccaccattgtggcatcgccaccgccattgacgtcgatgaggcaaaacaaaaaattaaaactttatttagagaaaaatctaaccaaactactagatctattggcagggtgaatccccttcctctctttaccagcagaggatggggaaccagagggtggcattgtgaacaaccccctatcctttagatttgcatagtcaagggcttataagaaaagtaaggaaggaggcatggagatgagaaggctgactgtcggagggtgaactccgcaagcgggggacagtgaggccccctttgttggtttggccggggacagcgggtgagattcgaggactcggtgagaagtgtggtgtagagggtgttgggcccctcaagaacaatgagataaaggggtttatacaggtttgggccgttgagaagcataatatcctactcctgtgcttagctgatcgtgtgaagatttacaagatctccctgttggagtagaaggtgttgatgatgaggggcatgaaaactgatctagagaaaaaaaaaagggctcatcccccctccccctaagtaggcctggacctccttttatatctcaaggggttaccacatgggtccaccgagtctatctagggaggataatcacattaaatgcatgtcttgtttcttgccttagaagcctctagtacgcccgctatggcgtgggccctatcaaatctatccggctgacacgggggacacgcatgtcattcgtcatttaatgagtgaagacttttgggttctcactcgcgtcgggaaacggaaaccctgccctgaccgggttaaacaaaccacctccggctggttgtgatgagaggctaaggacatgacaggggatgtgacatgcaaccagtgcacaggcgcactaccctggacacatcggtcattcgactggtcacagactggtcacggtccggtcaggcgcaccacgtgctgtatttaatacggtgtggtgcgctcgctcacactgccttaaatgcggttaggtgggccgctggggtgcccacctaaccgagcacacgcgacaccgcgcccgggggtttcagggtgttaacggtgaaatttggcaagcccctaagcaaattaccacatcgctaatagttggattcctgctatattcggttaaggaaattaatttattaaagaaagcttatccagaagtgaccgaggtcaagaagaatgcggcatggcaagttatctattaattaggaatagtttgttagtgtcctataaggactttatgttttccttttatctttagaaaagttttttttttcttttcctacaagaactagtatctacccatgggtataaatatgtacacccgggtcactgtaatatatctctcgatcaatactgctatcggcgcatcgccaccctctttcctgaggtttttacttatcagccggcggaatttggcacctgacgcggggctgcattggttcagttcaatctctggcgaaggggtaagtcctacgttccactggccctggcaattatattggcttcgtcggcgtcgttcaaggctgcatcagtatattcgacctcttaaattgctctagttcggttggtatttttgcctaccaatttatcatatggctatgttaatttaatcttagcatatcaatttagctctatcggctgcttctcgctttagggtttctgccggtatcggctaaatcgtcttgctagattagattgacttagatatctaccaccccgaaaatcagttaagggtttgattgtctagatattatgtttcttttcatacttagtgctgcatcaattaagtttgatctactaagtcatgtttagaaccataatctctagcttgtttcttgattgctaataagggtttcatcggggtttcagctgatgagttatctggacattgcat

SEQ ID NO: 29534 - DNA, 3993 bp, Oryza sativa
actatagggcgaattcgagctcggtaccctatattcgacctcttaaattgctctagttcggttggtatttttgcctaccaatttatcatatggctatgttaatttaatcttagcatatcaatttagctctatcggctgcttctcgctttagggtttctgccggtatcggctaaatcgtcttgctagattagattgacttagatatctaccaccccgaaaatcagttaagggtttgattgtctagatattatgtttcttttcatacttagtgctgcatcaattaagtttgatctactaagtcatgtttagaaccataatctctagcttgtttcttgattgctaataagggtttcatcggggtttcagctgatgagttatctggacattgcatcggcttacaacgattgcatacataatggatttagccgatcgcaacaaagattttactgtttatctaatcgtttggattttatggcatcggaccttcagccgatgtatgctttaaccttcggatcagtgtttattctatcatgtcattgttagccgattggtttctactggattatattattgttatgttgttacatcatcattagccgattgcctttatattgttatctacatcaaacatataaccgatagctcaaaactctatcgctatcagctggtatcggcatcagctggaattaatctatcggcttgtcagtcgattggttcattgatctgctatttgtatatcttgtcagttgtaagatcaaactgactggcacgcctgcatcttatcaagatttggacctgcactggaactaagcagatctcctaggccagtgtgtgtttttcgcgtaaacaggggggtcgggccacatggctaccgggggcagcctcctccctatggtcctgatacccccgggcccatatcaccaacactgaccactacactacatggagagatttctatgccaaatcatgagcgatagtgaagccgcctataggcgaagggacgaaagcccgttagacctaatgggaaaaagtatgaaaaaaaaaaagtatgttaaggttatagactaacttatacatctacaaagggaaaggcgtcgtcacgtcagctatggatatagactaggctcaggaacggagtcttaaagtatttactgagagtatactaaggaagaagtcagtggaagtgagctcgtaactaagacttccataatagaaggcaaagaagtcgacgaacgaagcagcttttctaataacccagttgaataggagggtgaaggctctcagatttcctgttgtctgtaagagtttttaaccctaccaatattttggcagcgataagatttatcaggattgtttggcttggcgttaaatttttgctagtgctcttgtttatgtttcttaccaatacttttgcaataccatttcttctctagcaaacggaatgccatccaattctattggcattgccaatttttttggcatggattcaaatcaaacaggttcgaatcttcggctattgttccgagcgtggcatccaacacggctgccgtctcctctacccgatgaagacgagaacatcaacattggggtttcgtggtacaagtcaaacgcgtccagtagaactggccaactgggtctgtttagaaacattttgacaaaacaaccaaaatttataacttctatactactccctccatctacttttgactgtcatatttcatattggcacacagaccaataataagcaattctacttatcatccatttaaacaagttactagacattcctcgtaaacaagcaattcattaatatttacatttcttgatacccatgtaaccaatcttgtgaggaagaatagagagtcatgcattaaatccgaaaaaatcattaagatgataagttgttgaattgaaatatgcctatcaaaaatttttcagatttagaaatatgactatcaaaagtagatagaggaagtactatacataacagtcagaaaaccaaagctgactaacaaaagcgaccaaaatacctcgttattaattctaaaaccaacttataaaaatcaaaatagctaaaatcaaacagtgaaccttaaccaaataccctcagggaaattctgacgacgatgacatcatagcaactcagtcaaatggtaccatagcaattaagcatttgttatggtaatgacaaagataaatctcgaataaacaattgttactaatatagtactaaatacgatgagcattgcgaagacattgatggtggaaaggaatttcgttctacacataactattatccctatggtcagtttctcccgcaagggaaataacctgtaccaagcacctggcaaactaaagggtaccctaaaacctagagttaaggcaataatccctgttctccccagctgatcacggaagaacagatagccaagcatctgcttgtattacttcatccatccactggtttaaactacatcctgaaatccatgagacagactgtgttgttcgagaaacatgctgcaatcttgctgccttctttattccagcacacttcaaaaatgccaccactccctctgtatgtcttcaagatcctcccttctttaacggaccatatgtgtaggcattgatcaagggaaccacttgctaagtactcaccaccagggctaaatgcgaccgaatacacaggttgcctgcaatcacgaataagttgagttcagccattgcaagcaaccaaaagaaagaactccatccgtttcttttataagtcaacccatctttcccttgatttaatactcaaaatatgccttgtattttgaaaaggtgtattttttttctcctggtatcaaatacctgtggccagccaagctgtacagaaggcgtccttgctcaacttcccatagcttgatagtcgaatcaaaagaggcactgcacatgaaacaaaatagtcaatcgttgccaaaaacatccgctggaaaaggtgaagctaccagaattcctaagaagcaagaatcatactccaggtaactaagcaaccctacttacatctccaataactatgtatatgaggaaccagcaatggtgtcagaaaataatgaaaatggcaaattggctgaaatttggtgatctactaggtcacaaacaaggggaatcagcgtccaaccatgtactgcttaggtaggtagcacaagcggctggttgggccatgtaagcgatataaggttggtggcagcacaaacaatggttactgctttagaacctttcaaaattagatgccgacttactaatacattgatgtgcaacagagatccctgggttccagcatatccacattaaaaaaatgagctatgttcatgagatattttaaacaaaaaagggaggatgccaagtataccatgcacaggaagcacaatagtaggttgcagtgaacccaacattgagaatcgactaaaactatcttagaagaatgaattcacagaaccataaattcacagaaccataaatacacagaagtcactcataaatcatgatatccgagataaacaaacttgtgagtctgattagtcatcaacaacatcttccatatttagacatgttacaaaggcgattatgatcctactaagaatttgttgcaggtaggcttgtgtcttctttttgacaactattcgaatttcagaaagccatacataagtcagaacaactatattttcttgaatatatagtttttgcagtacaagtgtaatttaatgtaatttactccattttacatgtaggacagtgggaactaaaatgataaaatttgtactgctcttgctaaaaacataaaacaatatgcactttacttcatttgacaaatttcaaaggacataaaagctagagggtgagctatcaattatcaaccatcagatacccaatatgaatctaggtatagcttctagtatttaattataattaaaaatatagcttctaggtatttaattatttgcacaaattatt

SEQ ID NO: 29535 - DNA, 11133 bp, Oryza sativa
atctccaaggaagaagcatccatgatattatttcaatgtccagcagattgccaaatgtctcagtgggaggaaagaaccccatgtcctactcaaattggatatctcaaaggcttttgattcagtttcttggtcttttcatgtggaggtcatgcagcagctgggttttcgtcattgttgttgtaaccttttgtgtttggtcctctctacttctactcgaatactggttaatggtgaagccagggaggtaatctttcatcgtcatatggtctccgacaaggtgaccccctctcccccatgttatacatattggtcatggacgttctagatttattggtgaattgtgcgtcgctgcccaacatttttgctccttctatgaggatgatgcggttatgttcctaatgccggtgaatgttatctctattatcaagcaattgttgaaggtctttggtcatgcatctaggcttgtgaccaacttggaaaagagctcagtgacacctattcagtgccaagaggatgatttggagttcatctctagtatgctttcatgtgagtgaggattttccttgtacctctcttggtctcccgctcaatattcgaaagcctactaaaaactaagttgtgagctctagtggataaggtggctgacaatctcacaggttggaaagcttctctaatgaatcacgctgagcatctcatcatagtaagagtggttttgctgcccatcccaattcatcttatgattgcaattgatacaccaaaatgggtagtttgtcacaagctccaggcaattatagaataggatatgaatgagatgtaggcggccagggcttagggagcttggtagatcgcgacccgtggcgctgacaaatgcaaccggaaggagatgagaaaccaaagaatagtagatgagattgatagattaattcagcttgctttattccttgaatctatgcccttataagagcttacaattgtaactaatttagctgaagaaaagggataatatttgctaacaaacttgagagtaaatcctaactaattgagatgaagccgaagacctgcagcaatccgggatgcgtagctcaactcatgcctgccggcttcacgctcccatcgcttttgcgcgtttgccccttcggtggaacacaattccgaccctaacatctctcccatccttcagaaacagctcatcctcgagccagaatgcagggaaacggtgacgaaaatccgattcaatttcccaagttgcatctgccggtgccttaccttcccactgaacaagggtttcaggaacaccgcaagccaaacgaccctatattgccttggccggaataggaagaacacaaccatgagccatattatgtaccatggtatgccttgagggatagcggtagcggtagggacgaacggcgactgatgtggccccaggcttgaggtggatgcggtagtcgatagcccgtgccgacagcaagccttggggttcggcgaagaggtcctctaattccgccaggagatgctgcaaaatattgtcgatgtcgatcggccactcatcacatcgggccctgatcagcgaggctgtagaacatgacctcgcgtgtgctgcgccatatggccatgcgcatgttcttgaaatcccacagtattggccccaacgtttgcaaccattgcatgcctaggaatgatgtcgacagcacacaagtcaagggcgaagcagtcgaccgagaaggcctcgccatcgatgttgagcgcgaggttgcgacacaggcccgggctgacaaggcgatcaccattggccatgacaaagcgaagtccctagcacgccggctcaagatggaggaggtgatgcaccacctgtgcgtcgagccggagtcgacgagtgccacaagcccacaacacgtatgtcggctattgtaaccggaagcctcatggtgctagctccgtcaatgcctgatagcgtgttcacttgtggcaccgcatcgtcgttggctccgtcatcatccgtggagtcatcatactcaatgtagaacatccgtgcacacttgtgtccgcatacaaacttctcgtcgcaatggtaatagagcccttggagacaacgttccaccaactctgccggagaaaggcgacgaaattgttgttgcggcgcgcatcggctagggtttcggctggctgagccctggttgctggtgcgggcacaggtgacgctgctagcgccacgtcgcagaagtagggctgagctgaggaccttgtgcctgcccatcgtgcttgaccaccttgcactcatgcacgagcaagactcatggcctcctgaagatcgggctttttgagctcgtcgtcgacggcgaggtcgtcgtggagcccggccgtggagaacttaacctgctagctatcggtaagtggttcagtgatgcggctggcaagcgtgagaaatttggattggtacaccgccaccgtggaggtttgcaacaaacgcctgatctcaccgagaggattattgcgtatgggaggaccgaattgaccatgacagagctccttgaacgtgtcccgatccggcgggtccctactgctgctcgtagtggaagtaccagtcctggggcctccccgaagaaatgggtaagttgcccaggcagaaccccgggcccctggtgttcggttcttttggccctggaaagaaactggctccgccaatgggtctttcaagggagttcgttccctggcccatcaaatttgggaaattcaagtttatagaaacgaggaacgttgcccccggcatcaccgtgttggagtcctgcagtgcgccagagctcaatggttgcgggtgtgggttgacgggtgggaagccagggcgcgttgttggacgtagatgtagacgacgcaacctggaactgctcaagtgcagtgatgcgagaagtcgcaacggcgaccgatcgactgagatcaaccatatcaatcttggacgcgagcagcgaaatgctggcgaggacatccaccattgtcctgcagcttgtcgaggggaccagggttccagaagcggttgtttggcagtggaggtttcttccatggtctgatacaaagttgtcacgagctcctggcaatgatcgaataggatatgaatgagatgtaggcagccgacgcttagggagcttggtagatcggcgacccagggcgctgatgaatgcaatcggaaggagacgaggaaatggaaaatagtagatgagattaattcggcttgctttattccttgagtctgcccttacaagaacaaacatttgtaactaatttagctgaagaaaatggataatatttgctaaataacttgagagtgaatcctaactaattgagatgaagctaaagtcctgtagcaatctggcacgcgcaactcgcgcccactggctttgcgttcccatcgccttcgcgcgcttgtgttccccgtcgttccgcatccttcccccttcggtggaacacaattccaaccctaacagtaatcaaggctattgacaagatacgaagaggcctttctttgggcaggtcatgaaaaggctaacggtggcaaattgtttggttgcttgggagcaggtttgttggtcccttatgtacggtggtttgagaatccacaatttggaatataagagttgagctatgcgcatttgatggctttggttggaaaaaactggcaatgcccatgcttgggaagggttacctctacaagttccacataatgctcatactctttttaatatggccgttggatccatagttagaaatgggtagtgtattttgttttggtcaggtggatggttgcaaaacaaaaccgtggtggagataagctcttaatctgatcaagttgatgcctaaaaggattatcgaacgtcgcactatgacacaagccttagaaaaccaaagatgggttgctgatatcaaaggagcactcactgtccaagttattatagagtatgtgcgaatttgggacttagtggccagtgtggcccttcagaacggtgtaccagatcagcaccgttggaagctcccaaagtctgagtcgcatacctccaaatcagtctacgagtcattttttgttggcacaatcggattcgccccttggaaagaaacttggaagagctgggcatccctaaggtgcaagttctttgtgtgtggccataattaataacagcatttggatcactgatcgccttgccaagcgagggccgccacatctcatcgcttgtccgctttttgaccaggctgggggatacatcacctcctagttacttgtgtcttttcccaacaagtatatggtctcttattctcaaaggttagggctgatatccatctctccaaatcaggacaccaagcatttctccaggtggtggtccaaggctgtaagaggcgtcgataaggattccaagaaagggctcaactcgcttatcatgcttgcggcatgggagatttagaagtataggaatgaccacatatttaatggcgtcaatcctagtgtattgactgtcatccaaattgtggttaatgaatgtggtctttggtgcatggctgcagcttctaagctcagcgaattccttagtaggtcggtaacctcgcttaggtaaggtctttttgagtcgggttttcttgtaaatgtaagacttgttttggtgaggggtgtttttgcttcttccgtctcttgatgaaacgatatgcagatctcatgtgtatttaggaaaaaaaaaacttacttacagaaaagcgtagtaccatgcaaggtatagagcaaagtgttttagcaaccaactcgaaacaaagtcacttccattccacaagcaaaactctacccttgattggttgccacatcgcttatgtgatgttctggcttatgcagacaaacaattgatgtgatcacgaaaatgaaaaataacacatatctaactgtgattgacatttaagggtaaaatcgataattttgcagtcagaggtttatttccaaactgtggtaacaaggtttttcatgtatgcatttggggcaactagacttacttacgccaccaagactcaaaataaaatatgactgtactactgatgggatggggttagtgtaaaaagtcatgactgatacagtctacagaatcataacactgtactaggacaaagaaactactccctccgttccaaaatattgcaaccttggactgtataagacaacctagtacaacgaatctggacagggctgtccagacgtctaggttatgtctcatccagtccaaggtatattttgggatggaggtagtaaatttactaagaaaaacatctcaagatattatatcaactcaattgcatatcgagcaggtacaaaatgtaagactatatacagtacaaaagtacacagatgtcaatatattacaacgaagaaagtctatttagccctcgaaagtgggggtttgtctaataaacaagtatgaaactgggcatcagaccccctaaagtatgggggaccttcgtatatttataaatggaagattgaatgacaaagatgaaactattgttgtatattaattaccttagcagtccaatcatctgaacatgaagccagcagagaaccagttggatcccacttgatagcattaacttcactctggaaacaagcttaattgtcacaatcagaagatcacattggttgccaccttttccaatttcgcttacattctttttagaaaatgcaggagagctgtgcttcatttcattaaggaaaaaaaaatcacacatacaaccaagggctcacgagcccttcgcccaaaacacatccacaaatagcatcacacaaggcaacccatgaccaaaaaccaccctacgacagcctagtgcccttgagttattgacctacaaaggaaaacttggagcacaagagctccagccgggcaccaaagcctagcttctgttgacactgcccgcagaatctccatgatgtttggatgttacattgaaacacatgatatttgcatgggcaaacagaaagcatgactcaatgtttgaacacaaataatatcacagcattcaactgaacagtgttcacattcattcaatacatcctgcagcatcaacaattttgcagccaaccaacgtatgactggataatggaagacagtcaactgaatcaaatagaataaatagaaggaactagatagactgaatgcaaggaacttcttgtttgctaactctataataaatttgagttgttgggctaattgggcccagctccaactagagctaaagatctcagccatgaaaagtacagtttactaccttctctctactaatggctggttgatctgatgtgtattatacttagaacttctatgcaagaggatttgttttgtatttttaaaatctagaatcttttatttctgtcaagtgttaactccacttctccccatatccccatctttaacttgcttctgattccagaaatcacctctaaactccaaaataaagggaattcaatgcattttgaaggacagcacatatcgaaaacatgtactgcttggagaacaccaacctgatgaccactgaaggatttaactgggcgctgatccccaatcttgcaaacatagatcatattatcagttgagcatgttgcaaaagaattattgtttctccagtcaacatccagtgttggagctgtatgaaaaatagaggcagtttacagtttattgtgctggatagaaatgcatccaatgcaataaagataattataatgtaaaaatcagcactgttgtggcatgcaagcatacctgaatgaaattcaaattgctgcttacactcccatgtctttgtatcccacacaatagcagttttatcaacacttccacttaggaggaaatctcctttcttattccatttcaaggaaaatataggtcccttgtgtttgaacaaagtctgcttcaactctcctgataaattcaatatcatcagggctgatttttgggaaaagtttaaatgcataataagtcgttctaagctatgcagtacctcccaatttgcaaatctaatacagttaccatgcaaaactatgaactaatatacaaagccacaaaaaaaatgcatagcaagatagtaatttccttaccatcgctattccatattcttgcctgcccatcataggaaccagtagccaatagagttccttccccctagaagagacaacaggcaaaacaaatccaaagatgaacatgtcaaagtggaagaacatagatgcaaaaacaagtattttgcgaaatgtaaaataaacaagtgggctggtacagacgaccgtcaatagcaagcctattataaaactcacattccagtcaagtgtggtgacatccttgctcttctcattagttcgacccttaaaatgtttcaaaacatgaacacctggaggagatgattgtgtgatggaaccacatggtccatctggaattgtccagattctagctgtcgagtctcctgacctagcagcatgtacaaaatagtaatgtgagtcatcaaagaggatagataaggacagaaagcattggtgttaagcacgtatataaatataatttgcaacaatttatagaagggatgcaataggaataactgtataaagagtaaaatatgagcatgaaagttttgacaggctgacatatctctatctctagtactataaaagcgtagtttgtcctgtttgtttgtcccacgcggcgcacagcgcaccacccagacatgcatggaaactgcaccctcttggaaacattgggcttccaagaaaatccagcatgaaaaccaccccacctaaaaaacgaataccacaagaaaaacctggtggacactgcctgaaaaccatcccaccccttgagaaaaccggataccgaaagaaaaccaagcgggctgcatggacttcccctcccaaggaattgcgctgtgcaccccatgtccttgcccgcacacaccatcatggcgaattatggccctatggggctgcctcgccaacctctccctccccaaacttgaaactggaagcatgtgtcactctcagactctcctaattgcatttcttccatcatcatccctcatcatccttgcagaccaaagacatcttctggtcagtgacgaggaccaaattgtggcacagctatgcccttaaagagtgcggcagtatttttgccacgtcctacaggagaggtgctctatagagggattgtggtagttgggtccatctgtttgctcccctctgatctggtggtgtgctcatgaaatacattcccggtgtacccctcgatctccctctagcgcgattgctcaatcctccctgctagtattgtattgttatctgttatggtgaggctacttgatttggtgggttcaatgatgactgcacatactgtccagttgctgatagctatagcgctgcctgttgttgttgctccaatccaactaagagttagttgagttaaatattctcacattgtgcctagaattttcacccaacaagtgtgtaaatgttatttagaacaatattacactaatagtagaaaactcacattatgttgtcaaattaattccagtgttagattatttcctattatgttctttccaaatcaagcatctgtgcgcggggggcagacctacagtgctagaacctgggtcaaatgaccctaatgactgttgctaaaaactatggtcaaaatggctcaagtatgatcgaataatgtataatagaaaattaattttaaaagcttcaaaattgacatgatgtaaaattgtaaaaattatatttccgttgctataagtggacaatttactagtgtgaataataagagagaaaaatccaaaaattttatcttaacaagtctaagttccagccctctaggcatatctcaaaaagtattaaaatatggtgcaacacacctgacaatcgttcacatatacacagactagcagtttgatgtctatgtcaaatacaaaatgagatcataaggctacaggagcacaaacaatatcaatggaagaacacaaacatcgatgcagagataataaggactcacccagacgctagaagggaaccagctggactccatgcacaagcgaacacctaaatacaaagaaatttgaaagaagcagtaagagaacatgctttctagtactaatccatgataggtcaaatagctgtatggcagaaggctatttaaacctctgagctgtgtccttccaaaacagtcacatcagcactagaaatttcatgagcagttgtgcttacatccattggtgtgggacctgtagcaataagatttagtacaccctggcatggtagcgttaaactgatagacacaaaaatatccaaaaaatattatgaaggctccatacaagtgacaactaattccacaaggaggttgctactccaagaagcacactaattctacataaggaaattaaagcacaatatcctaaatcagttccatgaccattcatgtcatttcacttatgtaaatcaaatatcagaaatcaaacaatatattggttcatacaggaggttaaaatcatggttattatcaagcattaatgcacctaagaacacagttttagcgatttattgccatcaggaaacacaatagtaatacacactcacaaatgtaatagaaatgtatgttcgtgttactagaacatatgacacgtaccacaaggatattatggagtttttggcagggataattgatcatacaccacccataagtcacgggctctaggatatgtcactccagagaagctaattgattatttgccacctgttagataaaaatgctttaggaattgccatgttaaaattattttggttttttcgatttctatttcagtgattacatgacctagaccctactttcttttccagttttgcccatggtagcccaatggtttctccagcacgatgcatgactgaacaggagcatggatggctggatggtgagaaggaaaagtcagttggcaaggggagctaagtgatgtctctcctctcctccagcactacaccaggataaactccaccagggtggatctgttgtggaggtctatcctcaaccgccacgttaaaacagcagagcaaggacacaagtgcctgggcattgctgtgtgaaagcactgacaggaatagccatgccgcagccgtgtactgtgttctccaactcctctgcactgcgtgttgcctcccctcactgaccttgtctcccctgcagggcggtattgcatccacttccgtgtgccagtgctgctctggctccatgcgctcttgcttgcccgcctcgcctcccaagggatccatcccctcctccactcaaagctccacaccactagccatcgccaggcacaaagagaccggaggtggagaaatatgagggaaggaagaagagcaaaagggtacaagaaatgtgatctctactatcttaaaagtcgagtagttctccttccatctccttccatcccctcatccaacgcatgcggcatgtccgtatgcgaaaaataaccaccatcacttcctaattatatgggcttggcccattaacatacgggctcccagtttatccctaattatatgggggcctgacccgttacaacatacgggcatgaaactagttggtcaaaagtgggagctcatactaatcacatctgatgacgagcaaaaaaaccgattcaattctgcggagtggcatatcctggaattggaaagcttattgaattgcttccatacaatcaaatccctactgtgacaatatattggattttaactaagaaaatttataagctgaaaatgatacttagtactttgtccacatttctcaagtcgcaattgtcattctccgacttccaaaatacaccaaatgcatgttcaattgtcattctggtgtctgcattctttgcaagcacaagtgttatattaaattgagcaatctcacgcttttagatgcaataagataattctttgatggtcctgtttggtttcgggctaatattggctattacacaaagaaaaccaagtcaaaaaacttgacattaccaaaaaaaaaggtaaccagtttggtaagtatgtcttcataaatgaactggagagcttatgtggcatgttacccaaaactttcgcga

SEQ ID NO: 29536 - DNA, 2945 bp, Oryza sativa
atatattggattttaactaagaaaatttataagctgaaaatgatacttagtactttgtccacatttctcaagtcgcaattgtcattctccgacttccaaaatacaccaaatgcatgttcaattgtcattctggtgtctgcattctttgcaagcacaagtgttatattaaattgagcaatctcacgcttttagatgcaataagataattctttgatggtcctgtttggtttcgggctaatattggctattacacaaagaaaaccaagtcaaaaaacttgacattaccaaaaaaaaaggtaaccagtttggtaagtatgtcttcataaatgaactggagagctaatgtggcatgttacccaaaactttcgcgaaccaagtgaaagataaatgtggtaactcttgcataattcgtcaaatcatcatattaatttgcatgttgctttgactgtaatatttatagtaaaacatacagaaaaccgatggacataattacataaggacattttcaagcattatcttgcaaatgctctgctgatccgcaacaaatgaaaacttgtcaacattgtaaaataatcagtaattaacatatttatcgcaaagaaaagacacgcacatatcaaacaactgtcacaaaaacatttctcaagttaacaaataaagttatcaagattcaatcatctgtagactgtagctactaaagtttactcacagtatgctgaaaactgtaagatggaatcgtaagggaaatgcagcaaacagatattagttaattacctccaccagcaagagaatcttcttcagccttaaccttatcaatacgctctgtgtgcagcttttctttctctttatcttgatccctgtctctttcagctctgtctttctccttctctaactctttttcttggtcatggcgctccctctcccgttcacccccagggcgtcgttcatgctcctccatacgttccttttcttttcccttgtccttgtcacggtcactttgagtcttctcccttttccttttcttaacaatctgttgcaactcttcaacattttttgtgattatttcaagaggttcaagaagggcaaaatccttcgcaagatcttcatcattctgcaacaagataaagagcatgatgtagcatgcatcagaaaaggtaatgaacactagaagacaaacaaacttacttcatccgtatttgcttctagttctatgtattggaggcctttctgcacgatagtgataagagcaccaggtggaactagatttccatcaatcccacccttatggatccctgcttcataccctaatgtgaatgcggcatgaatgaaacctggaaaggttgagaaaccatcagcaataactgtcatagtcatatataaccaaatatatatataagtcgggtgcagcataaagtagttgcagctacatcattggacactgacacagatcacatgtcagttatgtatcaggaaaaagtcagctaaaatagatgatgttttttttttccgatacagctttggaacttcattgacaagcatgcaaaaatttatcgcacatgcaacacaaccctgccacttcaacaaaaagtgaaaagcctatcactagaaacagacaactaaagtaaatgatattattctttgatacagctttggaacttcattggacgcatgcaaaaatttatcacatccacaacacaaccctgccacgtcaacaaaagaatgatataagcttatcgctagagtgctagaccagcctccctccataggttttctcctcgtcatccagaccatgcacctctctggacatgcccccatgtcaagctcagttaagccatgtcaagctcactggtgggttcttattagttcctttcatcagttccttctgaattattaagttcttctctaagttaggttacatggagcaaaactggatgagttttggatttgttcttcttacttccactttcatattttagaaaatagaaacgaataatacaagtattccaagaaggagcacatactatcatcaaggcttcctatgttgaattgttgaaaaagacaaatactgaaatgggaaataatgtgcatagagagacatatcgtcatgttgtcttgtttgcaaaaatggcaatccctctcttggagtctatgtatcgtattcatgcccgtggaaccatatatatcaactgtgggtaacagataaatgagagaatatggcataatattcttcttgactcgttaggcacttctagaacaaaaaggcaccatagtagcacgaactccctatagcttggttctgaactctgagttctgagccatattttactctctgcaattgaggacagttagaaatatggaagccagcagtgctacagtgatcagtgaacaggcaccaaacgcaattctctcccgcaaattaccagttaccactacaatttcaaccccaaaaccaacaaaaacaacaacttcccatgcaccaacggttattaaaatcctcgggtccaactaaaaggaatgaaacggaagttagtaaaagaaacagacaacatcgaaccctattatatatatgggcatgtttggattgctaccctaccagtggtagtgccaaatcttgggcaagttttattactatcaacattttgttagagatttctagggagagatttctattgatttggcaagttatggaatcaatccaaacatcacacaagtactatttagactacctgttggtagtgcaagatttggcactaaaaccaaaacagccctatgtttccctggacacatcagatcccaagattgtgccctagcagaccctattttccccagggccgcacatctccaccacaatagcaccgaaccacactagagctactaaacatccagcagcggtaatctccaacccacacgaaaatctctccaacgtaaataaacacaaacaaagg

SEQ ID NO: 29537 - DNA, 1224 bp, Oryza sativa
ggcctgatcaacttcgtcttcaattatctcttcatctaaggcttgttcaatagatggatccaaggtgggcagatcatcggccggcttgtcagtcggtttggttttcttgaacttggcctttttctttggagccaagattgaagtgctcacagccgaggatctggttttcctttttgggcctgcatcggctggttctctagttaggccgtgaaggagagttgaggtcttgggggcatagtagccaataacagggggagatagcccacctccatttggaattaagcccgaagcatactcaatgttcttgccactattgctttggtgaggaggggaggactctgttgtctgcaaagcaggagcaaaagattggttaagtaataaatcgattaattgactacgcaatttgatagtaacaatgtttacctagggtatgacgtcgggggacagatctgtcatatacatcgtggctgattgatgaaacagatgtagcttctattcaccccaccatctgtcgaagtttttgcttctgaatccagccaactcaatattttcaatgctgccaagaggaggtcccgatagattgagtagccgatccatcattagagcagacgtgatttgtcctcggcactgaatcttgtcggcaaaaaataagccgattgggagttggcctaatccaagttgcctagccgagctcattgggtgataaaactcgtaggagacttggatgtttctcccttggtgaatgccgacaggaaggatgcaagggctgattgcggctataagaacttctctggatttctggaatttctcatggttaatatcttcgaatctaaaatctgatggaagttcgaggtctgctgattcttcataagggaaccagatccgggtatctttcttaaagccctcatagaagctgcagaaccagtccttaagcagctcagccgataactttgctccagcatcggttggtgtggatgcatattccccatatcatgtgcacctgcgatgagtacattcttctccgtcgtcacccacaatcggctctggcagtgggaactcagcttctgttacagaaggccgattgacaaccttcataaccatcaggtttaaccaagtttgcagtagccaccagggtccacctgctccaactgccgagccgacggctattctagccgatgtgttgttcaacatctggtacagatagccgagaaggattttgcccaa

SEQ ID NO: 29538 - DNA, 4431 bp, Oryza sativa
taacggtcggaaaacggtaaagtgcgaaacttgctcggagtcgatttacagcaaatccgaaacattaccaaatattccggacttggggggcatgtgttaacaaccgaatttggtaacatcagcgtcgggagagaagagtagatcgaagcaaagtcggaagcggaaatcgggtttgaaagcagagcaggaatcggctaaaatccagatcggctacgataagatcggctgggtatgagtcgtgttgggtaagtcgatgtagccgattccgacaatacgacttgtacgcgacatcgggttcaatttaatgtacttcaagatgattgccacgcatggatagagtcctgggaaggcaattgtatctattaattaggatattttatgtaaattccttatagataagtgtggggcaaaagtctgccgtaatgacttatggtatcttagagtttgttagagataatggtcatgtccgctatgggcatatcttgtaatcctcgggtataaatagaccccgagccctatgtaatgtcacaccctaaaaatcctaaatatataaattgttgtttaattggaattattagaaataattttaaaagcctagaagagaagatctaattttaaataataaattccaatgtaaaagtggctagataaaattttattaaatactttacttgattttatagttcctggatttttctgggatttatttgagccaaggaagtatttttaataaatggaattgcatttcatgaataatttaaattgaaaatgttttaaaaatcctccttttggctttgggccgaaagtcggcccaaaaccctctctctctcctccccggcccaagttggcctgcagccgagacgccgctcgcgcgcgcgtcccactcgctgacaggtggggcccacctatcggactcgtcgtccacctccagccgtcgcccggccgaaccctagccaagccgcgccgccgccgcccttccaaattcgctcgtccctttctcgatccgatgaaattgtttgaggggaaatgatccccgagatctcctctactttttcccttttggaatcatcgcctaattcgcttttgaaatcgccggattcgagtttgattcggattcgttttcttcccctgaaccctaatgtttccatcgccgtcgccggccgccgtgggcctccaccgtcaccccctagcccctataaaggacccccgagctctcctctacccgccgccaccctcgcctcgccttccatggccggtagagctctagcaccgtgagctcttgcaccgctgtcgctgccgcaagtccagccgtgcgacgccgtcgctccggtcgtcatcgtcgcttgggaaggacaacgccgggttcaccaagccgtcgccgtcctcgtccacccctccgtcgtcgccgaggatcgccggaagaccgccgtcgtcgtcaagccgaccgtcgccgccgcttcttcctcgtcgccgtccgccgccgttcgtgcctcggtaaggatcgctgcatcgtccactacgcatagaggccctccgtttgcgccaccgcgccgttgttcgccggcgagcatgcgcgcccgagccgccgccggtggtgacgtcatcgccgacgtcatcgtcgtcgtttcccgtgagccgcggtagaccgattagatctcggccgtctgttttggatagggttgatcccggccgttcgtttccgtagaccgccgctgtgcacccggtccaccgtgaacccgagccactgacgcaataatccccttttccttttaaaaaattattcattattgcatcataattcaattaaaatctatataaatgatttaatccgatttaatctttaaaaattcataacttattcatcttagctcggatttagttggttcaagtctctaaatttttctaaaattgagatctacatgttaaaaatatccacatgtactttttatgcttgtttatgtgctgttttagtgtttttgctcttttctctttagattccgatgttcccggagagtccgattttgcaggagaagactttgaggaattccaaggcgagcaaggcaagtcacacagattccaaacaatcctttgagcatgttgatcccgtttaaagttattgtttctattcaactattgcatttatttttgaatgtcattgggtggaaataacctattgccttgttatagcccttttgttcttgattactctattccttaatactttgggttattataatttgactagttgagctttatatattggttcagctagatattagacataattgcttagccatgcttagaaacattagcacactattaggataacttatgattcactattatttaatgatggcttaatgatagctcacgatggttaatcgtgattggttaattaattaatttgccaactaaaacctgataatggtgggttgtgagcacatggttttgatggtcgtgctcatgaaaattaaggaccggttcacgattttcggttgtgaaacattaaccatgccaaccacaagccagcgtgagcaacggctttactttctgtatagtatggttcattgtagagcaccaggctgtgaagtggtggagataagcccacgggggtcgctggggagtccatgccttgtttataagggggtgattatgatccaggaacggtgcactgctttaaattgtattatatagagggtattgtcacaatctctattcgggtactttgtaagtatcgcgacgcttggttgacatgatgttgaggttgtgtcttgggggtacagtggtacacctctggctagagttaaaactattccaatagccgtgcccgcggttatgggcgggtctaacaatgtctttcgtgattagtctcacacttcttaccatattaaatgatgctgtttaataacttgtttaactcctggtttggaatggtatattcctggcttggagatagaactgtgcagccgaggttggttgttcagaatggttgggcctatgcaacagggtatgttgtatagcgttggattaatattgtttaatttaatactctactgttttattaaattctgaaatatttattaaatgctatttatgcaaatgagactatactatgccatcctttgttatcctatgcacttgcatatttgctgcgtggcttactgagtatgtcatatactcaccttgcaatcattcatcagaggaagagttctactgtgatgctgatggtgtggaggattaggcctagccctggtcaagctgcctgtggagtagagtcgtctgtgctgtttcttttattttccgctgcttagaactttattgtttgagaggaactatctacctctgtaatgacattatagtcgcttattaataattgtactctattatcaatttgttattgtgtgcctcggctgattcctagacgagggtttacacacatgtaagcgtttggaattttggatagaaatttcgggcgtgacatgtaatttttaatacacacgttcaatacaatctcggcgcatcgccatccttttgctttagttttattttgacgagttcttgctttcgggttgagctgcatggatttcgatcttcaacaagaggtaacattcgccgtgatggattgcgttcttaggattaatgcttccatcctcatgacactctagtcctgtttatgtaattcatcaagttatcatataccttatataatctctaacgatattgccatctaaactactatcggtcaatatctgtatgcagaaggcagccgattaggttagatctagatgttgatctagattatataagatatctaccattctatgaaacagctagcggcttgattgtctagatatggttcttcttttcatacttaatgctgcatcagttgagtttgatctattaagtcgtgtttagaatatcgatctctggcctgctttctagttgccgattagaatagcatcggggtttcagccaatcgtatctgatttagccatatttattctacatgtctcatcgatatgctaaatctgcccttaatatcaagatattgctgcatctaaatatgttagggctttgtttgatatattatacctgctttaatatcctgatatgagttagtatcggagtattagccgatacacgctagatctatctgatcggctacgctataaacatatataatcatgttattgatatatatttcgatctaagtgatttatactgtctcggcatggtgtccgatctattccaatcactcgatttaagtatataccaatataaggagtatatatcgttaacatctacagccgatcgagtagatttagtggttatttactttttcatgactgccgatcgatacacaaatgacatcggcccaaagataaatgatatgtcatcggcatctagccaatccgctatcatttatagatt

SEQ ID NO: 29539 - DNA, 10284 bp, Oryza sativa
  unsure (1)..(10284): unsure at all n locations
tgggcaaaagtctgccgcaaagacttatggtatcttagagtttgttagagataatggtcgtgtccggtatgggcaatcttgtaattctcgggtataaatagaccctgagccctatgtaaatgataacacacacgttcaatacaattttggcgcatcgccaccctttttactttagttttgtttcgacgagttcttgctttcaggttgagctgcatagatttcgatcttcaacaagaggtaaaattcgttatgacggcttgtattcataggattagtgcttccatctttatgatactctaatcttgtttatgtaattcgtcgagttatcacatatcttatataatctctagcaataccgccatctaacctactatcggctaacatctgttagcagagggcagccgattaggttagattttgacgtcgatctagattatataagatatataccactctatgagacttctagcggcttgattgtctagatattgttcttcttttcatacttaatgctgcatcagctgagtttgatctattaagtcgtgcttagaatatcaatctctagcctgccttctagttatcgattagaatagcatcggagtttcagccgatcgtatctggtttaactatattttttctatatgcttcattgacatgttaaatctgccctttatatcaagatgttgctgtatctaagtatattaggcctttgtttgatatattatatttgctttaatatcctgatatagagtagtatcggagtattagtcgatacatgctacatctatctgatcggctatgctataaatatatatagtcctgttattgatatatatttcgatctaagtgatttatactgtctcggcatgatgaccgatctatcccaatcacttgatttaagtatacatcgatataaggagtatatatcgttaatatctatagccgatcgagtagatttagtgtttatttactttttcatgactgccgatcgaaacacaaatgacatcggcccaaagataaatgatatgtcatcggcatctagccaatcggctatcatttatagatttaaccatggtttctttgcttttatttcttgttgattacaggatcaaatcaactggcatgctaatacatccgaaggcgagttttggacctgcactggagttaagcagatctcccaggccacgtgttttctgtcaacacacttttggcacgcccagtgggagttgattagaagtcagatgtcagttcttcctcatggccgagaaacaagcaccaccaccatcaagcccaggttccattaaaggcaaggcattgaagccaggattgactgacatcattgatgacaatgtcatgccaatcgatccagagaaattcacacttgagatgaagcaggagtttgaagcaatgatgcagcaagcacgggatcagtatctgagctcgtttggacatttcccaatgtcggttggagggcagtttggacatttcccatagccataactgtcatatggagcttataaaatgaggtctccatccacacttcaacacacacaactttgagctgaattacaagaggctctattgtatctcttgaacattagaaaataggtagagagtgaggggaagctttggaggactgcccgaaagtttggcgctccatccgacttctatctcaacgagtgtagctttctaggaggaattctggaggagtaccggagttgtcggcacatgtcacgcccagaaatttagcccaaatttccagactattttgtgtattaaatccttgtccaggaccagccagggtacacaaaatgacaagtaataaacagctccaaacgtaaataaagcataaaatacttatagaagaggcacttagtcctcacaccgaaacaaaagcagcagcagcggaaaaggcgatcctagcggggcttcagctccactccacaggcaaaactcaactggggtctgagccttggtcttctaacttcgtcttcagctcagaagcactacacttctgaaaagggggaataatagcaagactgagtacaaccaccgtactcagcaagccacaccaacgatgcagacgtgcaaggggatacaaggacggtttgtggctatttgcataaatgcggttgtaaatcattttattgagcaaaacagtaaaatagttgagtaattaaggtaatattaaatctccattgatcaacgctacaccacgttgaacaggcccaaacaacccacctgaactacagtgcattgggtcgatttattaggggtgagactaatcacggtgaatctggtcgatcgcccataaccgcgggcacggctattcgaatagttttactctggccagaggtgcacaactgtacccacaagacacaatccaccggcatgtcaccgtgccatcatgtgcccatgatgcacacgtcaccatgtcgagtgattgtgacaaaaccctccgcataaccctcccctaaccatccacaccacgctaaggtttcacccccacccctcaaaaggcagtgggcggtcccctcttgcgccgcggtgaatccggcagctggacaaccggacaccccggccgacccaactccatcacgcccaccctcgccaccggtgcctaggaaagggtcgagctatacttcagatcaagcagttacccactcccgcttgtggcaagcgctgtaagtcttccagggtttcccgtgaaccggtccttaattgccatgggtgcgactcacaaaaccatgcacccacagcccaccattcagtcacattttagttggataattacgaccatgaaacatggccagatgtctcgagcacgcagctcaacaagataatagaatgtctaatactgcaattatcccttcgactgagctagtggtaattaagcatggctaagcatatagttctagctaggtcatcaaagtaacacaagctaggcgatctattacccatggttgacaaatgacagatatcaagtaaacatggcacaagcgagcagataggtaaaccctgatcccttgtaattagcaaaacatgcatatttatttacaaacggtaaaacatttataaattgggaacaacatgctcaaggggaatgtgtgacttgccttgcttcttcacttggattttttgaactcttttcctcgcgaccgcgatcttccgaaacgacggattctacacgctggctcgcaaaacgaggaaaaaaactctaataaaaaccaaggaaacagtacataaaaagtaaacaaacatgtagaactcaattttagatgaattttgcaatttgaatggcccaattcggagttcgaatgaattagatatgaattttagaagttttgagccatttaaatggatttctataattattaatgatttattgcgcaattatcaattattttctcaaaggaaaaggcattcgctgatgtcagcaaggggcgccggcgctgacacgcgggccccgcacgtcagcgacacaaaaggggcgggcgcacggtggactcggtccaccgcggcctggcggcaccgtggacccacaccacgggagtggtccatgggtggcgaacagagcggcaaggggcgggctcgccggccagcccgacaaggcggcggcacacgcgcggacggcccccggcgatggcagcacgacgcggcgccggacaaggaaggcaaaagggaaaagggaggaaggaggcctcaccgtgcgccgggcggcgaggggcgatgagcgcggcggcgagctcctcaggacgactgcgggatggtgctcccgcggcggctccacggggtggaaacggcggacggaggccgggatgacctgggagggcgatggaatgattaggggaaagggaggaggcgcgaggcggtggaaaaaaagcggccagaggccggcaacatgggaagtagctcacctcgacgggaaggagaggactccggcggtgaatggcgagggcgaaggggcggcaccagacggagaagccgatggaggcgacggcgcatattaaggtggtctgggacggcagcaggaggcggctggaggcggaaaatgcagcgtcggcctcaggttggcggtgggggtggttttcggtggtggaggggaaaaactgatcggtggccgggcttgcctgcgcggcagcgaagccggctgcggtggtggcaggacgcgggagcggctcaggcgacgacgacatgcgactggaggcggtttagggtggtggcgactcgggtgcatggtggaaggggagtttcggcggaggtttgtgcaaatggagcggtggccggtgtgcggcgaggcatggcgaagccggcggtgtaagcagcgcagcgtggcggtggctacggcgacggcggcgtgcagccggagctcgccggaaagcggcggagcacgggctcgcgcggggagcacgggagaggtaacgaggagctcggggaggggagggaaacggaagaggagagcacgagggtgcttttgataggcttggggaggagaaatcgtggccggacgtggcggatttgaagcggcaacggccggcgacgtgggcgacaccgtgggcgaagtggggctcgatttggcgccaaaaattggggaaaagtaggggatttggtggagnaggtggaggggtgacgtaagagtgcataaatgccacaaccacgctggcagaccaataaggagtgatctctcggtagtacctaggtgcttggaacaaagtcctatgttgtcaggatatatatgttaagtgatactaaatatgattactatagaagtacagttatatcatagtttcctaatgttattttccactagacattattataaaggtgaatctcctgtttgttcactacattatcaattataggttgattcatgagatataaaccatatatttataccgccgccttcccggtggaatataaatacgatacccttgggaatactcatgggagaaatgctacaacggtatccgtgcgcttgcagatttatctatgaacgtacgaaataccaacacatgacccacgtgccccaatcatgcccaggctggcatgcgacacctcaggaataagtccacattgactccctcaactatagctctaatctgattcatatccctgaagagcaataccatatatctttttttagtgtaaaatactaccagagctttgcctaataattatatattaaaataaaaagagttatttacagaggaaaaaacaaaaagcaaaaccaatacccctttgaaaattacaaactttgtagctagctaagaatggaggagctaagagaatccttcattctgcagaaatgtagaagaatttcatttgtaaaagcaacaaaccacctattaagataaggctgaacattataaaaaacatggccatttcgctgcttccaaatgtgccaacaagcaaatcaaataatatccagaaaaccttttcttctgaataaaattcgacatttgggaaatttccaagtttcgattccaactgaggcgctcccagcacaacttactaaaaggacaagtgaagaaaaggtgaatcaacgtctctctaggaccaccacaaattacacagtttaaaactgcatctttaggagcacaatgcctcctatccaacatgtcgttggtatttagcatgtcccacaaaagcaaccacataaaaaccttaattttcttcacacatttggtcttccaaatctagataaaaggccttggaacatagagtcccacaaaattagtcctgtaaaacttttggccagagtagatgtgtgaattccagaagaaagtccataaatctcccttatttggactgagagacagaatgactaaatcagattgcaactgaagaaactgtctataagcctgatcatctaggggaagattaaagtaatcttcaagttgtaaattcaaaaagtgattcacagattcccatcttaaagtagtttgggagaaaagatcacgatactttagtttcttaatctcaccattccagagatcatcccaaaacaagactgaagtgccagattgtattgtacattgggaaatagctctataaatatcggccaactgaattatgtacctccaccaaaaagaccctttattgaaaaccatatgaggtacttttgttctgtagcaagaagcccaaataagtctaacccaaggaaggtcttgttgtaacgtcccgcctttgcctctcccaggctaggcccacttacattcataccattttgtcacgtcccgcctctcccaggctgggcccacttacatctaatagcttttatagttcatagactaccctcacagaccaacacaagtcttttctgcacactttatcctcactcatgtgcacccggaagaattttccggtcggtcacccatcccaaattgctccaggccaagcacgcttaacctcagagttctttggatatcggcttgaagttgcaacttgttgatatgagtattctattaatcctattaagccctgggccagaatgtcacacttgtgctgtgtaaaatttatgcaaatgcttcaaaagcaaagccacattctaaatatacagatttaatacacctagaccacccttgtccttaggtctacagacttcatcctatgctgccaaagattttcttttaactaaaacattagaacctttccaaagatttcttcttgcagtgtcaatggcctctataatagtctttggcaatttaagggagcacatgcaataggttggaatggcagataaaacagagtttatcaaagtaacatgcctccataaggaagagaagaagcaatggcagtcaacctcctttccaccctatcaaccactgctgccatatcaaccactcttggccttgtggaaccctttggaaagccaagagaagtgaaaggcacagagccagattttccaatttctcgtcaaggacattcaaaggataaatattggacttatgatagttaattttcaaaccagtgtcttgattgaaagtgtgcaagagggccttaagacaaagcaattctctttgtgaagcctttaagaagatgagagtgtaatcggcatgctgaacaccaggaaaatcacctcctccttgaccatttataggcttagataacaaaccaagactcatggctctacttaaaacatcctgaagaagttcagcaccaatcacaaaaagcaagggagagagaggatcaccctgcctgacccctcttttgcacctaaggaatttcccaggaatcccatttagtaagatagaagaacttgctgattcaaaaaccatcttaacccaattcaaccattttgtagggaacccatatgtttcattattttcaaaatggtcgaatgttcgattgtatcgaaggccttttaaaagtccaatttaagaatcaggatttccctcttggattgctgacactgatgaatatactcaaaagacccggctaaatagtcttgtatagtcctctctttaataaaaccatattgattttcatgtacaatcttctttataactccttgaagcctatcagccattagcttagtcaaaaattttagagtgatactcatacgagaaataggcctaaaatcattaacacattctagattaaccttcttaggcacaagaataatataagaagaattaatgcattgcaggtcaaccaactcagcatgaaagtgagcatccagtctgtaataatcttgggctataattggccaacaatttttaataaaacaaccattaaagccatctgggcctggagctttgtcaatcggaagacttttaacaaggtcatccatttcaagagtgaaaaaatgatctaccatgctatcaaggttatcatttcttggaataagatcatattgatcaaaactcatagccgataagtagaaacacccattctagattgaaaagtgtcagaaaagagagaggctttatcatgatgtgctgagacaacggatccattatcattaatttgagctatcaagttatttttaaacctctctgtagccatggcatgaaaaaacttagtttctattcaccaagttggatccatctatttgtgcatcttttcttccaatactcttccaaactgaaaaaagtttcaaagctgttttttcacaatttctctaaaattccattccatcagagataaagctctaacttcttcaattagatcaagaaaatctaggactttattgcaagacttgattaattgcaataatttagaaaaaccattactccaaatcagcagaccctttgttaaccgtttaagcttaaaagtgatacgcttagccgaataaaaaaactagggtcaacactctatacttgtgccacatgatcaaagaaaccctctatctggacccaataattctcaaagcgaaaaacattcgattttggaatagaggattcaattttgatcacaaaaggaacatgatcagaaatagctctaggcatagtataaaccacaatgttagggtactttagggtccagtcattagaggtaaagacccaatcaagctgttctaagaggtgattactttgcatattactccaagtaaaacttctccctttaaaaggttctcaatcagccgtaaagaactgataatattgttgaaaatgaaaatgttattcatatcagcccctggtttatttctattctccacatatctgtaaaaattaaaatcactaagaaaaatccaggcttcatcatgctgaatttggaaggattttaaccaatcgacaaaataaactctttcatggcctctacaaggaccataaattgaagctaggaaccaagatttagagttatgcctagaagtaaattttaggcaaagtgcaaaattattagaggttatcaaagaacccctaaaaatggaaccacaccaacagaccaaaatgccccccctaagcaccatgagaaggcacaaagtgaaaactatcaaatcttttgggcacaacttttttaagagaagcacagtctacaatctctcttttagtttcctaaaagcaaaccctagctggtagctactatcatcaatatttataagagcagcccacttgtccactgaattcatcccccttattctaacataggatatttgagctacgctgctgattcataagtaaaaagatgaacaaagagagaaaacagaccaagcaaagcaagtctggcataagtggcatgatacagaaaaaactagtgaccggctgagtacaataactatcattacaaaataaccacataaaaacaccatatttaaaacaaattgttttttgaaacgaactgccattgataaacaatttaaactaatcatcttcttcagctggcctgggcaccaagtccaatttagctcctcccagcttgcttttagccaccttctcaagagatagactgcacgtttgaactcccatcttttgtaaaaagggaaacagacaatcagatggggaataatcagtttcaaaataaatatcagaatcaaagttagattccttaaggatactgccagaagataaaacattagaaatacatgccaattatttcaacttctttgcaaattttcccctaggtttaccaatgcccatcctgggatttaagtccgcaacatcaatcagcaaggccctcaacctcgagctttgcattctcacttgatcataaagaactgttttaccatctcttttcttagcaggagcctttggaagcactaaatgttagtgatatgccctagaggcaatcatagagatgattgtatcacatactatgtttacatatttatccaactttgttccttgaaatagataactcattattggttaatgaatatgtgattctttcatgaggctctttatgttgtgtgttgctatttctaaaggatccctgatcaaatatcatatgtggaacaaatatgtttagatgatcagcacatatattaattgatgatcatgtctcatggatcatggtatagagataccaaattaataatgtggacacatgttggtgaacatgttgttggatatacccaacatgagacactgcaagagccatatgtgttgtgtcatcattgatctcagttagtgttggtgttgaatccttagacctgagattatcatggttcccaacatgtgtagtagcttacttagggactgctaaacgctactccgtaattgggtagttataaaagtagttttcgggcatgctatgaaacatgtagtgggatatgaataatcaagatgggatttacccctcctatggagagatatctctatcgtgaggcaaagggattcatacaag

SEQ ID NO: 29540 - DNA, 4505 bp, Oryza sativa
ttcattctagagatggttacaaatctgcaatctgtgaacatcccattcatcttttgcacttggggttcaatcttatcaagcacgtaggcttcatgctgcttttaacgagcaggaaccgtaatgtcagctttgtgcaaacgatttggactaccatcttgaacatgatgaccagctcccacgaatcaccccggattgaagacaatcttaggacctgtttagtacagctccaactcctaaatttagctccaggagttcgatccagagtagagttctggagctgcctaaacctagctccacaactctagttcattttgtgagagagctccacctagctccactcccagttttggtggagctgaaactgtttggttgagctccagatctaggagggatggagcaggagctggagctatgccaaacatgcccttagccatggcaagattttccgacagcatattggattgagaaggattggggttttctagagcaacagtaatctgtcgagaagaagtaggtgaagaagatggaaaaatagatttgttaacgcctttccactgtcaagtctctttaactatccacttggaagtagtcttactcttttgggccaaacactaatgggccttatgtccataactaaaacagaagttacaccggataggattagaacaatttgaaaccccatgatcctgcctaaggcatcgtgaacaaaactgattagaagatttagaggcctttggggaatcagaaggaaaaactagcctatcaaaaaccgaagaatgatttggcacattgaaatcaagctgatctttgacagatctagaattcttatccagtatactctttttcaaagaatcaaaaaccttttagacagggatcatagatgagggaactgaacgctcagattgaacaacatttgcaaaagaaatactaggctatactacgactgaagatctcagatccttagacttcggtttcacttaagtccactcacgatcttgcttaatgatccattgagaatattctttataccaatctggccccccatttctccacagatgaaaaaataatttgaagtggtgacgagagaaagatttaagagaatagatgtcggcgggtgaactcctccaccagggaaccatgaggccccccttttttggttcggccgggggtagtgattggtattcgaggattctgtggtggagtgtgaataagagggggtcgggcccccctagggagatgagacaatagcggtttatacaggttcgggccgttgagaagcgtaacaccctactcttatgctatgctgattgagagagtgagattacaagatctccttgttggagtggaaggtgttgatgatgaggggaggcgactgcctctagtgaaaaagggctcatcccctccctaagtaggcctgcacctccttttatatctcaaggggttactacatgggcccactgagcctattcagggaggataatcacattaaatgcatgtctcgttccttgccttggaagtctcttgcatgccatgttgcggcgtggggcccgtcaaatccatctggctgacacaggggacacgtatgtcattcgatatttaataaatgaggacttttgggtcctcacttgtgctgggaaacggaaaccctaccataaccgggttaggcaagcctcacttgtgcgacaagaggctaagcggcctcccatcatcacgatgtgacagggggtctcaggcggcacgtgttggtatttcttagcgacactactgaaaatataattcccagcaatagcactagaaataatcctggtatattatggttacagatgtgatctgcaagcgcacggatataccattgtagcatttcacctgggagtattccaaggtatcgtatttattttatcccaagggaagatatgataagatagtactatgctaataattcaaatattacttatatacatcaaagtctatgcaggagttaatttagttcaaagggtagggtggcacacagaagaaagaactaagatattctcactaaaatatagtctaagctaagtggagaaagaataacaaaaagtatcattcctgtacttctagtatatatacatctttagtctatacttgttggtatacaatcatgcaaccaataccctctaacagtgtcctcctggtgttttgagagaccaccccttgttgctgagttccttacgacaatctgtcatggccatccaaccgaggctaaatacggaggagtaccctccccaggaaattgtacttaggataatatacacatgcagaggaacacccgtattgagctgtcaccatcagtggccagcctctgaaccattgcatattaccccaattaatggtatataataatctaagcatcgcacttacattactaaatactactctgtatccttgcaaccgacatagagcaaacgaatactcggacactaaacccacaccaatacacctctctggtaagctagtcacacaactatattcgtacaagtataaagtaaagtcggtactcaattatatgaatggaataagataacgaaagtgtataaagaagaatattgtattaattcaataagtcttacaaaagaaaagaggaaagctagtagagccatacccgaaatctcctgaagagtcgaggactatgaagactattctatttcctactccactagtactagaactactaaactaaacttgggagagctcttgatcttcttcttgaggtgtgtggagaatggaatgagataacctcccaatgacggttttggcggttggaatggtcgaaaatgccctccaaccatcattggggagtgatccacaccgtccatcgcaaaccctgcatcgaacggcttcaaggtgggttcggccgaaccatgggctgggctactctggcccatttttggcaggtagcccccataactcctctcttatccagaatagtgaattttggtcctattggatcgtgtcatatctgagttctcagcccatctatccataagtctgattctcgacagcgtctgattgatcgttcatctatttttggtcgattcttctctatttatatgtgcttcttctacatagatgttagtagcatagtacatagtggaagtagatattttattcgggaattatacatcgcaaacatagctagtatttactaattgggtaatattgacggtcgaaactggtcgataacgaccgtcaacaaaccccccaagcttgaacctttgctcgttccgagtaaagggctcacaaaaatttaaacttggttgtcgattaggagttgctactatgctgtatatctcaaagatacagatgcaaggtatgtgtactctctctcaaaccaaataagtttggcattatggcttacccttacacctaattcccgcgagacactgcctttccttgtcttgagcggttgagagacagaacaacaattagagcgctagtcacccaatctttatttaacttttatcttggaagttttcaaatgatttttcaaaagaaatctaagtttcctcaaatgattctctcgatcactcagagtgtttgaatatgaattcctcaccaaatttgcctttttgaatcctactctaaggtttgatatatggagcttggtagggatcaaacatggcatacttgtattcacatttattactaagtcaaaaacttggactaaaatagatgactaatcatactcaagatcaagattgtgcaaagtgtgtgtgacatatggtggaaatggaatgtggaaaagaaagaaaattcttctcctttgtgcttactttcttctccaaatcctcctttcataaatatagagagggcatggctacattttttttaacatcttgctcaatattttgagagagcataagtttattatgattattattttcataaccatgcctttccctcctttttctcttttcttttttattcagaaaggattttctttttaggagaagaaagcacatataagcatgaagaatttattttgatgatggtataatggaaataaagatagaatggatgctagcttgcagtgtagaagtttagcatatgcatatatgtgggtgtatgatcttgatcatagagcatgaaaagtatctacagaagtcacaaagatttgacaaatttcaatggacttacaagtaaccaaaatgtatatggcttaatcaatatggatattttttggctctagtaggaactcatatcaaatgaggaactttgaaatttatcatttcggaaaataaaacattcggaattcaagtcaaacttagaacaggatcatagaaactcttatttactatctcatatctcgcaacaacctagactcagatcaacaaagtgcagctagactcagatcaacaaagtgcagctcacttacctcaggttcctgataattgttggttattcttactcaaattttgagagagcacttaaccatgacccatatatgagagatataaaacagaataact

SEQ ID NO: 29541 - DNA, 4087 bp, Oryza sativa
  unsure (1)..(4087): unsure at all n locations
agaggagacaatttgcgaatagggttttcagaaaacttgtccttagggtttgaccatttggctcaacctacagtcaagttgcctctgataccactttgtcacgcccagaaatttagtccaaatttctagactattttgtgtattaaatccctgtccaggaccagccagggtacacaaaacgacaagtaatatacagttccaaacgtaaataaagcgtaaaatacttacaaaagaggcacttagtcctcgcaccgaaacgaaagcagcagcagcggaaaagggcgatcctagcggggcttcagctccactccacaggcaaaactcaactggggtctgagccttggtcctctaactccatcttcagctcagaagcactacacttctgaaaaagggggaataatagcaagactgagtacaaccaccgtactcagcaagccacaccaacgatgcagacgtgcaaggggatacaaggaggggtttgtggctatttgcataaaggcgggtgtaaaacattttattgagcaaaacagtaaaactggtgagtaattaaagtaacattaaatctccactgatcaacgctacaccacgttgaacaggcccaaccaacccacctggactacagtgtattgggtcgatttattaagatgggactaatcacggtgaatctggtcgaccgcccataaccgcgggcacggctattcgaatagttttactctgatcagaggtgtacaactgtacccacaagacacagccccacaacacgtttccgtgcgccgacatgccaccacgacatatcggaaagaggccgtgacaggacccttcgcataaccccctctaaccaagcacaccacacctcaggttttcaccccccgtccccagcgggcaacgggcagtcccttctcgtgcctaaggtgaaatccgaagcgacagaggccgtcgcaaggggccccgcccccgctcccatcacgcccaccctttgcctggatgcgtcagctagaggaaagctacactacaagcccagccgttgcccacgctggcttgtggtaagtacgataagttcttccagggcatcccgcgaaccggtccttaactgccatgggtgcgactagcaaaaccatgcacccacagcccactattcagttgcattttagttggataattacgaccatgaagcatggccgggtgtctcgagcacgcagctcactctgatactaaagggtctaatactgcaattatcccatcaactgagctagtggtaattaagcatggctaagcatatagttctagctaggtcacataagtaacatgagctagtgttttctttacccaaggnngacaaagaactgatatcatgtaaacatggcacaagcgagcagataggtaatacccggatcccatgtaattagtaaaacatggcgatttaaattttttntttaaattttttttggtgggaaacggtaaaacatttataaattgggatcaacatgctcaaggggaatgtgtgacttgccttgctgcttcactttgatcttccgaactcttttcctcgcgaccgcggacttccgaaacgacggattctacacgctgacacgcaaaacgaggaaaaactctaataaaaaccaagaaaacagtacataaaaagtaaacaaacatgtagagctcaattttagatgaattttgcaatttgaatggcccaattcggagttcgaatgaattagatatgaattttagaagttttgagccatttaaatgaatttctataattattaacgaattatgacgcaattattatttatttttccaaaggaaaagacggttgctgacgtcatcaaaggggaggggcggcgccggcaagcgggccccaccggtcagcggcacaagggcgccggtccaccgtggaccgggaccaccgaggcggtccaccgccggtccacgggaaccgacggcccggatcggcccaaaccgatcgggcggccaggggcggcgcggctggggcacagcacggcacaaagccggctggccaaacgacggcgcgcggcggcgcggccacccgcggcgacggccggcgacagcgcggggaggagaggagggatgctcaccaagggcggcgacggcgagactacaacgaggaagccggcggcgggctcctcggggaggcaacggtggtccggtggcgtaccacgggcgcgaggcggcggacggtgaccgggacgaccggggcgcggagagggcaatttcagtggttcccggaggcgaggaagcggtggccggggtgcggctcggagttgccgatccgagggaggaaacggcgcagtccggcgtcgaccggggaggcggggcgacacagatggagacgacaaacacggcggcgatctcgggttggtggtgaagttggtgctcgggcggcgagaggcgacaaccgagcggcggccgagcttgactttgaggcggcgaaggtactggcagtggtggcgcattggggcgacggctagggcggcggtggcgcgcggctgaaggcggtgaaaggggcggcggcctcgggtgtgcggtgggagtggtgctcgaggggtggagagggggaaataagaggcggccggacttccccttgcggtggcgaagctggcggtggcggcggctcggcgcggcgacggctgtggcggcgggaaacggcgaccggagttcgccggagtgtggcagcgcgtgggtgcggcgtggggagagcgagggagagtatgccgggctcgggaaaaatggggaaacggacgaggggagcacggggatgctttttatgggctcgggaaggcgggatcgaggccggacgtggcggaatcggccggcgaagtggggcgccgacgtggggtggtggaggggttaactggcgccgattttcgcggggagagtgggggaaatggtggaggacgtggaggggatcgtgcccacgtcgttgaatgcgagctcgggtgcgggagggcgccggattttgcggcgacgtggacggcaatggcggttggggtcggccggtgagaggtaggaggacgagctgacgggtgggaccgtcggtcccacctgtcggcgaagggagagaaggagggacgcaaaacagacttttgcgagcgggccaagtgagaggggagccggcccgagagagggagaaggcgcgcgggccgcgggagaggaaggaagacttgggccgaaaatggcccaaagagaggaagggggattttaattgttttctttttattttaattgatgcaatgatctttgtgctattaaaactatttctcgagctccgaaaattcatggaaaattccggagagtacattagggcacaaagaatattacaaaatattcccggccaataatttttaaaggaaatttttaattccctcaataattcacttgattaagttgatttaacttttatttaatttctagaaaatgtattattaattgatttttattcccgaacgaaaatcggggcgttacaaatactctcgggtgaaatgctacaatgttatatccgtgcgcttgcagataaagtctgtaaccataatatacgaagagtgtttctacgctattgctgggaattatatttctagtaatatcattaagaaataccaacaaccatgattctaatttcattggaattaatccttgaccaaacctttgatctagtcttatctctaattcttctctatcctgacatgttaccaatccttctgtagatattccaatagtcaaattcctttttcgatcgagcctccaatttaatccctatggcttcaacctccccggcacaagaatagtattattacaaattttggaatgattgctcttgtgctaagaaaatagattttaattcatcgttctcatccaaaatctaaattccctattagccacaaataattccccaaatattcatactaccaatttaaggattcaaatccttttttttttgcctctaagtattttccttccttattcccaaaaatatattttgcgagtaatcatatcatttatttcccctcctatttgagtgctttaatatttagtccaagtattctttctctcatatattgcactcaaa

SEQ ID NO: 29542 - DNA, 715 bp, Oryza sativa
tacaccttttcaaaatacaaggcatattttgagtattaaatcaagggaaagatgggttgacttataaaagaaacggatggagttctttcttttggttgcttgcaatggctgaactcaacttattcgtgattgcaggcaacctgtgtattcggtcgcatttagccctggtggtgagtacttagcaagtggttcccttgatcaatgcctacacatatggtccgttaaagaagggaggatcttgaagacatacagagggagtggtggcatttttgaagtgtgctggaataaagaaggcagcaagattgcagcatgtttctcgaacaacacagtctgtctcatggatttcaggatgtagtttaaaccagtggatggatgaagtaatacaagcagatgcttggctatctgttcttccgtgatcagctggggagaacaggattattgccttaactctaggttttaggtacctttagtttgccagtgcttgtacagttatttccttgcggagaaactgaccataggatatagttatgtgtagagcgaaatctttccaacatcatgtcttcgcaatgctcatcgtatttagtactatattagtaacaattgtttattcgagattatctttgtcattaccataacaaatgcttaattgctatggtaccatttgactgagttgctatgatgtcatcgtcgtcagaatttccctgagggtatttgg

SEQ ID NO: 29543 - DNA, 1210 bp, Oryza sativa
acacagaagtcactcataaatcatgatatccgagataaacaaactgtgagtctgattagtcatcaacaacatcttccatatttagacatgttacaaaggcgattatgatcctactaagaatttgttgcaggtaggcttgtgtcttctttttgacaactattcgaatttcagaaagccatacataagtcagaacaactatattttcttgaatatatagtttttgcagtacaagtgtaatttaatgtaatttactccattttacatgtaggacagtgggaactaaaatgataaaatttgtactgctcttgctaaaaacataaaacaatatgcactttacttcatttgacaaatttcaaaggacataaaagctagagggtgagctatcaattatcaaccatcagatacccaatatgaatctaggtatagcttctagtatttaattataattaaaaatatagcttctaggtatttaattatttgcacaaattatttaccttgccaaaagcaactgttgattgggattatttgttcctggtcctgttgggctccatctaatagtgtatatttcctgcaaaatataattaagcatatgatagacagtagaacaggttctagggatcataaaaaatgagggtagatttctcaaaccttagtatgctccttaaaatcataaacacatttatcctgcttcatactccatatctgcaaaaaaaaagaaggcaacaaaagtgggaaaaggcttcacaatggacgatatagcaccagcacttcccaaggattgtaactgcaaacccatagcgttgtttaaaggagtaagttcattggccccctcaactatcggtttcatcaaattgtttttgacacattatcaactccacattactggtttttgttgttttatcaaaaaatcatctccaaggaagaagcatccatgatattatttccttgtccaacagattgccaaatgtctcagtgggaggaaagaaccccatgtcctactcaaattggatatctcaaaggcttttgattcagtttcttggtcttttcatgtggaggtcatgcagcagctgggttttcgtcattgttgttgtaaccttttgtgtttggtcctctctacttctactcgaatactggttaatggtgaagccagggaggtaatctttcatcgtcatatggtctccgacaaggtgaccccctctcccccatgtta

SEQ ID NO: 29544 - DNA, 989 bp, Oryza sativa
tctctctcctcccccacttctcccacgttggccggcgaaatcccgcctctcccggccacgtccggccctcccctcccctatttaagcttccccgtcactccctctcgctttttccttttctcgccgaactccctcgtgctctccatcgctcccgcgccgtgcaaccacccgccgccgccgtctccgctactccggccgccgctagccgccgctaggctcaccgccgcaccgcgccgtcgccgccgtcgggttcgcgtggccgagatccaccccgtccacccctcctccgtagagattcgccgccggagccccatccccgtcgtgcgctggtgagtgacgccatggccgccgccttcggccggcgccctcgctctctcgcactctcctctctccctctaacccctctccttttgttcgttaggaggttccgaagctcgtcccgccgtcgccatcgtcctccgtcgcccgccgtcgtcgaccgttgtcggtgaggcctctcctcctctttctctctctcccgcactgtttagccgtcgcgccgccgcttagccgcgtagctgccgcttcacctctagccgccgctctccgccgccggtcggtcgccgtcggccgccgtcttgcgccgctgccgcatgtgcgccgcgccgtcgcgcgccatggtcgccgggccggtttgcgccgtgcccgcgcgcaccggccgcgagctcccgccgccgtccgatctacccttgggtagatcggggccatcggttcggccgccgcgtggcgcgccgctcctccccggtccgtggacccgatccgccgtggaccgccctccccgagccgctgaccggtggggcccgcttgtcggcgcccttcctccctccccgagccgctgaccggtggggcccgcatgtcggcgccgcgccccgccttgatgacgtcagccctggaatatattgcgcaataaatgatttaaggtttttcttgtatagtaataaacacagtga

SEQ ID NO: 29545 - DNA, 660 bp, Oryza sativa
atatgaatgcaagaatgatacattgatggtttataatgagaagtgcctggaactaatgaaagagttttggctggttactttgaagcatgtatctcgagaacaaaatcttgaagctaatgatttggcccaaggggcatcggggtataagccgatgatcaaagatgttaaagttgagattgcagcaatgtcagccgatgattggaggtatgatgtgcatcagtatttgagtaatccatctcaatcggcttctaggaaattacgatataaggcattgaactatacactgttggatgatgagctttattatcggacgattgatggggtattacttaagtgcttgagtgccgatcaggccaaggttgcaatcggtgaagttcatgaagggatctgtggtactcatcaatcggctcacaagatgaagtggttgcttcggcgtgcagggtacttttggccgacaatgctggaagatttattcagatattataaggggtgtcaggattgtcagaagtttggagcaattcagcgagcaccggcgtcggctatgaatcctattattaaaccatggcaatttagagggtaagggattgacattattcgtatgataaacccccatcgagtaaagggcataaattatattgggtgccacttgatatttcacca

SEQ ID NO: 29546 - DNA, 1135 bp, Oryza sativa
ctagtgtacgtgaactacaaccttcgccttcgaattcagcaagcaaatgcccaaattagggtggaggacgatgatccccttcaaagattagcggacctctcattctatgaaactaacaatcatatcagtgcctggatggacaatgctcgctctaatgcttgccccgaactagatgaagattcagctgagagtgacgctcccctgcctagtcaacttgtgtctgacctagtcaacttggatgacctgcgaaggaccacgggagcttctagtattgctgagtgggctgatacgaatgtaggtgacactcatattgggaaaaggaagactcgaaagccgccaaaagcacgtccatctaaaaaggtaaagggcaagggtccacgatcgactagtgttgatagcgatgaagagacccaaggaagcccagagtaccaagagtccaatgatagtagctcaagaactgaaacagatgacggcgacgacgatggtcaaggaggccaaggcactactaatgtgcctcctaggggtcacacccaacaatcagatcaccacagccccgttcaattcactggtgtgatataattcagttgcaatttcaaccttcatcttccaattcagtactggataattttcttgcaattttttgatttgcaggtgagggcgacttcactcatgctactcaggaccaggatcatggtgctccaagctctcaacgaactaccattgcaccgggagtccgacaacagcaacaattcagtgacatacaacaggatagctctagctcattcagtgcctctagctttgaaagtggctatccaacgtatgtgtacaaccgtccccaagcttctgattatcctgctactacatgggtgtatgaatggcaagagcctcagtggtatgctcaattgtacgctcagtggcaaacaacatcatcatggacaggtcaaagttgggaggaatacaaggcggggttgctacattcacatggcttgatgctcatgtccacagaggagtacaatatggcatataatcagtggaatgcgtagctatgcatgtccttgtttatttcctttcattcgaactagaattgtaatcgtggacattatactgtggactctattgttattgtggactatat

SEQ ID NO: 29547 - DNA, 30279 bp, Oryza sativa
ctcatgctactcaggaccaggatcatggtgctccaagctctcaacgaactaccattgcaccgggagtccgacaacagcaacaattcagtgacatacaacaggatagctctagctcattcagtgcctctagctttgaaagtggctatccaacgtatgtgtacaaccgtccccaagcttctgattatcctgctactacatgggtgtatgaatggcaagagcctcagtggtatgctcaattgtacgctcagtggcaaacaacatcatcatggacaggtcaaagttgggaggaatacaaggcggggttgctacattcacatggcttgatgctcatgtccacagaggagtacaatatggcatataatcagtggaatgcgtagctatgcatgtccttgtttatttcctttcattcgaactagaattgtaatcgtggacattatactgtggactctattgttattgtggactatattgttattctggactgtattgttattctggacctacatgtggacatcgttatgctttgaaatgtgagattgatgattgttattgttgttataatgttatgaattattgtattgatttgaactccacaatatagagtaggtcatgccgaatttttctgttgtatagccacatcttaattaactaaaatactcacattttagtttttttctattatttttttcatttttcttatttcagttccaacatatcgcggttaccgtcctcttaccgcggttaccgtaccaaaccgtgcggttaccgtgtccataccgtggattttgaattcaaaaatttggaaacgaaatttgtgcggtttttcgcggtaaccgcacggttaccgcagtaaccaccataccgcggggggtcggtaagcccccccaaaacggtaaggtgaaccctggttggaacccattagggttgcgtcgagagggggttacacgaccctaaactctatatatcagtacccgccgccatctttaagtttttgggttttgcttaaattaatctgtcgagatcatttttgccgctagatcggtttgtaagaccccaactcgtgagcttaatcattcatctgcaattttggttattttctatctcgttcttgtttgtgttcttcgattggcaaatagggattagccttctcggcgaggtcatctgtgtttcggcacgggtgataaccagaggagacgtggtgctgcgattgcggggctcaagagcgtgcgcgttcaagaagcctgatcgatttatgtcgcgactccacccaaatcgttgtttatcagaacctttcggaagatcgggaaccctagtgcacatcagctaagtggaagaagaaatagaaagcactcaattcctatacttctagtatacattcaaatcctaatttacatctgctaatttacaatcatgtggccaatatcccctcacagtgtcctcctggtactacaagggaccaccccgggttgccaagtttcttacgacaacctatcatggccgtccaaccggggctaaatacggaggagtaccctccccaggaatttgtcttcggaatatatactaatatggaggaatactcgtactgagctgtcaccatcagcagcccacctctactgtcctgaagtatatatgtccaattaatgatactaaataatctaagcaccatgctcacattattaaatactactctatacccgcgcgcccgacatagagtaactgataaatcagacattaaacccgcaccattacacttctctggggtaggctacacacacaattaacataatgcagatataaagtaaggccagtactcaaactaagtaaagtagcgaagatatataaagaagagtatttcattaaatcgtaaagtattacggaagagattacaaaagctgctagggccataccgaaaactcttccgaagactccgaggacttccgaacactattctatgctactccacttagcactatactactaatactaatttatgaagaggaattgagcttgcttgagtgtgttaagaagtgaagtgagctcctccttttatagggccggtatgacggttactctcatgcgaaatgtacattttacccttgtaactgccatcagcaacgcatcttggacgtccacgtgtaagggggaacggagccggcttgcccctggttcggcctggctccaaccgacctcccctttggtacaatggctgacacatgggtcccattgttggttttgacagttaaggctattacggacggttacacctgacatgtgggcccccttatccaattgcttgcttaggagtaaggttttctccactttctctttattttatttgataaattcctacaacatgttattctccaagtacaagtggaaatatattatttggaaataaacatgcattgtaagcatagctacttctccaatattttagttatattgacggtcgaaatttgtcggcaacaaccgtcaacagtcggcagagtggggccagaggagggtgtcgacggtcgttatcgatcagtttcgccatcaatattactgaaataaaggagaactagttatgtttgcaatgcatcttcttgttaaaataatatatattccactagcactaggattactaacctcttgcagaaaataagcataagatggaggagaaccgacatcaaaatagacgatcaatcaatcgaacgatgtcgagaatcggacttatggaaagacgggccaagaactaagaattgacacgatcgaattgggccaaaattcacaagtctgaagatagaagaggtcaaggaggaagcctgccaggaacagctccgttggatccagggctttgagggaacggtggagattcactccctatgatggttggagggtattgttggtatttgttaacgacattactagaaatatcattcccagcaatggcgcagaaatactcctggtatattatggttacagagttcatccgcaaagcgcacggatataccattgtagcatttcacccgagagtattccaagggtatcgtatttatttaatcccgtgggaagatcatagtagagagaacctgactaataatttgtatgtttgtaacatacccgaaatttcaggacttaaaatttcttgtcaaaatagttagaggttaacttctccaattttgagagccaaaaatttccgttttaatttaggtgatgaccaacttaaaccattgcatgattgaaatttgagaacaaaataaaatcttttcattcccaatattagactagaaatatcatcaagcatttgagcatgcatgtgcataatgcatgcctaggcttgagtccattgtgtatttggtttttggtatcgcttttcataataggtctcatgagcataaactaaaagggttaaaattactaaacaaaactacagttaatatagggtgataacatgtggacttaatattaaattctaatatctttttcacagcccaaaagaagtttaatgtaatccttataataatattaggtgcagttatgaagtaggaacacatatacaaagaaaggttattcttattctttaaaataatttatgcaagatgaaatcatggaaaaatttatgtaaactatgtttagcataagcaattcattataatattggtgcaacttaataactaagtttaataccacaaattaatcagtcaaagcagaaaaactaaaagaaatcaaattaaattttaatcggctaaatccatacttcatccaaaagtacatttaactgcacataagtgaacatggaaaataatttattcaaatactagattatttatcatgcctaaatattatttttctagaattttcctcctctgtttaggcttcctaaaaattcaatctacctttctaatagcccatctttgtttaatttctgtgagcaatctatccattatttttaagtgcaaccaaagaaaatgaaatctaggtgtaatcatttacctccagtaaaatcaacactaattaatttggtccacacattaagttatgaatctacaaagttaggggagagaaaataatctaaaaattgaactaaaaccgtgttcacccagaatcttacccacacctctctcttccacctagagcacttcatcctgagcccacttggcagcctctccagctcgccctttctctgtgcctcaccctcagccgaccaagaacacagagagggagagatcgagcgagccgacgcgtggccacaacgtgtcgacgacctcgggctttccttttctcgctctcttctcctccagtctgagtcgccattcctcactcatcactcagagacgaagaagccgaggggagcaggtcctctgcctctccgtcaccaggtgacctcaccaccggccatggaggtgaagaccatcgccatctccgtttgagtcaaggtcacctctatctctttcgcgttcctatctctccacacaatgccgaaccacttctctgttgaccacctcccgttttgtgcatcacagccaccggaacgtgaccacgccaacaacgccctgaagcacgcactggagcgccaccgcttcgacatcattgtcgaccggccattctcgtccatctcgaagcaagccgctgtgccaagaatctcgcctcgactacctcttcaagacgcctcgagaaccccagccggagacgtgaaggacttggagaacgcatcttttcttcccggcgtcgatctaggatcgcctccgccatcatcgtcgattaccgctgcctcggtgagccattgttcgattcctcgcgcatacaccatctccataacctcacgaacctcttggacacgcatgcatggcaggtccttgagttgttcgagccgtcgccgttcacctgaggaggagcgccgccgtcgaacctttccaaccgaaaccgctgctatccaagcttcggtgatttcttcctacagcttggtgagcctcctggacctcttaggaaacacatgcatggatgcatctagcaaaatcaaagcccgtaggcaacatgcagtaacagctcatgtataccttccgctcaccctccaatgtctcctagccaagaaaactagaggaatggaatcgtgagagcattctcttcattttatattttgacctcattcccaatcgagccaccaatcgtcgccgacgaggtcgccaaagccatggccaagctcctagtccatcgggctgctggaggttgaagatgaggactttgtcctgtaaatgataaaaaacatagggttcaaactataaaacttcagtcgtttacatgtggacccacggacctaaatgcagttcatataaagcccagggacctttttgtatattggttcagccaccgattagtggacccatgtgtataaaaatctgaaaatgcaaaggaaaaataactaaaacattaaatgtttaacaggaaaacacccaaacttctaaaatccatataaaattaaatgtaactcattttgagatgattccagttgctgtagattcttaaagttatgaactctattttagaaatataaaacttgacactcactgtacaaataatgtctctaaaatttatctaagataggtcatacataaaacatgtacaaacttataaaatacatagaaaattcatctcaactcattttgaaacaaaatcaaattctacagattcatcatcatgcactctctgattaggtgaaataaaagtaattacttactttgcatcaaatgcctctaaaactattatctctagaatgattagtttagataagctaaactttagaaattcatgtagaacccaatttagcttcaatttgagtaaacttaagttctgtaggatcatcaaaacatgtatttccatgttatgaaataagattatatacttattgtgtagtaaaagtctctaaatattcatataaggatttactaacatagagcaccctttaatttgtaaaacttgtagaaaattcatttttagtccaaatgaaatgaacaaagtttctatagaaccagcaaatagttagcttcaacatagtaaaataaaatttggcacctattgtagagaacatagatcaaaaccttaacttagtgaaataagaatttaaacatatagtgttgtttaagtaatacataaacatgtataagtatatatacactttaggtctaattaaacctaaataaaaacttgattgaccagtgaagccatatatagttccatttccatccactaaaacttagaagaacttagctcatataacaatttctaggttaatataatatattgctagtttagattagagcatctctagtttataaaatatgaaccatagtaataaagaccataaacatgtgaactaaaaatgttttagttaaccaaattattccttttattcaacttaaataggaagtagcatgttctgaacctacaacttgagagtcatgcagatataaaacactatatgcctaaaacacgttgcaacttgtaaaatctataagaaaatcattataactccaaaaattgtgaaaccaaatgtgttagtcttagaaaacacatctccacacccctgtgaagtctaatataataaaaatcactttacaaaagtattttataacactacctaagactatactactataaaccgataaaacttctaaaattcataactccctaatggaataagataaaataaaatttctttcacctaaattcattttagaccagtacctaatcactgtgcattaatcatgcattttagaacattttggattttcagctcttttggtgtttaattgcataacgtgcgtgtcctttatctagataattgcataatcggtgaaggagtggattaggtgctaacatttctctgatcaaggcaagttttctcctcccatactttgaacacattgaatcccatgatttgaggaatgaaaatatttgtttgcaaagttgcatgtgaacttagactatatcggtatttgaaattgggttaaggtagttatgacctatttgctgcatatcccaccttgaataatggatcctcttgctgtttgaacccctagaaatggttagagtacactctttatgctcaaatgggtttatatatgctctttgtgcaactacttgcttagccatgcttagaactatgcaaatgctcattccatctataattaaaatgtgattttgattcatgaacctttgcttgaataaaatgaatatgatgggtatttgtgaactaaaatgtgtaaaatgtgattttatacttgggcggcaagtggtgtgcatatggtgttagttgcataccgatagggggagtgtttgcccaagtccataaggaccgaacttgtgtcacccatttaaagttactaggtgaaaccccgcgcattgctgcgggaatttagtatgataacaataaaaaattaacatgtaagatagctagataatatcagattaagtaaattaatgtggtttatgataatttaaatttaaatagtatgtagaatggtgattcaaacgtaaaaagtaaggtggtatgactttatggaagaagaaaagtagggagataatttggaccgtagattaatcatctaaaggctaaaaacaattgatgtgatatgacttaattagaggaaaaaaaggagaaagataatttggaccatagattaatcatttaagcactaactaagtgaggatgaactatataagtatataggatatcataaaacataataaagatatacattgaaacattatgtgaattatgttggataataatttaatatgtttgtatttgaaaagctcttaaattataaaaactataaagatataagcatgtttgcatgatgtttaaatgtgatgattgttaatggaagatgatgtggcatctttgcatgttaagcttaaggagttagtgggggataactttatagtaagatatgattcgtacatccacatgtgctagtatgggatggcctaagctgattaatatatttaggactagccttgcattctggtaggccggtgtgtatgaattagtcgataattctgaggaattagtcgatgattcagaggagcttcctatttgccccgacgtggtagtttaggtgactaagtctgtccaatacaacggtattgtgccacgtgggtgggttcccgttgtgtccgccaccacggcgttaagtttaaggcgtgggcccgccacttaacggttctaggtcatataacgtgtatggcttaggatggagtaacacgtatcgtgctggtgtaaggctaaatcatgaattttggaaaagctttgttgcgggtaataaatcgggtacttatgtatcgcgtgccatgctcttgcatgattattatttcgcatcatgtgggtaaagtgtacaaactctgcagagttaaaactaatcgattagctgtgctcgcggttctaagtagtgttctaggcatattccaagtatgcctaggatggaggaacacgtatcgtgctggtggcaaggctaggttctaagtagtgtaaaggctccgttatgacctctagatcacattcaacatgaagagtgtggtggagtccttgcaaactcaaaacaaactagagagttcatatcatgtgggtaaagctgtacaaactctgcagagttttttaaactaatcgattagtcgtgctcacggtcatgagcgctttggtgatgtgtcatgagtatagactttatgttttaaaatgtgatcatgtgacattggtttgaaattgataaatgtgttgagttgtgtgtgtgaggtgatatattatgatttgttgtcaaaggatgacaacaagagattgattatgatggaattatgatgaacttaatattgaaacttaaaatttgttttgttaattgaagcatcaactcctttacaaaagaattacgaaacaaaatttgctttatactgaaattgaactacatattgccttcctttgaatatatgccttacatgtagtatggtaggattgacttgtgcttgccagtacattaacttgtttaatgtactgactcttgctgttgatataaccttttgtttgcaggtttagacttattctttgagtgatgcgggttccgattgcttcttctaggatgagaacttaatggggtaaacccctagtcggtgtgcttgtgattgggtagtcaagcttccgctgttctctaatatgtctatttggccagtcgacctatgtaattattaagttgttgaaagtcttaagtttctttcatcgtagttgtgtttgctatgtataatcatgcttaagatgaaagtgtggatctagtgcacatcctggaaactagattcacatgagtatgagttaggaatagttgagaggttttagatctttagccatttttgtcaagtcttctgaatgtgtaacacatctggtcgccgccttcgagtggtttgacgggcacatctcaggctgaagttgactggcaggctaagggcccagcaatgtctccaatattcctctctcgaggcatcagatgtttcattatacttgtttgatgacttaaattattcacttgatctctcaaatataatggaaggaccgaagagcctacgacaatgttacttgtaataatcatagtctaagcacgggttaagataatccaagggtagagtgacacacaagcagggagctactcattctcatataaattatctaagctaagtggaaagaaaagagaaagagaatctattcctatacttctaatatacaaagtatacatacatcctaattatctgatatactagtttataccctctatccgatgccctcctggtacttcaagaagccacccctgactgccgagttccttacggcagcccgtcatgaccatacaaccggggctaaatacgaaggagtacccgtactgagttgtcaccatcagcggcccacctctcatccgcagcatataaccccaaataatgatatcccgtaatctagacaccacgcctaaactaccagatactactctaatatcatcgtcatgacatagagtaattgtataagcaaacactatacccataccgatgcatctcctagataagctagcaatataatcagtataacatgaacataatgtaaaggttgcattcatatactcggaaagtattttaataccataaatgtataaagaagagtattctaataaaagtacaatgcttataaaagagaagagaagagctactagagccatacccgaactcttccgatggcttccggaccccaatttatactctattcctattccactagcttaagaacactaaactaaacttgagagaatatgagagagctttgcttgaggcatgtctagagagtgaggaggtgaattccttttatagcctcccaatgacggttatgacagttgaaatggtcggaaatgccctctaaccatcatttgggagcaatcctggacgtccacgccaaaccctacatccaacggagcagatgggggttcggccaaaccccctggttcgaccgaaccatgtgctggtccaatccagcccattttcggctggtggcctcctggacttctcctctttgcagacatgtgaattttggcccaattcatcgtgtcaattctaagttcatggccattcatacataagtctgattctcgacatcgtccgattgatttatcgtctgatttaatgtcgattctccttcactttatgattattctctgcaaaatgttagtgaaccaaatactagtggaatattattattctaatatgaatatgcattgcaagtataactagttctcctctatttttgtaatattgacggtctaaaataatcgctaacgaccgtcaacaggtatccctatgacagttggagggtattaccgacctttccaaccgtcataaccatcattctcaagctataaaaggccctcactccctccattttaagacacacctcaagcaagaagattcatacatttctcaagtttagtatagtctctagagtatagtggaatagaaatagaatataatcttcagtccttggagtcttcgaaagagttcgggtgtggctcttatagctttttcttcttttgtcagacttgtactatttatagaatattcttctcaatatatttacggtactttacttcactctgatcatttgagtaccgactttatgaaatattattcgagttataatttcatagttagcttactcgagagatgcaatggtgtgggtataatgttcatttgtatgaatgctctaagtcaggacggtgattgtagagtagtatttggtagcataagtgaggtgcttaacctattgaatatcattatttggggttatatgctgtggatacgtcgagttgggccgctgatggtgacatctcagtatgggtattcctccgcgcatgtattaatcctaagtacaatttcctaggaagggtactcctccgtatttagccccggttggatggccaagacgggttgtcgtaagaaactctaggggtggtctctcaaaacaccaggagggcatcataagggggattttggctatgttattatatagtagataatattaactaaggttgtatgtatgtactccctccgtccgctatataagggattttgacattttgcttacactgtttaaccactcgtcttattccaaaaatttgtgcaaatataaaaaacaaaaagttgtgcttaaagtactttggataataaagtaagtcacaaataaaataaataataattccaaatttttttgaataagacgaatggtcaaacagtgcaagcaaaatatcaaaatcccttatattaggggacggagggagtatattagaagtataggaaatgattctttctttattctttccacttagtatagaattagtatgtatgagaatattgaatgcttctgcttagtgtcactctacccttttaaatttcattaacccttgtttagactttgattattacaagtaacatataaattattagtatggttttctctattataatcttcccatgggattaaacaaatataatgcccttggaatactctcgggtgaaatgctataatggtatatccgtgcgcttgcggatgaactctgtaaccataatataccaagagtatttctgcgccattgttggggattatatttctagcaatgtctttaagaaataccaccatgcatttctgacgccgttgccgaggaagattcataaaagagattaccaagactaatactttatatttacctctgtataatcaatgtcctttgcaggctaaccttggttgttttccgcttttactgtggaaatagggtagtgtatgactggtttcaaattgccgaaaaatttcatagaaaatccagaagttttctttcggagcatcaagccgcgagtcgttgcgccgtagaaaactcatccgacaaagaaaccagccattctagtgccaccaaccttcaagactacggctaacaagaccatccgcaagttcgctgctccctcagctgacaacgtggccactgggccgcaaatcaacatgggagacgtggactttgatttgaagtccagcctcatcatgatggcgtaggctagcctgttccgtggcaagccaaacgaggatgccaatgcacatctgcagcagttcctggaaatctgcagcacgtacacaatgaagggcgtcagtcctgaccccgtcaggctccgactattcccattttctctctagggaaagctaagcagtggttctatgccaaccatgatatgatcaacacctaggacaaatgctcaatggcaatcctatcaaagttcttcccaatgggcaaaaccaacgccctacgcgggagaatttcaagtttacagcagacgagagatgagtctattcccgaggcgtgggaatcactacaggagtacatggccgcctgttctcatcatgggatggacaactggctgatcctgtagaacttctataatggactcactcccacatcccgtgaccacctggacgcggcagctgcaggagctttcttttctaagacggttaaaggagccgtcgatcttatagaaaagatggtctccaatttgggctggagcgaggaacgactccggacctgttagcgaggaatgcacaccgtcaaggagatgaaaatgctcgctgcaaagctagacctctgttaacaaccaaatttggtaattcaagtatcggagatgaagataaaaccgaagcgaaatccaagatggagatcgttctggaaacagagcaagaatcggctaaagtccgaatcggctacgattagaatcggcagagttcaaatcggacaaggttagccgattaagccggttccgacaatatgactcgatacatgacatcgggttaggttaaagtgcttcacatggattgccatgcacagattgagtcctgaaaaggcaattgtatctattaattaggatattttatgtaatttccttagagatatgttcgggcaaaagtctgcagtaaagacttatggtatcttagagtttgttagaaataagagtcgtgtccgatatggacatattatgtaatctcgggtataaatagaccccgagtcccatgtaatcgataacacatgttcaataacaatctcggcgcatcgccacccttttactttcgttttgtttcgacgagttcttgctttcgggttgagctgcatcggtttcgatcttcaactagaggaaaaacttgttatggcggcctgcgttctcgggattagtgcttccatctttatgatactctaatattggctatgtaagttgtcgagttatcatatattctatataatacctgacaatattgttatctaaccttcaatcggctaacatctatcattgaaaggtagccgattaggttaagtaacaacgttggcctagattatataggatatctaccactctatgaaacatccaacggtttgattgtccagatattgttcttcttttcatacttatagctgcatccgttgagtttgaccttataagtcgtgattagaaccatgatctctagcctgcttttggttgccgattagggtagtgtcggggtttcagccgatcttacctgatttagctttatatttcatgtgcttaattgatatgctagatctgccctttatgttaagatcttactacaacaaagtatgttaggcttctgtttgatatattttacttgctttaatatcttaaaacagagtggtatcggagtattagccgatacatgctagatctatctgatcggctatgctataaacgtttataatcctattgttaatatatatttcgatgtaagtgatttatactgtctcggcatggcgaccgatctatcccaatcacttgatttaagtatatatcgacatatggattacatactgttaatatctacagccgatcgaatagatttagttctttcttacttatttatatccgtcgatcgattcaaatatgacatcggctcaaagataaatgatatgtcatcggcgattggctgatcggctatcatttatggatttaactgctattttcctgtctttatttcttgttgattgcaggatctaatcaactggcacgctcacgaacctaaaggcaagatttttggacctacactggagttaagcagatctcccaggcctcgtgtttttcgcatcaacaacctcctcatgaaacgattggccttggactttagagtaccaagctccacatatcaactttagagtaggaatcaaaaaggaaaatttggtgaggaattcatattcatacactttgagagatcaagtgaatcatttaacataagcgatgtgcttaggctattgaatatcattatttggggttatatgctgcggatacgtagaggtgggccgctgatggtgacagctcagtacgggtattccttcgcgcgtgtatataatcctaattacaatttcctggggagggtactcctccatatttagccccggttggatggtcatggcgggttgtcgtaaggaactcggcaaccaggggtggtctctcgaaacaccaggagggcatcgtaagggggttttggctatgtgattatatagtagataatattgactaaggttgtatgtatgtatattagaagtataggaaatgattctttctttattctttccacttaggctagaattagtatgtatgagaatattgaatgcttctgcttagtgtcactctacccactttgaattgcattaaccccttcttagactttgattattacaagtaacatataaattattagtatggttctctctactacaatcttcccacgggattaaacaaatacgatacccttggaatactctcaggtgaaatgctacaatggtatatccgtacgcttgcggatgaaatctgtaaccataatataccaagagtatttctatgccatagctggggattatatttctagcaatgtcgttaagaaatacaaacagaggggagccgattcagacttggtttgggggagggacagcgggcggcaggagggggagtggagcggtggccgagtgggagggggagagcgggaggaaaaatagggatagggagaataggattaggactttcccaaattggaaaataaatgtggtgccattttaggcaaagaacgaaaacggaacctgcgaacgaaaacggacacggctcatcatgcaaaacgaaaccgcggacagagagaggagtgaatcgggaacgattcacggccaaaggcgggagagaaaaattattattaactcaaatattaacaatttaaattaacaagattaaatccgatgctctgaatattccactttatgtcctgttaatgattttagagcaaagagaattcaaaaaatattctcattgacatttccggttattaaatacattgttaatttgggttttctcctggttaacgaaagcaatttctatagatgatttattggtgaactagaaactacggaaaatgggaaacttcgagtggtgacacaacatcaacctcttcgcccataacttcattatccaagaaggcatcaacctctggatcaatatcagctagctcatcatcttgtgaggttttcttcttcttggctgatggtttttgatttgttttcttgcgcttgccagtatttctcttcttgggatctctatgatcggctcagtacttgaactatctagcaaagatgttacctttggggcattgaggccaattagaggaggaagcagtttggtccctgaaagtgatagtgcggggatatatacaatcggatgattgctcacacttactatgggggcaggctattctggagctgcagtgagacatatatggtgatgaggacatcactccttcagatatacacaacaatccttcgccggtgattcaagaaccaaccacaagagctcgcgcgtgacaattgaatttagatgtgagttcgttcctatgttcttctttatatgattttgagaatagattgctacctaatgattatattatgattaggaacaatggagaggacaaggagacacttaaagagggacttagaggcgtggaggaccagcaaaggcgtccaagtcaagatggaggcccaaaccaagtcgacttcgagtacgtttcggagtccaggactagtttgctctaaaacggacgcgcaggtcatatacgtgtttggattggggcattctttatatggatggaaagctaagaatataaaatttccaatggttctggtcccatgtccaaattctttccgagtcatcgggaatcgaccgaacaaattgacgtccagaatctgtttcggtgctgcgtcgccgtattttgccctttgggccgtgcatcgtgttggagcccattagggttgcgtcaaggggtgttgcacgaccctaagactctatatattagtagccgccacaatctttaaggtttgggttttgcttaaattaatctgtcaataacagttttgccgatccttcggtttgtgagaccccaacttgtgagcttaatcattcatatgcaatttggttgtattctttcttgttcttgtttgtgttcttcgactcgcaagcagtgattagccttctcgacgaggtcaaccgggtttcgacacagttgataacaggaggagacatggtgctgcgatcgcagggctcaagagcgtgtttgttcataagtcggatcgacttgtgtcgcgactccaccaaatcgaccgtttatcataacaaaagatagggaactcttatccacatcatatggtcgggttgataaggatgaaagaagatagaactaaagagaagatggtatcaacttacattaatcctgatcttttcgtccacaatggtaaggcagaagtttgatgacatggaaaaaaaggtgtttcttccattctacccaccattgatcaaatgacggatgcctaaaaaggtgaaggtggatttcattgcaagtaccaagaacaggtccttcaagtgttaaccatttttgcatgatcagagctgatggtactgtatctctagcttgaaccatcctgatgaagtacaaactgatgggaagttgtccaagtccaaattcgaaagatgatataggatgatagaattcgaaagatggcttggcagtttttccttgagaaatatcagttgggagtatgcaaggagttatggctgctataacgttttctctggatcttgggtcaattggatctttcaagtcatttaatctcaaatcggcaaccaaaccctggcagctaaggcaaatccaccataaaatcgataaaatcaatccttgaagccatcaactgactgattctctctggaatatactatagctgcttctccaaaggacatgcttcttctagtgcttatatgttcattatcggcataatcagttggcaaagccgatagagctagtgatggactgtcaagtgccaagatggtatgcatattgatccaaagttgcaagaaccaccaaggacctccataattgatcacttcatctttcacaatgttacaagcggcagagtgaagcatctgataaactgagcaagcagatactttcccaaaggaatgtgcttcttctggaccaggaactgagcgaaatgttgatagttgactgttggcccacaagttgaaccgcagaatacatctctctccaaccacttggccaagaatgcaacatgttccctttcagaaacagatcctgtgcctttatgttttgctatgtatcctttccaacctccatggatctgttttgtcttaagagtatgatcacacttgatgtctagctgaaagggatagatggaagtcgtgatgtccaggcatattagcatcttcacatctggcagagttggggtgataggaccttgccgaaacaagtagttgagggtattcgaccagaaatatgcagcaaccgatagcattggctcattcttcttgatatcggctaaagactaggacaagcactgagctattcccatttcctcccaatgattctgtttggcagccgatactctcttacaccaggttttgtatcctttaagaggagatggccatgacctgaatgttgacttccacttgaccaaatctggattggtctgcctgtatgggatcctatttgtttcggcattgataaactctattgggtcagggttacccatcggtccaaggaaaaagtttgtgggatcttgagaagaggggatatgaatctagcctttaagatgctggtgagaagattgataaaacaaggtcaaaatgctgaaaggattaaaaacgcaagagattaaaacgcagggacatggggaaagttgatcaggaagattgttggtatttcttacgaccacagataaatccgctagcgcacggaataccgctgtagcacttcaccttcgggtgaccccacaaggatatcgaactcagggaacgtgtgtaatctatctaaggctaagacaatccaaggacaacaactatgggtaggctggctcggctagagaggaatttctatgtgttttaattatctatgctaagcaaaggtaatttcttatctgttgcttcgggcaccgacccctactggtctgctagcgcggttccggctatagctctatgatgtatccgaacgttgaggattactaggatgggattcagggctgtcgccacctgccacctacctctgacaaatccgtgagatacacaacaaacaaaggtaatctctaacctagacatcacgtgtaagttattaattagtactttaatacatgcgcacgaacttactcctctatccagagtcctagtactagagcacttagtatgaatactaaacaatgaacccgcaaagaaggaaatctatcttacttacactaagtaattaaaaaacaaagaaaggatcccgaatgcttacttaatagaagaactttctccgaatccggagcagagtataccgatagctccggtactcctccagaactcctcctaaaaagctaaactcgtcgaggtagaagtcggatgagcgccaatcttccgggcactcctccagagcttcccctcactctccacctatttctaatgtacaaaagatacaatagagcatcttgtaattcagctcaaagttgtgtgtgagtgaagtgagggagaggagctctatttatagcctccatatgacggttacagctatgagaaacgaccaaaacgccctcaaccgtcattgggaatgcatcagtagcgtacacgtggaaggctaggatcaaaggagccggtggcggttcggccgaaccccctagttcggccgaaccctgggccccacctcctggcctctcctttggccaggagactgactggtgggcacttatggcaattatggtagttatgacctgttccatggcggttccacctaatttgtgggccctccaatccgtgtgcttgcgtttgattggccaaaggtgtgtttcctcgtatgacaggtgtgttttctccttaaaatacctgcatacacatatttcaccaacactagtggaattgattagtaataatccctatcactaagttggataccatgttttatttcattatatgcaggtattgacggtcaaatattatgatttaaggaccgtcaacaaagattgataaatatacctcaaggattggtaccgtgtgcgccatttatgcgaatctgcgcaggctgcttgtgaacagaggaatctgctaccggagagctggatcgccggagaaggttgccggaggattagggatttctacaatgaagagcttgtcgaggacatagccggacaaaggtgttttgaaggaatgggcctctacttatgagctaaaagttaaaacagaaaaccctaaatttttgcgggttcaacaagagcaaattccactgtattatataatacatgcctgctgggggaatgtatagtatcccccgaaattttgcattagattcggagaaaaagaagaaagatcaaagcggatttggtgtggaatcaagttgatttccaagtcggactgtgcatcgactgagtatcgtatcggctgaaaaccggacagaggcttgacttgatcaatatggcaagcagccgatatagtataacttgggctcgatatgggcctaaattaagataaccgtcactgtcaattagagatagagctcgaataaggcaattgtatctattaattaggatatttaagtcgattttgctagatttggcaagatacccccatatatggtcttgtttgtatgttatctttaggaaagtttgaattgtgaccataatggactaagtttgtactcggggtataaataagaaccctataccactgtaatacgggagacaatccaatacaactttggtgcatcacaacccttttttttcttcttttcggcaagttctctcgataagaggtaacccgtctcgatggtgtgtgccagggttgacgttaccactggtaaccgtgcggttaccaggcttaccgcgggggtacggtaatataaataccatggtaacctccttaaattcaaataaatttaaaaaataatttgaatttttgataaattttgcatggttttgtacggtttttcacggttactgcggtaaccgtgcttaccgccggggcgcggtaaccccggcctcggcggtttgggaaacactggtgtgtgctatctgggctatcatgtcgttttatatgttttagtccttttatcatgaccatctgttatcatatatgtcttagttaatctagccctagtatctcaatttagccctatcggctggttctcgttttagggttcctgctggtatcggctaaattgccttactagattagattaactaaggcatctaccatcttgaaaagctgttaattccttgattgcttagactttaggtttctctacttactttgagatgcatcatccctagtcttgtttagaaccctgaaaactaacctggaattaatcataattagagaaagtatcggagttttagccgatcttacctaatatacatgcttcttttctggttttatgtatatttgccacttatatagacagatcatcctatataatcgtatcaagtttgatcagtatcgtctcggctatttgaatttctaactgatcatgatttgatatgctcatatagattgatttgtttatataagtttgtactagagtattagctactactttatcgttatctacatattcagctctaaatatttttccattggctattttcataatattgtcttaaatcttctttcttaaacctaataggcagtgttacagccgatgaggcatgtttagggtcttttattccctgatctatcccgtccatagccgatttggtctaactacatcggctgagaccaccaatgatacgctatcggccatcgactgactaattatgcttttgtctttcttgttgattgcatgatcaaatcagctggcacgcctttgacacactcgaggctatccttggacctgcactggagttaagtagatctcccagtgtaacgccccgattttcgttcgggattaaaaatcatttaatatattcatagcatagccgatcagatagatctagcatgtatcggttaatactccgatactactttatataaagatgttaaagcaagtagaatataccaaacagaagcccaatatacttaaatgcaacaaaatcttaatgtaaagggcagatttaacatatcgatcaatgtgggacacccaatttaggcttggtgccccgaaaatccactcgtgatcgtctaggatttcgatcacgtacaaattgatatacagaacagctttcgattaattatacaaatttggttatacaagctaattatacaattgttaaaaggtgaaaagatccaaactaatatatccttatttgaaatacaagaaaatccatagtactaaactactaaactcctaagctcttcaactactaaaactacagccaataaactgcaaagaattcaaagaactccataggcaaaagctcgagtgtagactagtctagacaaacttgtcgatgccgtagatctcgcttccttctaatctccttgttagcatgttttctctatatgtcaaattatgcaagggtgagtacttatgtactcagcaagacatattataaataattaaatgtgaagagatatgaataaataaaacaataataaagtaaaggaataataaaaaccataaatcatctttatcctcaacattttaattttaaaaatacttatacttcaggagtaggaatcaccctgatgacacaactccagaaccgggagtacggcacattcgaatgatttaattcacctctgcagagactgtccagttttaaccgcacgatgcccacagctagctaggctgagaacaacagagccgtttgaaggtcccacttactactagtaagtctaggtctgtccccattctagaagctgcggtcgtactcgttcgtttgacataagtacttggtaaacttatatcgaccaagacagtactagccacccggaaatcaaccaattcctgcgtactgtcccaatctaagttcattgtatttttatgcagtctaactaggcagggctaagcaaaagctagcatataactggtttgctatatgttcagattatgcattcaaaatcatgaatggctaatgcatagaatagaatgtagaatataggataattatgctcaaaggggaggaataataacttgccttgctccaacgcaaataaatacgagataggcaacctgattatccgattctcgaaataccataggttgccatccaaaagacaataaactctactgagaaagaggaagaaccaaatttaataaaagccataaaataataagaaaacgataaacggctaaaagggctagggtttaaggtataacctatctcttttatagggtatagggattatggggctagtatttgctagcggtaggtttaggtagtataatagctagggttcagttatatgggagttgattgtggagtaggatagtatattggttaggctctatattttatgtggaggctctcgtggtttggacgataggaaatatactagatagttgatatggttaaataggcatgtggctaatatgggtccaggttggctttgatagaatagtggttaggatttagttgtttaggccgatatcgaggtaggataaatatcggctagggttttaggtgtttgctagtcgtcgctagagttggacatcatgacgactaggtttagtatcatttctagccgtgtcgatagacaacatatcggctagaagaataggaggtgggtgcaggtttagtggggcggaagtgttactccgacaaccgtgagtggcggcggagcggcttggatcacacagagcccgagagctaactgtgcggcgtgcaatggaggtcgaggggatagtgaagctccgaccgctatacgcatcaaggcgtggggtgccaggagcagcacttcaaccttgggtttggtttatgccgagctttacaaccaacggtccgacgttgaggttcgtagaccgcgcaaacgtccccatggaaggcgtaaagttctaaccggcggctttttagtggctacagggtattttggaaataaaagaaaatatttggaaagcaaatataagtttaagttgtaaattcaattaaaagattaaatcaaattttattcaaatggcatttgaataaattaaagaaattcaaataaaatcttaaaatagcaaatttgatatcaaaatgaatagtttgaatttatatgaatttaggtccaaatttcactggaatcggatctacggtttaggagatataggcttctaaaaattgggatttgaattaaatctaaaaaatacaaaaagttactgttgatgggcccacctgtcaatctccttttctttttctctctccttctctcgtcgtcgtcttcttctcttctctgttccagagagagagagccgagagaagagagaggagaaggcgagcggggcggcggctctccggtggctggagggcggcgacgtcggcgtccacgcgtgttcccgagcaagacatacccggggagggcggtggctggcggagagagtgaaggagttggccggaacggcgcagtcaagagcttgtcttcggcggcaaagagaggtggcggtggtggttgctatggggtgggggagaaggggaaaacgggaaaaatggaatcaactcgtcgaggcgaactcgatggcgcgatggtttggcttgcgaagctccggtgagggagatcgggtggtggcggccatggggaggagagagaactggaactcgattttgtatggaatagaggaggggtggccggctatttataggggtgagaggcggtggtgagaggcggttcggaggaggagatcgagaagacacggcgacggtagcgtgaagaaaagaatgacggcggccggcttcgtttgcttagcggcgacggaagaggagttggcggcggcatgcgccgtgcacggcacgcgcaccaggaggaggaggcggctcggctggtggtgtgggctggtttgggccggcttggcttagctgggccggcagcccaagaaggaggaggaaaatagaaaataaaagaaaagggattgggccaaaagaaagaaagaatggagtttcggcccgatgacaaaaagaaagaagtctaatctgaatacttgatttggataactaggttttgcaaaggatttgaattcggagagaattcacaaaagagatttcttaagttatttgagtgcaatatttacagatggagtttgaggaaatttatttggaagcactcaaataggaagggaaattaataatattcctcaaatatttttggaatatagaagggaattagttgaaggcaataaataggatttgaactctaaaattggtattatgtatatttgtggctaaaaggggaaattgagtgaagaatataaattggaattttcttagcacaagagctattattcataatatttgtaataatacaattcttatgccgaagaggaaaatcaagccacaacgattaaattggtggctagatcaaaaggaggaaaatggatatttggatcgagaatcaaaggatgggtttaagatcaaaggatggattagcaattaattccaatgagattggaattactttggtctaggttcaaggacgaaattggaggatttcttggaccataattcataatagtaaaaatggttttcaaactaaatttgaataaaagagttttaatcgaaagaaggtttaatattcgaaaatagaattccaacaagaaataccaaatatgtttttaaatgaaaaacacaaaagggattaaataccagagaggttttatgcaagttaattttaggaagtcccgctaagtatattttcctaggtttaaaaggttattaagaacataagaatcagcatgatgcaagattagaaaatgacatattttcaggatgttacagcaaggtatctatatcgtcacactttcatgaatcccactgttgtgaaacactgctgcccaaactccttacgcaagttcaccccaaaaccgctcatagagccacccaacagtctttcatatagtgggacaatgtactaggctaagttacttgatcgtgcggatggacgcaactatgtcatttcccatgggataagggggtaattataatccggttaaaccacccaaaactttccaaactccccacaccaacatcacaaacttcatcattcatcaacattcataatcacaactcaataatgcccattttaaccggattcctaagtttgtaaagatatttaaataataaaccacataaaatgatgtccaatgcatctttctatgatttcatgtggcagtgctcggaagcattaataattaccacaatgttattctgaagtataacatctacccatgagatgttaaaagagtaattatcatgcatcaaatttaaatatgaagattatctccaaggtttctatatgattaaaatttttagttatgtcttgccttgcgccttaagattccccggcggtttcagcgtgccattctggggtccaccggtccagttccttggatgtcgacaggacttggtggtacggtcctaacggtaccgaatacgaaaacctaggcaaataaaagccctattaagcaaatggctaccaagaaacgataaagccaaggaataaaattggagcgaggcgagaggacaagggaatgggtttaaaataagttttaatttgaaaaataaagagaggtgttctacaggttggagattgaataaaatcaaataaagaataaatttggataggtggggtctattggtggattggtttctagtcggtgctagaatagggcagcacgacggctagatatgtggagttggttagccgatgctaagatgggtagcatacagctaaatgtttggctcgtctagtcgatgctacagttaagcagcacaacggctagagtcgggaaaatttgtgggggtttgcaagatggaaagtgttactccattgccgtgagtggcagcagagcggctaggatcgcatagagctcggaagctagtgtgctgtggaggtcgagggagaagtgaagctccgaccactatacgcgtcgaggcgtggggtgcgaagagcaacacttcgaccttaggattagattataccgggttttatgaccaacggtttgacgtcggggtttgagaccacacgaacgtctccatggaaggcgtaaagtttccacagcagttttttggtggctaaaggatggtatatgagtggtttaaaaagaagtattttaaataaatcaaaggaatttaaattcaaaaaggggttttaaataaattgaaaaaataaaatttaaaatggtattttaaaagaaataaagaaaaggtaattaaataaataaaagatatttaaagaaattaaaagataatttaatttaaaagtttttttaaataaagcaataaatttaaaattaaagggatttaagataaataaaataggtttaaattaaaaaatatttaaataaataaatttaaataaaattttaaaataggaaatttggtatcaaaagagagggtttgaaattagatgaatttagatcaaaagttttctggaattggatcatcggttggtgagatatggatgtctaaagtttgaaattgaataaaaagaaaaaggattactttataaaaggtgggggccactgtcatagcctcttctccttcttctacctcttcttcttctgttcctgtttttgccgaacaggtagagaggagagggaggaggggcgctagagctccggtggctggggatcggcgacgttggcggcaacgtgtgttcccggacgacgcgcatctggcaaggatggtggccggcagaggtagatgaggagttagccggaacggcgagcacaattgcatgaaccggagagagagagagaaagctccggtgaggctcgattcgaaaggaaaaagaagggggaaaggggtaaaatgggttcaccagagggaggcaaagccgatggtgcaaggaaactaggagggaagctataggggaggagatcgaccgatggcggcgtcggccggacttggcaggagagagagagctcgaggagctcggctatggggaaggaaacggggtctcactggctatatataggccaggagaggcggtggagtaggtcggttccaatggagaatagcgaaggatgcacggcaacggcgacgtggggaaaaagaagtacggcgccggctctgtccgttgattggccggtgatggcggttcggctcggcggcgtgacgtcgcagctgacgttggtgatagatccttcgcgtcgacggcaagacaacggcagcggcgcaaagctgcgggcgacggcagcacaaagccacggcgacggtggcggcggtgtgccacgcgcgcccacagagaagagaaaggagccggcttagctggggctgggtcggcttgggctgaggagggagatgggccgaggggagaagaaaaaggaatttcggcccgatttgaataggaacctttgggaatttttgtgtagaggattttaaatggaatttaaaggagatgaaatctataagaagaatgtttgtggactttttgaatttgactagaattcaaaggggaaaaaattctaaaggaagatatttgtgaaccttttgaactttggacaaggaatttaaatagagttaaaggaattttaaactagaggaattttgaaaggcagggttttaaataaattaataaattttaaaggagataaaatttaaaagaggaatgtttaagggtctcttaaactttataaaaggatttgaaataataaagggttttgaaaaagttcaaaagaaaggagttaaaatacttataaaataaaatccagatattattttttgagatataatttgaaaaggataaacattaagatgctccaattttaaaagaattcaataagaaccaaatataaaacttatcacaaagatttttctttaaaaattaaattaatcaaatgggaaggaaaggaaataatttaatttctaactttggataaatttgggatggtggcaaaaatagatggaggtaaataactaggattttagcctccaaaatatgtggtatggattctcggtgaattatttgtggctaaaggaagttggattttgagtagaagggattggaaataagtttcttagcacaagagcaatcattcaaatatttgtgataatattattctttgtgccaagaatgtgatcaagttataggaatcgaattggtgcatggatcaaaataggaacttaaccacgggatattttggaccgattaaaaggagacaaatgtttttggggataggtttagataggggttgatccaaaataaattccaacggaaagggagttatactggtttagccccaaagataaaaatggttattaggatataacagagaatcgggtcaatcggggaaatattggcctaagctaaatagtagactttgaaatcttgaatggataatttagatgaacgagatttcaaaggggaaatatttgtgggagtatagaactggattcggaagtatatgtggatgggaatctttataggaacgaaattggtggtatgttgataaactctaaaggatgggtatgttgactcaaaggggaattgaaaaggatattttatggactatgggaatatttaggtggagatccaaaggaaaggtattggttctgggggaaaaaataagaattggtatttcatgtgttcgggtagagatcaaaggggaagtatttgatggaagataaaaatggatttggtggtagtatggtaagctctagagagattgatattttatgtgctcaagagatggttgaatgggaattgaaagggtattggttcgaggtgttcgggaatggattccaaggaaatataatttagagccaaagttagagattacagaaaataaatggaaaggttttataaaatttaaaagagagcgattaactttgcaaataaagtttaaatccaagttaaaagaaattaacagaaggcaagatcacttcagaagaatcgagaagagtgcaactaaaatatttcgcaaaaatttttcccaaaattttgagtccgttacaatcaagcatgtaagataaaagaagttagatcaggtaagatcggctgaaagtccgatactactctaatcggcaaccagaaagcagactagggattgaa

SEQ ID NO: 29548 - DNA, 548 bp, Oryza sativa
caatgcccgcctggttgattttcagtccacactggagcttgctggtcgttggggaggtggagaagtggcatcagctgacggcatgcgctttgtcacaccagtgaagaccatcaactcaggatctaacagaaaatattttggttctggacgaggcatcacctggtataacttcgtatctgatcagtactctgggttccatggcattgtggtacccggtacattacgggattcgatttttgtactggaaggacttcttgagcagcagacagggctgaatccagttgaaatcatgacagacactgcgggtagcagcgatattattttcggtctgttctggctactggggtatcagttttccccccggcttgccgatgcaggtgaggcggtgttctggcgggtgaataaatcggcaaactacggagtactggataagttggcccgaggatatgcagatctgtcaaaagcggagagtcagtgggatgagatgatgcgaaccgctggttcgctgaagttgggtacaattcatgcgtcagaactcattcgctctt

SEQ ID NO: 29549 - DNA, 574 bp, Oryza sativa
atccgagctaagatgaataagttatgaatttttaaagattaaatcggattaaatcatttatatagattttaattgaattatgatgcaataatgaataattttttaaaaggaaaaggggattattgcgtcagtggctcgggttcacggtggaccgggtgcacagcggcggtctacggaaacgaacggccgggatcaaccctatccaaaacagacggccgagatctaatcggtctaccgcggctcacgggaaacgacgacgatgacgtcggcgatgacgtcaccaccggcggcggctcgggcgcgcatgctcgccggcgaacaacggcgcggtggcgcaaacggagggcctctatgcgtagtggacgatgcagcgatccttaccgaggcacgaacggcggcggacggcgacgaggaaaaagcggcggcgacggtcggcttgacaacgacggcggtcttcccgcgatcctcggcgacgacggaggggtggacgaggacggcgacgggttggtgaacccgcgttgtccttcccaagcgacgatgacgacccgagcgacggcgtcgcacggctggactt

SEQ ID NO: 29550 - DNA, 540 bp, Oryza sativa
cgtccaatgaagttccaaagctgtatcaaagaataatatcatttactttagttgtctgtttctagtgataggcttttcactttttgttgaagtggcagggttgtgttgcatgtgcgataaatttttgcatgcttgtcaatgaagttccaaagctgtatcggaaaaaaaaaacatcatctattttagctgactttttcctgatacataactgacatgtgatctgtgtcagtgtccaatgatgtagctgcaactactttatgctgcacccgacttatatatatatttggttatatatgactatgacagttattgctgatggtttctcaacctttccaggtttcattcatgccgcattcacattagggtatgaagcagggatccataagggtgggattgatggaaatctagttccacctggtgctcttatcactatcgtgcagaaaggcctccaatacatagaactagaagcaaatacggatgaagtaagtttgtttgacttctagtgttcattaccttttctgatgcatgctacatcatgct

SEQ ID NO: 29551 - DNA, 676 bp, Oryza sativa
gctgtggtgatctgattgttgggtgtgacccctaggaggcacattagtagtgccttggcctccttgaccatcgtcgtcgccgtcatctgtttcagttcttgagctactatcattggactcttggtactctgggcttccttgggtctcttcatcgctatcaacactagtcgatcgtggacccttgccctttacctttttagatggacgtgcttttggcggctttcgagtcttccttttcccaatatgagtgtcacctacattcgtatcagcccactcagcaatactagaagctcccgtggtccttcgcaggtcatccaagttgactaggtcagacacaagttgactaggcaggggagcgtcactctcagctgaatcttcatctagttcggggcaagcattagagcgagcattgtccatccaggcactgatatgattgttagtttcatagaatgagaggtccgctaatctttgaaggggatcatcgtcctccaccctaatttgggcatttgcttgctgaattcgaaggcgaaggttgtagttcacgtacactagcttgttgagcttcttgtgggtaagtctattacggaccttcgtatgtacgaatgcgaatgtgctccaattcctttcacatccactagaggagcaacattgaccaaccaaacgcaacgcaagcttg

SEQ ID NO: 29552 - DNA, 1237 bp, Oryza sativa
atagtctcatttgcataaatagcatttaataaatatttcagaatttaataaaacagtcagagtattaaattaaacaatattaatccaacgctatacaacataccctgttgcataggcccaaccattctgaacaaccaacctcggctgcacagttctatctccaagccaggaatataccattccaaaccaggagttaaacaagttattaaacagcatcatttaatatggtaagaagtgtgagactaatcacgaaagacattgttagacccgaccataaccgcgggcacggctattcgaatagttttaactctagccagaggtgtaccactgtacccacaagacacaacctcaacatcatgtcaaccaagcgtcgcgatacttaacaagtacccgaatagagattgtgacaataccctctatataatacaatttaaagcagtgcaccgttcctggatcataatcacccccttataaacaaggcatggactccccagcgacccccgtgggcttatctccaccacttcacagcctggtgctctacaatgaaccatactatacagaaagtaaagccgttgctcacgctggcttgtggttggcatggttaatgtttcacaaccgaaaatcgtgaaccggtccttatttttcatgagcacgaccatcaaaaccatgtgctcacaacccaccattatcaggttttagttggcaaattaattaattaaccaatcacgattaaccatcgtgagctatcattaagccatcattaaataatagtgaatcataagttatcctaatagtgtgctaatgtttctaagcatggctaagcaattatgtctaatatctagctgaaccaatatataaagctcaactagtcaaattataataacccaaagtattaaggaatagagtaatcaagaacaaaagggctataacaaggcaataggttatttccacccaatgacattcaaaaataaatgcaatagttgaatagaaacaataactttaaacgggatcaacatgctcaaaggattgtttggaatctgtgtgacttgccttgctcgccttggaattcctcaaagtcttctcctgcaaaatcggactctccgggaacatcggaatctaaagagaaaagagcaaaaacactaaaacagcacataaacaagcataaaaagtacatgtggatatttttaacatgtagatctcaattttagaaaaatttagagacttgaaccaactaaat

SEQ ID NO: 29553 - DNA, 1969 bp, Oryza sativa
attatctctaacaaactttaagataccataagtcattacggcagacttttgccccacacttatctataaggaatttacataaaatatcctaattaatagatacaattgccttcccaggactctatccatgcgtggcaatcatcttgaagtacattaaattgaacccgatgtcgcgtacaagtcgtattgtcggaatcggctacatcgacttacccaacacgactcatacccagccgatcttatcgtagccgatctggattttagccgattcctgctctgctttcaaacccgatttccgcttccgactttgcttcgatctactcttctctcccgacgctgatgttaccaaattcggttgttaacacatgccccccaagtccggaatatttggtaatgtttcggatttgctgtaaatcgactccgagcaagtttcgcactttaccgttttccgaccgttactgccgtgctttaaatactaaccgtcacccccgagaaacctcacaccgtgacacccgttttcaccgctcaagcagaacttattccccttccttctccggcgactcttccgacgcaaaggcgattcccaggcaacctctccttcgacgagatctccgcccgcggccatgtcatcctccgccagcccgtctggtgcgccaatagccgagtacgccgaggtaagttctcatcggctaaatcccctttccttagcaatagattgattttctctcatctcatacctcccctctcttttcgattgctttggattcgtaacatctttcccaccaagtcgcaattccaagcctttcacaccagaaccactacttccttggcccaatcggcaatctcgaccccaccgatttcatcactggtgagaccaaccggattccctttaggctatccaaccctaacctaggtcattggaagaacacctttaaatcctggccatctctcgaaaaacccacacccgacaggagttggtccacttggtatcaacgtgtatcggctagtaagaaagttcactgggatgagattggaatcggccaagcactagccctcaccatagccaattctgccaaagacgaacctctgatggctgccgccacctacttctggtcaaacaccatcaacgctttcctgttcaaccaagggccgatgactccaaccttaattgacatcactatgatcaccggactagatgtaacttcatcggccaaccccatgagcatgaataccaagaaccaattcgatttcaaaaccaagagcataggttgttggtccggctatgtggcagcatatatgggtcaaggatccgttacccctcgagagcacgtagcctttttgctcatgtggctggaaaagttccttttctgtggatccagttgtggccctacaaccaactggcagttcgtagccgaagccctggagtcaaagaaagaattccctttgggcaaaatccttctcggctatctgtaccagatgttgaacaacacatcggctagaatagccgtcggctcggcagttggagcaggtggaccctggtggctactgcaaacttggttaaacctgatggttatgaaggttgtcaatcggccttctgtaacagaagctgagttcccactgccagagccgattgtgggtgacgacggagaagaatgtactcatcgcaggtgcacatgatatggggaatatgcatccacaccaaccgatgctggagcaaagttatcggctgagctgcttaaggactggttctgcagcttctatgagggctttaagaaagatacccggatctggttcccttatgaagaatcagcagacctcgaacttccatcagattttagattcgaagatattaaccatgagatccagaaatccagagaagttttatagccgcaatcagcccttgcattcttcctgtcggcattcaccaagggagaaacatccaagtctcctacgagttttatcacccaat

SEQ ID NO: 29554 - DNA, 4285 bp, Oryza sativa
tggggtgaatagaagctacatctgtttcatcaatcagccacgatgtatatgacagatctgtcccccgacgtcataccctaggtaaacattgttactatcaaattgcgtagtcaattaatcgatttattacttaaccaatcttttgctcctgctttgcagacaacagagtcctcccctcctcaccaaagcaatagtggcaagaacattgagtatgcttcgggcttaattccaaatggaggtgggctatctccccctgttattggctactatgcccccaagacctcaactctccttcacggcctaactagagaaccagccgatgcaggcccaaaaaggaaaaccagatcctcggctgtgagcacttcaatcttggctccaaagaaaaaggccaagttcaagaaaaccaaaccgactgacaagccggccgatgatctgcccaccttggatccatctattgaacaagccttagatgaagagataattgaagacgaagttgatcaggccgcagctgaagtaagcgatactgaaagaacaccatcggcttcgcctaagcaaacccttccaactccttctgccccagtccacttctcaagggtaagtgtttctcgttaatccttttagtgattattttgtcttatagccgatcattcccaagtcttataattgcagaaaaagaagactgcggtgaagaagaaatcggctgcaacaacatctaaaccagctccaccagtaagatagatttaactttcattagttaatttttagccgattctatctgacacttgtctccctttcagccttcacctcctccttctccttttattcaacaatcatcaagtgatcagaccccttcagctgcagggagtcatcacgtcgaggaagaagaacaaccaactgctcctgctatcttagtaagtttcttttatcacaacaggcattcaaatcggctataatcgtttaacctctaatctgcttctaaattgttattgcaggcattggccgatcttttctctttcaatatcagagactatcttgatgaaggagaagaagatactacaagcaaagcattggctcctttatctgatgacgtgaagaaaactcaaggaagtattttggatcggctagaggcatcatcactagacagcttagtagttgactgtggctcaatcaggctcggctgcatgagattcaagccttaatcccggatgagttagccgacatccttactccagctgtttaccttgagcaacaccaattcaagctggagaaagccaagttaagattagtcgaacggcgagaatgtaagaacattgaagccactatccaagccagccgacaacttgtgcatgaagagaaatccaagcttgaccaattatctgaaggcccaatcaagtctaacattgatcggcttgaggctcacaagattgacctcttagcacaacttgaagaatgtaacgccgagctggatatggagcgcaagaagctagccgatctccccaagtctattgaagaacagaaagcaagacttaaatcggctatcaagcatgttgctgaactgaccaagtccctaaaagttatccctcgaaccgatgctcaagatgcccaagccatagaagaagtagagcagattaggcagaaggctatttcggccatctagcgatacttatctcagtagtctttatgtaataatacttaagacttttgtaatcggctaaaacattctgatactttattgtcttaacaaccctttgcgccgattaatatgactttgaaatttgctcaaaaaattttgtactgcatactgcattttgatatatatatgcccccctagttttacaatgtcaagagcattgataaaattataaaacagctaagggcgatataacaatatcggccattttacatcggcaaaccacaaccgattacattataaaaaaaactaagggcgatataacaatatcggccattgtacatcggcaaaccacaaccgattacattataaaaacaactaagggcgatataacaatatcggccatctcaaggcgatgtaaacacatcggctgtcacgcatcggcagtagtagccgatcatgcgttaacccacacacttgggtaatatttcttcaagtatttgccattgagcgctcgcccgtaaacttcaccatcaagcccttgcaacatatatgcccccttagacacaaacttatgaatttggaacggtccctcccaattcggcaaccacttgctaaatttactatcatgagtaccaatcggcaaaatcagcttccatacaagttcaccttccgaaaaatctttaggtacaactttcttattataatgccgagcaacacgttccttatccttagtaaccttcgcaagggctcgcaatcgtgactgaaccaaatcctccctctcatcagccataagattgtaatactcatctgctgtgaaatcgttttgcaactccgttcgtcgagagccgattctaacttcccatggtaaaacagcctcatgtccataaacaggtttgtaaggaggaacttggatcgatccatgacaagccatcctataagaccataatgcttcggccaatcgagtatgccattgccgaggataatcagaaatcttccgcttgatcaacttaatcaaactcttattagatgcctcggcttgcccattagcttgtgcataataaggtgaagaattcaacaacttgatacccacgctatcggcaaactgaataaactcatcggacacgaagattgaaccttgatccatagtgatagtttgaggaagaccaaatcgatagattatatgctcttgaacaaattgaatagcatcccccgaatcaactttcttcaaaggaatcgcttctacccacttggtgaaataatcagttgccaccaatataaatttatgccctttactcgatggtgggtttatcataccgataatgtcaatcccctaacctctaaattgccatggtttaataataggattcatagccgacgccggtgctcgctgaattgctccaaacttctgacaatcctgacaccccttataatatctgaataaatcttccagcattgtcggccaaaagtaccctgcacgccgaagcaaccacttcatcttgtgagccgattgatgagtaccacagatcccttcatgaacttcaccgattgcaaccttggcctgatcggcactcaagcacttaagtaataccccatcaatcgtccgataataaagctcatcatccaacagtgtatagttcaatgccttatatcgtaatttcctagaagccgattgagatggattactcaaatactgatgcacatcatacctccaatcatcggctgacattgctgcaatctcaactttaacatctttgatcatcggcttataccccgatgccccttgggccaaatcattagcttcaagattttgttctcgagatacatgcttcaaagtaaccagccaaaactctttcattagttccaggcacttctcattataaaccatcaatgtatcattcttgcattcatattctccagccaattggctgattactagataagaatcccccatgatttcaatagtatcgtgatatgaccatggctactacggatacatccgttgctcacatcatggatgaacaacaagatatcaagttcgagtcctccaagtgccaaaatccaattcggccacctgctacactgctgacttcaaacggccgccgaagctccatacgacctccgtttttggcccgtgagtacttgatggaaagctctcggagtcctctttccaatgcatcaagcctcgttgccaaattccatctcagtcggcagcaactgaagaaacaaggtgctgcgacacctgtaatgggcctatgggcttgtaacttcatttgggaccccggcccaggtggggcccatgtggggtgcgccccaagctggtggagcacgaccctaggcacccctaggtcgtcctcccacccctatatatagctagttaccccttcagggtttctggggttttgttagattaaagtttagccattgctacttgcttgcagcgcgcgtgtcggctagaccgtccgtctgcttgttcttcggaaccccaactgatcatttgtattaaattcctatttgcaatatcagattgcttttatcttgttcttgcttgtttcttcgatttgcttgcaggaatagggttgatctgcaccggcaagatcagcaacccacggagaggtgtatcgatcgctaaggcgcaacacaacgtctcgtacg

SEQ ID NO: 29555 - DNA, 4544 bp, Oryza sativa
acggatacatccgttgctcacatcatggatgaacaacaagatatcaagttcgagtttttcaagtgccaaaatccaattcggccacctgctacactgctgacttcaaacggccgccgaagctccatacgacctccgtttttggcccgtgagtacttgatggaaagctctcggagtcctctttccaatgcatcaagcctcgttgccaaattccatctcagtcggcagcaactgaagaaacaaggtgctgcgacacctgtaatgggcctatgggcttgtaacttcatttgggaccccggcccaggtggggcccatgtggggtgcgccccaagctggtggagcacgaccctaggcacccctaggtcgtcctcccacccctatatatagctagttaccccttcagggtttctggggttttgttagattaaagtttagccattgctacttgcttgcagcgcgcgtgtcggctagaccgtccgtctgcttgttcttcggaaccccaacttatcatttgtattaaattcctatttgcaatatcagattgcttttatcttgttcttgcttgtttcttcgatttgcttgcaggaatagggttgatctgcaccggcaagatcagcaacccacggagaggtgtatcgatcgctaaggcgcaacacaacgtctcgtacggttgtagtcggatcgtcaacgtttctcccaaatcgtagttatcacaactcaccgaaagatcgggccaacaacagccttgagtgtcgagaggaactcagggttcatcaggtggtatcagagctttcgttgctcggtgagtttttatcttcctataaccagaaaatagccatacaaaaaaattcgtatcatttacctagccatattgtgccattgcattgttcttttcagtttttgctttgttgaattttgtgttgcatcgtcacgtcgtgttgctggtcttagcgtctagttcgtttagagtttcgagttctggtcacgtttttgtaccacagtcgtcgctgccaccgtgtctctgttgttgtcgggacctacgaaaacggaatcggctcgctgccacggttctatttttgtagttttcagaagtttctgtcggttagttttggagttattgagttgcatctagagtttgccgatccttgtgtgtgtttgttttggccgtgcctgtgtcgtgcacaagaggaggaaggtgaattaccatatctgattttggaagtagtcaagtttgttttggaaagatatagtagattggattggttaaaaatcagtttccgttttatcccatacaccaaattcggctgccatccactccacctccttgccgagtcccactcgcccctttggccgagtctgaccccctccctcaattccacggttccgagttgtgtcaaacaccttggcgaatttttgtttggtgtcggtttcgagatctgtttggaaaaacggaaccggcataaattcagcattccatttttttgtataattttaattttgggtttagacttttacatttgagtccctataaattttatatttatgtttgagtccctgtaatcttacattaaggtccttaagtcagtttttgttaaaaaaaataaaaaaaaaagtgagaaaaaaaagggcagaaaggtgcaaaaaaaaaagaaaaaaaaagccgcaccaaaaaaaaatcagaaaagaaaaggaaaaaaaaaagaaaagaagaaagaagaaagaaagaaaagagaaaatattgttttgtttgagctgaacttcatacatcagagtgtgcttgagttgtttctggtgctattttgtggtaccgtttgtgtctaggctcgcgtctctagtacgttctagcctaggaccagcacggtacttgactttgaacaattattcaactttgcattatctgatttgagcatttgctattcctttgctacgtatttaagcctacccagagctccacatatttgattacagccgtaccgcaagtgtttgccaaggcatcgatacatccaaccttcattggggtgcttggttgagtcggtgtatgtcaccattccacttgcattggtaagatcttgtaagagcttggttaaaagcttgagtgtgtgcgatttttgagctgccactacctagtagttaataggaacgcgcatatttttgtgtatgtttcttgttttctactaacaatggcagggatacgcaagataattggggatagctgtgctcaacatcgacatcttcgtcgagacatgaggagggatcaacatgaccattatgaggtaagtgatgatgttctaggtaagatcaaatctgcactgccttatttcgagggaaactatgatcctcgtgcttacattaattgggagctagcggttgatagtgaatttcaaaagcatgtcttgtcggagaaacaaaaggttatgtgtgcctctagtgttttaattaaacatgcttctaatgattggaaacatctttgtaggcataacaaaataccacaatcttggaaagacctgaaactatatttcagatatgtttatgttcccatgtattatgctgacattttgttcaacaaactgcaatgtttaaaacaagataccagaactgttacttcatactatcatgatatgcaagcttgtttattacgttgtggtttagatgaatgcgaagaagctaaagaattgaggtttttatgtgggcttaacaaagaaattcaggacatgcttgattgtcaaagatatacatctctttctcatttgttacaacttgcttgcaatgctgaaagtaaaatagaggaggatatgaaaaagaaacacgctatgtctttgcctccaattactaactatttgcaggaagtgcgtaatcacgaaaaggaggagagagacatgaaagagccaccaattccattgttcacacccaagttcgagacacctccatcatctaaagaggacatccaaggtaaagtaaatgatactgaaattaatcaaggtgagtgcattgttaacgaagtaaatttgtccacttttcatgcaaaagtagagcaaccgttagtggaaccaaatgctggaattcctttgtcacaagttgatttactcgctgttccttgtgataaagaagagttgtgtgataatgcttcacttatatccatgccacaactagtgaatgaacatgctattcctagtgtttctttgtgtgctgattttaagcatgctgttcacattgctaatgaagttgaggaacgtaaattgctatcttctttaaatactttgggctatgttcagtttaatgatttttgtgagctcgataatttgaaggagaaattattttctaagtctgatttgccaagtccaactaatgctatttttcatatctttggcaaatataatgatagaggaatatatttggtgcatagagttttcatttgttcggatttagagaaacatgttattgctaatcacactacttcgagtttctctagttttgattggatgaaacaggttattttgaatggactatataaagaacaccatatggaaaaaccgaggacggttttccgtgaagaaggggaggatgatatgaccatggctactacggatacatccgttgctcacatcatggatgaacaacaagatatcaagttcgagtcctccaagtgccaaaatccaattcggccacctgctacactgctgacttcaaacggccgccgaagctccatacgacctccgtttttggcccgtgagtacttgatggaaagctctcggagtcctctttccaatgcatcaagcctcgttgccaaattccatctcagtcggcagcaactgaagaaacaaggtgctgcgacacctgtaatgggcctatgggcttgtaacttcatttgggaccccggcccaggtggggcccatgtggggtgcgccccaagctggtggagcacgaccctaggcacccctaggtcgtcctcccacccctatatatagctagttaccccttcagggtttctggggttttgttagattaaagtttagccattgctacttgcttgcagcgcgcgtgtcggctagaccgtccgtctgcttgttcttcggaaccccaacttatcatttgtattaaattcctatttgcaatatcagattgcttttatcttgttcttgcttgtttcttcgatttgcttgcaggaatagggttgatctgcaccggcaagatcagcaacccacggagaggtgtatcgatcgctaaggtgcaacacaacgtctcgtacggttgtagtcggatcgtcaacgtttctcccaaatcgtagttatcacaactcaccgaaagatcgggccaacaacagccttgagtgtcgagaggaactcagggttcatcatatcggcttcaacctccttgagtaattgcaaccccttaagcactgcttcatattcagcttgattattagtcgcatacggtttgatagtataagcgaactcgaaagatgcccccctaggggaaattataactaagccgatgcccaccatgagtgcacaccgatccatcaaagaatataaagtccatggtactat

SEQ ID NO: 29556 - DNA, 4687 bp, Oryza sativa
cccctaagcactgcttcatattcagcttgattattagtcgcatacggtttgatagtataagcgaactcgaaagatgcccccctaggggaaattataactaagccgatgccacaaccatgagtgcacaccgatccatcaaagaatataaagtccatggtactatctccaccgagccgattgaatcgtcatgatgttccacaataaaatcagctatagcttgtcccttaatcgccttcggtgattcataccgaagatcaaactcagtcaaagaaaatatccatttcccaactcgtccctttaatattggagccgacagcatgtaactgactacatcggctttgcatataacagtgcactcgttagataataaataatgcctcaaccttgtacacgaaaaatacaggcacaagcacaacttttccacaggagaataccgagtctcagcatccaagagccgtcgactgagatagaacacaactcgctccttcccttccaattcttgaatcagaaccgagccgattgacctctcgccagccgataaatataacctaaacagtattcctttctgtggagggatcaaaacaggaggagagctgagatactccttgatattatccaaagctttttgctgctctgctccccaagtgaattgttgatcggcctttaacctcaataagggtgtaaaaggttccaaccttccagacaaattagaaatgaaccttctaacaaaatttatcttgccgatcatctcttgtagctccgtcttattttctgggggcttaattttcttgatcgcattaacgctcctttggttcacctcaatccccctttcatgaacaagaaatcccaaaaactggccagccgacacaccaaaagcacattttgttggattcatcttcaagccatacttcctggttctctcgaaaactttccttaaatcggctatgtggtcctccacttctttagacttaacaaccacatcgtcaatatagacttcaaccaaccagccgattaaatcatgatatatatagttcatggccctttgataagttgctccagcactctttaagccgaaagtcatgacaacccattcaaataagccgattgcaccaggacatctaaaagccgtcttatggatatctccctcggccataaagatctgattatatcctgcattcccatccataaaactcaaaaatttgttccctgacgcggcatcaaccagctgatcggctaccggcattggatattcgtcctttggtgtagctttattcaagtctcgaaaatcaatgcacaccctgaccttgccattctttttaataactggaactatgctagaaacccattcagcatatcggcagggacgaataaaaccagcatcatacaatcgtttaatctcagctttaacaggttcgagcatatcggctttacatctcctcggaggttgctgacgtggtctaacccctggccgatgttcaacgatcgatcggctaagtccgggcatctcatagtactcccaagcaaagcaatctctaaactcttttaggaactctatcagcttggttctaaactctggagacaaatttttgctaataaatatcggccttggccgatcgcctggacctatgtctatttcttccaaatcattggccgacataaaaccttgaccttgcttgtcattgagatcatctactgtatccttagcgtagacattcgaaccctccacaacgccctcaaagtaatagcttgggttctccatcttcgattggctgtatatcagaatcggacacttttagaaaatctccatcccagaattttccagataaacaatcaaggccatccatctcccaaagggctaaatcggcactggcaacattaactgacctgtcggctggcacgatctctatcttgttgccttgccattgaatcaagcattgatgcatagtcgaagggatgcaacagttggcatgaatccaatccctttcgagcaacaagttgtactaacccttcccatcgatgacaaaaaacgtggtaggaatagtcttgctgccgactgttagttccacatttggaacacctttggtctctgatggattaccaccaaagtctttgagcaccatatttatcttcataagatcctcggcgttcctacccagcttcctgaacgtagcataaggtatcaaattcaccgcggccccaccatcgaccatcatcttagacatcggcttcccgttgatgtagccatttacatacaatggtttaagatgccgattctctgtcccctcgggtttctcgaatactgcctgttctggtgacaagaccaacttagccgattcctcttccacctcatcaacatcggcctgatcgatccagaattcaggtggcaatgtaaagaccatattaatcggtgccgctataacactctttccttttgccaacttcttcacttcattggctgcagcatcatcggctacgggaacctgattcttgacacgccactcctgtcttggctttggtttcctcagccaatggttgatttcctcttcaacctcctgaaaacgttccctgctcctcaatctctggaccctccttttctgattcttcgtgaaaataccagaaggacaccattgattcttcctgatcacctcatcctcttggccacgatcttgattcatcggacccaacctttgatgaacagggagtcttgtctgtctcagccgatcatccctattacgtggtcggcttgagctctcgatgatatcactgcacccaggacagttttcaatagatggcaacctcatcccttcattccagcagaatctgaagaactcgcaaccccaatgaggatcaaaaccatcatcgtactcctcataacgcctctcctgctgcttatcatacttcctctgatacttgttgataatcttagccgaatttacttgaaaaccctttgcatggtccctatcggttgcttgaccagctgtatgcaccatattaacgggaaaaggattcccatcgaccttcatcggcttcttggaatcatcaaacttaatctttcccccctcaatggcaacctggatttgctgtctaaagaccttacaatcattggtagaatgagacctggaattatgccatttgcaatatctcttcttgcctaattcctcagccgatgggatcgtatgaccagcaggaagctgaatctgcttttctcggagtagcaaatcgaaaatcttgtcagctttggtgatatcaaaatcatacttctcctctttcccaggactttttacccattggcatggtataacctttttgctcctcacccattcggctgcagctatctcagaatcatcttcttcgtcatccgacccatacatatatggacaaacgtgattaactttcttagagcttttcctgacttccgctgacctatgctcatgcaaggtcaccttctgtatcaggtgcgataagctatcgaagtcttcggatgagaatttctccctgattggagggacataccctggaaagccaaatcggctaactgagcatcggtcaaactcaagctaaagcacttgttcctcatctttctgaacctttgaatatactcgtgcatgggttcatcatgccgctgcttgatcgctgtcaagtcggacaacttcatctcatggaccccgctgtagaaatagctgtggaattgcttctccaaatcggcccaactattgatcgacccatacggcaaagaagaaaaccaagtaaaagctgatccggacagagataaccgaaacaaccaaactctcaaggcgtctacagccgatgcttcaccccactgagcaaggaatcggctgatgtgctcataagttgacacgccctcttgtcccaaaaacttggagaaatctggaactttaaaccgattgggaagaggaactctttcaaaccactcagggtaaggctgccgatacaaacttctagtttcttttggtttaagtccaaactgctccctcatcacatcggcaatcacatcggcccatggtcattgctgagctgctccttgcggttgttgctgcatgggctcgaattgaccaaactgaggtgcgaactggggctgagccaatccccctggctgatattgggcttgcggggaaggaggctgatactgatagctcaagttacccccttggtaattatgaagattcggctggatgttgcgtaccaagtgctcagggaccatctgaggcaccacagtgccatccggctgtgcatggtgaaccaaatgctctgagacaacttggtttacaaattgctgcgcaggttgcccaccaggtgctgcgaacccagctgatgcattggccgaccccgggtgctgaatcagctgaacgatctgctgtcgcacctgagtctgttggatcggctgaagccgctgccttggcagtgtttgctgaatcggttggataggctgctgtgttgatggtgtttgctgagctggttgtacgacctattgttggatcggctgtacaactggctggattggtagtgtctgctgaatcggctgctgctgcactggatcaacaataggtggaggtggcaaaaacatggcagcaacctgatcatgggtcggcggattcgcgatctgcccagtaggctgtggatgctccctcattaacaaccgaggggggtaccgagctcgaattcgccc

SEQ ID NO: 29557 - DNA, 2075 bp, Oryza sativa
tgaaccaaatgctctgagacaacttggtttacaaattgctgcgcaggttgcccaccaggtgctgcgaacccagctgatgcattggccgaccccgggtgctgaatcagctgaacgatctgctgtcgcacctgagtctgttggatcggctgaagccgctgccttggcagtgtttgctgaatcggttggataggctgctgtgttgatggtgtttgctgagctggttgtacgacctattgttggatcggctgtacaactggctggattggtagtgtctgctgaatcggctgctgctgcactggatcaacaataggtggaggtggcaaaaacatggcagcaacctgatcatgggtcggcggattcgcgatctgcccagtaggctgtggatgctccctcattaacaaccgagggttcatcggctggcctagcgccatagctgatgtagcgggcaagggagttgatgttggcgccgttggctgagttgtgggtgcaatagagggaaccgcttgcacagctggttgaacatcgatgaccagagatcgataattcgggaagacacctccttgcaagtaaaccgggcccgtagcctgatgcttagctatcgaaccatcggctattgtcttcatcatgtttgacaatgtattgactaaaaccccggactgattgatcagagcatgatgcacagtgtaatcaacccgatcttgaaagttgttgaaaaagtcttgtgctagctcattattctgattaagatttcctccttgcgacccttgagcagcatcaccttgagctccgtgcactccttgagggttgtcgccttgatttcctagagaaccatcagtagcacctttgttgctcggctgagccgagccttctggagcttgcttcacctctccatctttagaagaaccggttccaggactatcagcaaccacatttatcttatacttctgaacaagcgttcccttgcgggtttgcatgaacgagctcagatactgatcccgtgcttgctgcatcattgcttcaaactcctgcttctgctcaggcgtgaatttctctggattgattggcatgacattgtcatcaatgatgtcagtcaatcctggcttcaatgccttgcctttaatggaacctgggcttgatggtggtggtgcttgtttctcggccatgaggaagaactgacgtctgacttctaatcaagtcccactgggcgtgccaaaagcgtgttgacagaaaacacgtggcctgggagatctgcttaactccagtgcaggtccaaaactcgccttcggatgtattagcgtgccagttgatttgattctgtaatcaacaagaaataaaagcaacgaaaccgtggttaaatctataaatgatagccgatcggctagatgccgatgacatatcatttatctttgggccgatgtcatctgtgtatcgatcggcagtcatgaataagtaaataaacactaaatctactcgatcggctgtagatgttaacgatatatactccttatattggtatatacttaaatcgagtgattggcatagatcggacaccatgctgagacagtataaatcacttagatcgaaatatatatcaataacaggattatatatgtttatagcgtagccgatcagatagatctagcgtgtatcggctaatactccgatactacctcatatcaggatattaaagcaggtataatatatcaaacaaagccctaacatatttagatgcagcaatatcttgatagcaagggcagatttagcatatcgatgagacatgtagaataaatatggctaaatcagatacgatcggctgaaaccccgatgctattcttatcggcaactagaaggcaggccagagatcgatattctaaacacgacttaatagatcaaactcaactgatgcagcattaagtatgaaaagaagaaccatatctagacaatcaagccgctagcagtttcatagaatggtagatatcttatataatctagatcaacatcaagatctaacctaatcggctgccttctgcatacagatattgaccgatagtagtttagatggcgatatcgttaga

SEQ ID NO: 29558 - DNA, 3715 bp, Oryza sativa
tatcggctaatactccgatactacctcatatcaggatattaaagcaggtataatatatcaaacaaagccctaacatatttagatgcagcaatatcttgatagcaagggcagatttagcatatcgatgagacatgtagaataaatatggctaaatcagatacgatcggctgaaaccccgatgctattcttatcggcaactagaaggcaggccagagatcgatattctaaacacgacttaatagatcaaactcaactgatgcagcattaagtatgaaaagaagaaccatatctagacaatcaagccgctagcagtttcatagaatggtagatatcttatataatctagatcaacatcaagatctaacctaatcggctgccttctgcatacagatattgaccgatagtagtttagatggcgatatcgttagagattatataaggtatatgataacttgatgaattacataaacaggactagagtgtcatgaggatggaagcactaatcctaagaacgcaatccatcacgacgaatgttacctcttgttgtagatcgaaatcgatgcagctcaacctgaaagcaagaactcgtcgaaataaaactaaagcaaaaggatggcgatgtgcagagattgtattgaacatgtgtattaaaaattacatagggctcggggtctatttatacccgaggattacaagatatgcccataccggacacgactattatctctaacaaactctaagataccataagtctttacggcagacttttgtctataaggaatttacataaaatatcctaattaatagatacaattgccttcccaggactctatccatgcgtggcaatcatcttgaagtacattaacttgaacccgatgtcgcgtacaagtcgtattgtcggaatcggctacatcgacttacccaacacgactcagacccagccgatcttatcgtagccgatctggatttcagccgattcctgctctgctttcaaacccgatttcctcttccgactttgcttcaatctactcttctctcccgacgctgatgttacccaaattcggttgttaacaggaacgcacacgtggaaggccaggatcaaaggcgccggtggtggttcggccaaaccttgggccccacctcctggccttccctttggccaggagactgactggtgggccctgatggcggttatgacagttatgacgcattccatggcggtttcacctgacttatgggcccttcaatccgtgtacttgcgtctaattggccagaggtgtgtttccttgcatgactggtgtgttttctcattaaaatacccgcatacacatatttcaccaacactagtggaattgggtagtaataatccctaccactaagttgaataccatattttatttcattattttatttcattatatgcaggtattgacggtcaaatattatgatttaaagaccatcaacatttggcctaatttgtggtcccatcaatccgtgtgctcacacgtgattcgctggtggtgtgtttctttgcatgccagcttcatttctcattcactttggtgtataatctccgcattcatgttaattctcttagtctagtacaactacattatttattattgatatacgtataagaaatgttaattttccctttattcattgtatacgtatgtcacgcccagaagttcttctccttagcaaaaattcaattaataaattgttgcaagaaattatttgtttaaaggcaagagagaaaccctaaattaataaatgcatttaataatcggaatcggcatgtgaaatttttcttagattctacatgctctactacattaacaggatttttagtggaattttcagagccttggaaataattttaaccaattaaaataagcaaagtgcaatattaaatccctgggaaaatcctttttcccttttctcttttctttttcctcctttttccttttcttgggccgtcggcccattccttcccgcgccggcccgcttctcccctccccgaagtcctccctccctccctctctccttcgggcgccgacaggtggggcccacctgtcggtcgtcttcctcctctagccgttggagccgtagctccaaccgccggcgccccacctcctccactccgcatctgcgccccaccccacacccacgtcgccggctcgccgcccgcttccccctcctctcccgcacgcgcgagccccgcaagggcgggattcggtttcaatcccccccccccaaactctctctccccactcccccacgtcggcgagaaatccggcctcctcccggcctcgtccgtccctcccgagcccatataaaccatccccgcattctcctcctccatgtcctttatccatcagccgctccgtagctctccatcgctcccgcaccgatacaccagccgccgccgccttttccactcctccggccaccgctcaccattgctagcaccgccgtcgggttcgcacggctgaggtccacctcgtccgccgctcccccgtccaattccgtcaccggagcccgcatctcctcgcactccggcgagcttccaccattgccgccgccttcggccctagttttcgctcgccgcggacctcccttctccctctaatctctcttattttgacaactaggtggttccggacctcgttcggcacttgccgccatctcccggtcgttcgccatcgccgttcgtcgtcccttcttcccgcgccggccaaccccatggtgagaactccctgtcctccctctttctctccctcccgtgtccactgccatccaccgcgtgcgcgccattgccttcggccgacgccgacgccttccgcgccgttcgccgccgccggttgccatcgccggcgaccgtgcaccgccgccgctcgctgtagccggccggccggcttggagccgagccgagcccggcagacgtcgcccctccccctttttggagccgcggccggtggggcccgcctgctagtaccccctccctctcccttgtgcctccgacccttgggtcccgcctgtcggcgccgccccaccccttggatgatgtcagccctaggatgctttattgcacaataaatcaataaggcttttctttaatagtaaaaacacaaataatcttctaaaaatcatatctaattcatccgagctccgtttaaatccattcaagtcttagtaaattcataaaaatgcatagaatccattaaaaatggttttgtttcctgtttcagtagacttatagcatgttttgcttgtgtgctttgtttgttgcgtagatttcggtcgttccgtcgatccgcggtttctcgaagacgttgctgtggtctcatcagtgcgagagcaaggcaagtcatgcattagattgatcatattgtacccaatttacaagtgtcccgcatttctattaaatgttgcattgttttacaatatcatgtgggatgggtcctaccactcagccatatcttgtttaccttatgccattgatgataacttgggtatttgttgatagaaaacacgtggcctgggagatctgcttaactccagtgcaggtccaaagctcgccttcggatgtgttagcgtgccagttgatttgatcctgtaatcaacaagaaatagaagcaaagaaaccgcggttaaatctataaatgatagccgatcggctagatgccgatgacatatcatttatctttgagcc

SEQ ID NO: 29559 - DNA, 807 bp, Oryza sativa
tggttttccgattgaaagatgaaaatcagattcgatgacaagttaagggacctcagataaacttattcctttccctaccccggcccaaacctagcgcacggcccaagccggcccagctagccaagctgagcagcagccgccgccttctctcctctctgggggtgcgccatgggcgcgcgtggcgcacgcgcatggcgcagccgctgctattgcctacggcctgcgccgccgcccgccgttctccactgtcacgcccagaaattcccgaatagaatttcaagcggaatgtgcattaaaatccccgtccaggaccagccggggtacacaaacgacaatgttgacattcagatccacgtcttacaaacatcataaaagtcttacacaaatgcagcggaagaaaagaaagacacaggagctaagccttgactaaaactgcagcgggaacaccactccacaggcatcctcgacggcacggacgaagcctactcctcggagaaaccttcatctgacacatactcgaactctggggttgggaaaagtagagcaagactgagtactacccactgtactcagcaagtcataccggaataggggtatgatgcacggaatcatcaaagaagagctaaagtggttcatttgcataaagcgagcatttataaacagaagttgaaagatttaaacagttgtaataattaaacaatatcagctatccactgtccaacgctaacccacgttgcgacaggcccaaccatccacctaaactatccaattttaaaagattacactagggtgagacaaatcatggtg

SEQ ID NO: 29560 - DNA, 642 bp, Oryza sativa
agctcctctaccgactgttccggccacatcccacactctctctgccggccaccacccttcctgggtgcgccaccctcaggaacacgtttggccgccggcgtcgcaaccacccagccaccggagcaccggcgccccgctcctctcctcctggtctcgggtctacctgtgaagaacgaaacagagaagaaagaagacgagaggaaggatgaaaaataaaaataaaaagaatagaatattccctgacaagtatagatggacataagacccgaggccaaaaggaccggcccacggcacggtattttggctcggcccaagcacggcatggctcaacttgggtcgggtccatgccgacccggcttgaccgcagggccgtgcttgggcctccccaccgacatgctgggctggcccggcacggtcgggcagaaaggccaggcccggcacacaaagtataaaaaaaggggtaaaaccctttaagaaacaaaaaatagacatataaactaaaaatcggtgcgcctgttggcgcccctgaatttttcgcccatatacgtctataaacaaaaatatatgtaattaataatattttaaatttctaatttttggtgttaccaaatagtaggtgtagtgtttatccgaacatttata

SEQ ID NO: 29561 - DNA, 4020 bp, Oryza sativa
aaaaccatatgctcacaacccaccattatcaggttttagttggcaagttaatttattaatcaatcatgattaaccatcatgagctattattaagccatcattaaataatagtgaagcataagttatcccaatagtgtgctaatgtttccaagcatggctaagcacttatatctaatatccagctgaacccatatataaagctcaactagtcaagttacaataacccaaggtatcaaggaataaagtaatcaagaacaaaagagctataacaaacaataggttaattccacctaatgacattcaaaaataaatgcaatagttgaatagaaacaatagctttaaatgggatcaacatactcaaagggttgtttgggatctgtgtgacttgccttgctggccttggaattcctcaaaatcttctcctgcaaattcggactctccgagaacgtcggaatctaaagagaaaagaacaaaatcaccaaaacagcacacaaacaagcatgaacagtatatgtggatatttttaacatgtagatctcaattttagaaaaatttagagacctgaaccaactaaatccgagctaagatgaattagttatgaattttcaaagattaaatcggattaaatcatttatatagattttaatggaattatgacgcaataatgaattatttttgaaaaggaaaagatgattattacgtcagcggctagggttcacggtggaccgggtgcacggcgggggctcacgaacgccgagatctaaccctatccaatcggacgggcgagatctaatgggtctaccgcgactcacggaaagcgacgatgatgacgtcggcgatgacgtcatcaccggcgacggctcggatggtgcaagctcgccggcgaaatacggcacgacggcactaacgaaaggcatctaccggttgcggacaacacggcgaactcacctgtgaccaaagcagcggcaacatggttgacacgagcctttgttgctggtgtggaggagttgttctgagcagggatgacctttgcgcggcggggcttcggacacttatcagcgtaatgtcctgggccaccacagttgaagcacaccccgggcttactgccttgctccctcttggcatgctattgctgtgacggagctgcaatagagcgtggagcttgattgcggatgttgttgcccgcgctgttgttgaagaactggcgctgcggatgaacaacaaacgaagaacctccctgtggcatagattggggtcccaaagcaagacgcggcctctgactatttccctgctgtgccttgaagtgagcaatccggcgtttcttctgctccatgcgattgtacttgtcctcctggcgaatagccttatccactaacttctggaaatcatgataatccccagtcatgagtgggtaagaaagctcatcatttagtccttccaagaacttctcttggcgctcttcatcagtgcgcacatcttccggagcataatgagccagacgattgaactcgtgaagatactcagtgaccgtgcgagaaccctgagtgagcgacctgaactccttcttcttgagggacaccactcccgatggtatgtgcgtcttccaaaaagcagcggtgaactcaagccaagagataggttcagcagtagtcctgttaaggcggaagtgatcccaccactcagaggcagggccatgcagctggtgtgaagcaaaagagactttctcctgatctgtgcactgaagcaggtccaacttcttctctatggtgtgcagccaatcatcagcttcaacaggattggtggtgctagagaaagtaggcggcctcacacgaagaaagtctaccagcttattctggggaggcgcatggttgtttccctggttctgctggttctggagttgctgcatcatcatattcataagctgtgcctgttgagccaggacttgagcaagcgtgggattctctgcattgttgttgtagttgttgttggggttggggccattcccgttgctgcgagtaagcaccatctggcatagagaggagcacaagaagagaaacaagggaaaaactacttagaatagggaattaattttactaacttaacttttattgatattaactgagtttcactattagaaaactgaaaactctcacacctctaaactcaccaacctcctaaaactagaaagcaaacaaagacatgcatttacatcccaccaatgatgtaaacacatgcaagacccactcacacaaccaaacttaaacaagcaaactaacacaacgatctaaggcaatgacttaacaaggcatctaggtcttccgggcatcggagttgattgaaggctcgttcggtgcgtccccatcgtcttgagttggtccccactcgatcttggaatgggtgcgcttggattcttcttcatcatcatcactcacattgacgaccggaggatccgctggggctggggtagcttctttttccactacacgaacctttggcgccaactggtagcgagggacgaatagagctctcttccttgcggtaagacgaaccttggccttctgcggtggtgcttctcccttcaatgctgctagctccttctccaaatgatccaccttgtcatctagcttgcaaatctttccccggttccggtcttcacgatcttgagcggctatcacaatctcaatgcgggtttcatccatagcccatagcatctcaaccaaatgccttgtggtagcatcattctcaatccctgccggttctaggtagctgccacggtcacttccctggggttgacgaggatggtaacggtactcggtgtcggccaaccgatcattgtaactttcgcggagctctcctatggcgatccttgccacctcctgacaagcatgaatgtagcttccccctccagcctcgaacatcaccgatgggatatcttcacgattactgttcaaggtgactttgacccagcacttctcttcatcacgatcatgagggatctgggcatacaaaggggcaatcccaaatcctatgaggaaagacatcgtacgcaactcctggacaaatccttcagtaccaaacaagtactcaagcttgtagcacagcatctaaagacaagtgaaatgagggagttaagtcatttatctagttaatagcacaagtttttgggttagcttgaataaagttagaaattcaaagtaaaaagtaaataaataaagcaaaccaagcttgcaagataagttgaaacagttagaaataggttcacaaactttgcacttttgaataacaggtatcaaagaaaataaataaaagagagttataaaatcgatatgctaagcttagttcattgcagcaaaattaaataaaacaatgttataaaacttttgatggtaaatgggccattagtacggtaatagatgtacagtactaacaacacaggaataataaataaattttgaatgagaacaataaaagaggtcatgaattgcatgtgccattagtttggtttaattaaaagagagagaggagaacagttctacttttccaatatctttagagggcttctatgggtaaccatttggcaaaacctagggtcaaggaggctccgataccaacttgtcacgcccagaatttctatccaaaattccaaacgcttacatgtgtgtaaaccctcgtccaggaatcagccgaggcacacaataacaaattgataatacagtacaattattactctaattaataagcgaataaaatgtcattacagaggtagatagttcctctcaatcaaaagaaacagcgtaggcgattcctctccacaggtagcttgaccagggctacgcctaatcatccactccatcagcatcactgtagaactcctcctctgatgaatgattgcaaggtgagtatatgacatactcagcaagccacgcagcaaatatgcaagtgcacaggataacaaagaatggcatagtataatctcatttgcataaatagcatttaacaaatatttcagaatttaataaa

SEQ ID NO: 29562 - DNA, 3624 bp, Oryza sativa
gaaaacacaggttacaaagggaacaatggaacatgacggatccagcaagatcgtggtcgagttggttcgactagatcccggcgatttggctccttgcgggctccgacttcgtaggctgtgacggttgtgttagctctgagattcgatgccttaggtactccctggggggtcccttttatatcgcaggtcaggcggtctccaagtagaaatcggagatatcagaccctatacgatacattgacgacccagtcttgtccgagtaggacttttcccatccgtagattctgtgaatgatttccttagtgtacgcaggaagtatccgtatgcgcgtgggtataccataccgatatgtgacgtatatcgaagggtaaagggtatgcctaacccgtaaccctgacagtagcccccgacttctgcttaaaatgagctcgtgtaaccattcacaacttctagcgtcgagactgttgtcgttcccagtgcgaggaccgtaaagacaagacatagtcgagaacaccatttgaagcccaacggtcacgagcgaatttgaactgaagtccaaaaaaccgccgcgcgtaacagacccagaaatttccggcgggcatctcagtcacgcccggaatttctatccaaaattccaaacgcttacatgtgtgtaaaccctcgtccaggaatcagccgaggcacacaataacaaattgataatagagtacaattattactctaattaataagcgaataaaatgtcattacagaggtagatagttcatctcaatcaataaagttctaagcagcggaaaattaaaagaaacagcgcaggcgactcctctccacaggcagcttgaccagggctacgcctaatcatccactccatcagcatcattgtagaactccttctctgatgaatgattgcaaggtgagtatacgacatactcaccaagccacgcagcaaatatgaaattgcacaggataacaaaggatggcatagtataatatcatttgcataaatagcatttaacaaatatttcagaatttaataaaacagttaaataacaattaaacaatattaatccaacgctatacaacataccctgttgcataggcccaaccattctgaacaaccaatcccggctgcacagttctatctccaaaccaggagctaaacaagttattaacatcatcatttaatagggtgagaagtgtgagactaatcacgaaagacattgttagacccgcccattaccgcgggcatggttattcgaatagattaaactctggccagaggtgtaccactgtacccacaagacacaacctcaacatcatgtcaaccatgcgtcgcgatacttgacaagtacccgaatagagattgtgacaataccctctatataatacaattcaaagcagtgcaccgttcccgcatcataatcacccccttataaacaaggtatggactccacagcgacccccgtgggcttatctccgccacttcatagtctggtgctctactatgaaccatactatacggaaagtaaagctgttgcccacgctagcttgtggttggcacggttaatgtttcacagccgaaaatcgtgaaccggtccttaattgtcatgagcacaaccatcaaaaccatatgctcacaacccaccattatcaggttttagttggcaagttaatttattaatcaatcatgattaaccatcatgagctattattaagccatcattaaataatagtgaagcataagttatcccaatagtgtgctaatgtttccaagcatggctaagcacttatatctaatatccagctgaacccatatataaagctcaactagtcaagttacaataacccaaggtatcaaggaataaagtactgaagaacaaaagggctataacaaacaataggttaattccacccaatgacattcgaaaataaatgcaatagttgaatagaaacaatagctttaaacgggatcaacatgctcaaagggttgtttgggatctgtgtgacttgccttgctggccttggaattcctcaaattcttttcctgcaaattcggactctccgagaacgtcggaatctaaagagaaaagaacaaaatcaccaaaacagcacataaacaagcatgaacagtacatgtggatatttttaacatgtagatctcaattttagaaaaatttagagacctgaaccaactaaatccgagctaagatgaattagttatgaattttcaaagattaaatcggattaaatcatttatatagattttaatggaattatgacgcaataatgaattatttttgaaaaggaaaagaggattattgcgtcagcggctagggttcacggtggaccgggtgcacggcggcggctcacgaacggccgagatctaaccctatccaatcggacggccgagatctaatgggtctaccgcggctcacgggaagcgacgacaatgacgtcggcgatgacgtcatcaccggcgacggctcggacggcgcaagctcgccagcgaactacggcacgacggcgctaacgaaaggcatctacgggttgcggacaacacggcgaactcaccagtgaccaaagtagcggtggaagatcaacggacggtgacggcgacgaggttgatacggcggcgaccttcggcttgacgacgacggcgatgctccggagacctacggcagcgacggaggggcggacgaggtcagccatggcttgtgatcacgatggcgaccttcccgagtggcgacgacgactggagcgacggcgacgcacggctagaccagcggcgatgacggcggcgcacggctgcacggtgctagggctctaccggcaacgagaggcgaaggcgagggtggcggcgggtagcggagggcttgggggtccttttataggggctagggggcggcggcgaagtcccacggcggccggcgacgagaaggaaagttttagggttcgggaggaaaggggaatccgaatcgagctcaaatccgatgatttccaaagcgatatagacgatgcttccaaaaggaaaaaggtagaggagatctcggggatcctttcccctcaatcaatttcatcggatcgggaaaggggcgacggaattggatgggcggcggcggcgcggctcggctagggttcgggcgcgaggaagacgacgaccccgacaggtgggccccacctgtcagcggcggacgcgcgcgcgtgagcggcggcttggctgcgggccggcctgggccgaggagagagagagaggggggttttgggccgactttcggcccaaagccagaagagaactttttaaaacctttttcaatttaaattattcatgaaatgcaattccatttattaaaaatacttccttagctcaaataaatcccagaaaaatctaggcactatagaattaagcaaagtatttaataaaattttatctggcccaattttatattggattttattatttaaaattagatcttctcttctaggcttttaaaataaaatctaataattccaattaaacaacaatttatatatttgggatttttagggtgcgacaatctctctttgttccttggaattcgcaccgtcagtagtgcgtctatttaaaggaattttggggatccattt

SEQ ID NO: 29563 - DNA, 13552 bp, Oryza sativa
aattaagcaaagtatttaataaaattttatctggcccaattttatattggattttattatttaaaattagatcttctcttctaggcttttaaaataaaatctaataattccaattaaacaacaatttatatatttgggatttttagggtgcgacaatctctctttgttccttggaattcgcaccgtcagtagtgcgtctatttaaaggaattttggggatccattttgaagtccgcccaccgtgcagaaaacatcccgcctgcaattgctcttcgtcttcttcgctgccacaagaaaccctagttcatcgacctaagccctttctccagcgatcttcgatcagtgatggatctcggcaaatcattctccaccagttgcgatcgaagactatattctctgcggttttctccctccgccttccgaatttcttctcttggttttaaacttctatggtctttctcttctccatttgaaccccaattctatcacctttcttagcatcttttctcatctttgcgaggcctacattggggtagagccttttcttgatctctttcgcttctactacgagctgcgttggatggagtccaacagggtatctggttgcgtcgtgttccgacttcgcgatggcttgaagtcgcgttatatccccttccagtgcccttcttctcgcagcaaatgtcggaataggtggttctatcttcagatcaaagattcagaccctgtcttcgttgttcccaaagaacaaccggacaagatttcgtcttggaccgcaaagccccctttgaccccctctctctagtcgtttatcgacattattgacgatctccgagtacgaggcttgtcggggtatgaagtcgctgcagacttcgttggtaggcggatccagccgctccaggctcgggcccatctagcctttgactattccgaaccggaggacgcgacccgggtttctcctcggggtatctttctcgcatttatcctgacatgctcttgttcgcgttcctcttgatttatcgagatttggttcttgattcgcaggtctgaacagcgaagccgtggaacgtcgtgtcggccaggtgatgatcagtggtccgacaacggcgagtaacatccccgtgcccctttgtgaaaagggggcggccgaacatgatgacgccatcaacgtaagtgttctcgataggcatcctgcattttcctttcgagatcacattgtgacttgattaagcgtaggctcttcctctgactgacatcatcgggccgctcgcggaccatcaggtggcggcgtctctgaaagagaaggtcgccaaggaggcgtctgatgctgctgctactaccactagtggtggcaatgttccgacaaaggggaggaagttctcctctgtaagcggacatcatcgcaaggcgtcaacccccttggtaagttatcctgtcgtcagatcgtacagccagaagaattacgccttacttcgcatcgaccgtttttcaggcctcggacgcgtctcccccgcctccacgacgacaacgtcttgtgacgattggcgagaagtaagtagacgaatcttaagcttccgtgattttattcgagtgttgtctgaaccgtggtcgtctcacagggcagcgcgggtgaaggctgtgcaagacaagtccggagggacctccggcgcatcgcccgctgcggcctcgacggatgtcgtgctcgcacccgggagccgcgaggtgacaccaagcggcccagtcagcgatcccgcggctggtcgtggtccaccagctgccgtcctcacctgggaggagctccaggtcgagatggggcgcctcctcgaggctggtgctcgcggcatcggccgcgagattgcagaggcgaggtcggaagcagcgttggcgaacgagcgtgctgactggctggtacacgagttagcggaagctcgtgaagacctcaagaagatgagggagttggtggccggcaacgagcgacaatggcaggggctcgaggaccgcctgtcggagctcgggaacaacctgtcggaaatccgtggctcgttgcgggtcacatacactggcctacaccagctcgccggggagtgcggcattaagtctaccatcctggcgaatcccgacgagttctcgctgacatcttctcttgcggaactggcgacggcgatgggggagatcccctccaagcatgcggccaggatcggggaggaaacgtcgaacgggatctacaccggggcgtgccacgtccccgcgtgtgtaaagctatcgcatcctgaagtcgatctgcgcgagatcttggatcaggcggcggctagcaacacgcgtaaggaggtgacaaaagaaatcggtgatctaggggaatctgttctccccctatttgaagagtaggacctcttgtacccccaagacatgctgtgtaaaactgaattttaaccgcctttgtgcgtgcaattatcattgtagtttactcttgtatgttgatcttgggagcttttgtcctttgtagagatgttgatgacgaggatgtccaggagcgcgggcacatgtgtcgcccgacaatgtggaccagacccttgctacggggacggagatgacgacgacttcctcaggttagtagtccgttcatcccttgatgccctcccgactagataaactatgttctcgaaagaggcgtatagcttgacttagttgttatcacattgagcagatctcgagaatgcccttgctggccaagatcgtcgtatccaatattggaagacgaaatttgaagtagcggaactcgagagaaccatgctggcagtgaagaaaaagcaggctgtggaaacgctccgaggtcgtgaggtgtggttcaactcatacttgaagagttgctgcacatccatggccagggtctgtagagaacttcgagtgccccgtggagatccggaggagtcggcggccagatacatctcacggctgaacggagcctgtgctcaactcgatggcatcggcaagcgtattgacgaggccttgaagcaggagtgtcgtcgatcgagctgatatgccggagggcacgtgttggcttgcctacgagatcatcgcccgcgcctggacctcgattgtctccatgagggttttgctcgttctcggaagactccggcggagatagaccatctggcgaggtcgatgtcgccgttggcggagaagatcttccagtctatggactggcgttggccttcttggtaatcttcgtatcctgtgatagatatctcaggaaaaaggtgtaatatagctctgaatttgcgtaaaaactgtaagaagtattttgtgaaatagaaaataaatctatctttaataaatctttcttactcctgatgtcgtgtgtaagagtgcgttctcagttcacgactttagtcagccgtttgagttgtacactctccctagcccccagccttgtcgtcggaggaattttctcggaggataaggctcttgtacctttgacctgccttggttgaataagctctgatcctagcccccagccgtgaagttggaaagttaatttccgatttcgcggcttggttaatacgcacggcgagaacccttacacgaccagatcttacatggtctttcgtctctacaggatctgacaaggccttatcggctctgggcgtccccagccgaagatcccttaggttcctcggaggccttgtcaagacggcgtaaagggacatgaggacaggtttcaacgctaggtgtcattagggtaagggatcatcgggcggaaacactttgactgtaatatgggcctaagaataggctttattgatactgtaaggtgtcttacaggtatggatggtattgactcatacatagaatttacgtagttggtcaatgttccaagaatttgctaactcgcgaccatcaccgtctgcgattttgaatgcgcctggccgcaagacttgtgtgattgtgtagggcccttcccattttggtgagagtttgtttcgccctgcttggctttgaactcgtcggaggacgtagtcgccgatcgaaagtatgcgtgctcggatgcgcttctcgtggtaacggcggagggcctgttgatagccgactgctcgaacggcaactcgttcgcgatgttcctcgagtagatttacatcgacgtttcgctgttcctcctagtcctcgtaggagtgcttctgtactcatgtactcggatgtcgtagctcgctggggagcatggcttcggagtcgtacacgaggaagaagggtgtttccttgttgtcagtgtggtgcgtacggtccatagtactgacgggagttcttcgacccattttttgtcatgtgacatgagcctgtcgtagacgcgggttttgatcccttgtagtactatgctgtttgccctctcgacttgtccgttgctttgagggtgagagaccgaggcgaagcatatcttgactcccagcccgatgtagtaatcctgaaaatcagcgctgatgaactgggagccgttgtcggttatgatggggtgcggtagtccgtatctgcaaaatatctccttgatgaatttgatggcgttgtcggccttgatttcccccgtgggtactgcttcgatccacttagtgaatttgtcgatcgcatttaataggaacctgtagccgccctgtcctcgtgggaatggcccaagtatatctagcccccagcacgagaacggccaagtaagaggtttagtctggagcgcttgagctggtagctttgtgtgtttacagtggaattgacaggcttcacatcgctggaccatgtggcatgcatctttaagggcggttggccaaaaaaaacacttgtcaaaaagctttcccgaccgatgttcgaccggcggcgtgtgacccacagatgccttcatctatatcaaggaggaggtgtctaccatcgtcggacgagacgcatttgagaagtaccctgtttggcactttcttgtatagatcgttgccgaccatacagtagattttttctttacgggttattttctcagcctctgtatcgtcctcgggcaactcctcgctgttgatgaatttgattagtggggtgcgccagtcgtctgtggtctcgatgtcggcaacggcgcgttctgcttttgtggcctccgagctaatgtcgggggtggccgagctgacttcgccgctaacctcttttactgatggcttcgtcaggatgtccagaaaagtgccgggctcgagcggttctcgtctggacgcacgtcgtgctaggtcgtctggctcgatgttgtcctggcggtagatgtgtcggacctcgatcccatcgaaccttttctctagcttcctgacttctgcgagatacttggataactcagggttagagcatttataatctttgtgcacctggttcacgactagctcggagtcccctttgacgattagtcgcttgaccccaagtgcggctgcagctcttatcccggcgagtagtccctcgtattcggctgtgttattggtcgccctgaagttgaggtggattgcgtgcttgaattgatctccggagggagatgtcaagataaatcctgcccctactccttggctgttgagtgcaccatcgaacgccattgtccacgtttcgttgtcgacttggttgtctgatttgttatcaggcatagtccagtcggctacgaagtcggcgagtacctgggacttgatggctgttcatggcgtaaagtggacattaaactggctcagctcgactacccatttcgcaatgcggctgacaacgtctttgtttctcacgacttcaccgagggggaaggaggagataactgtgactctgtgggcttgaaagtagtggcgtagcttccttgatgtcatgatgaccgcgtaaagtagcttttggatctgtggatatcttgtctttgcgtcgtggagagcttcgctgacgtagtagactggtcattgtaccttctctctctcgacaacaatgacggtgctaacggaatatggcgtggcggcaatatagaggaataattcttcattaggttggggagcaacaagtacaggggggtttgataggtagcgcttgagtgcaacaaatgcctcttcggcttcctgtgtccatacaaatgtcttgtttcttcagcagagcaaagaaaggttgccctcgttctcccatcctagcgacgaacctactcagtgccgccatgcatccggttagcttttgtacttccttgagtcttgtgggtgacttcatgttctcgattgccttgatcttctcgggatttgcttctattcctctgccagaaacaaggaatccaagcagcttgcccgacggtactccgaacgtgcacttctatggattgaacatgaggcgatatcgccggaggttgtcgaacgtttcccgcagatcgtcaatcagtgagtcgcttgtcttggtcttgacgacgatatcgtcgacgtaggcctcgacattgttgccgagctggtcgctaagtgcgccctagaccgtgcgctggaaggtattccctgcggttattagtccgaacggcattttcacatagcagaatactccgaatggcgtgatgaatgctgtcttctcttcgtcctcttttgccatactgatttggtggtagccagagtaagcatcaaggaagctcaacagctcacagccggctgttgagtccaccagttgtctattcgaggaagagggaagtgatcctttgggcacgccttattgaggtcggtgaagtcgacgcacattctccattttccgttggccttccgcaccatgactagattggctagccactctggatgaagtacttctctaatgaagccagctttgagaagtttgtcgagctcttctcgtatggcttgttttctgtctggtgcaaatctccgcagtctttgctttactggcttggcatcgggtcgcaccatgagtttgtgctcaatcacctccctggggacccccggtatgtcggacggctgccaagcgaacacgtcagcattatcgcggaggaaggtgatgagcgcgagttcctatttctcgcttagtgttgccccgatcttgacggtcttgtcggggttggcactggagagtggaacgatcttgattgcgccgtacggttttggcgccttgtttgtcttgcacactttctttggtggttcagtcgtggcgggtgggctaggtgtttgctcgaccatgtcgaggctccgtttgtcgcactgtactgccagctttgcgttcccttgaatagtgattgttcccttcggtcccggcatcttgagcacttgatacgcgtagtgagatgcggccatgaacttcgcaagtgcagttctcccgatgatggcgttgtaagctgtatcgaattcagcgacatcaaaggtgatctgctctgttcagaagttgttggcttggccgaaagtcacgggcaacataatcttgcccaatggtctgtatagtccgactaggtatggaatgtgatgtatagatagaatatctttaaagagactcgggttaagttccaaacttgtatgttaaggaaatatccgggatcctagttggttacgattaggtcatatctgcaactacctattccgttagggatatgagctgtattttgtaatacggactccttctcctatataaggaggggtccgggtgcctcttggggtacaacattctactcttagatcatacgatcaataatagactcggcggaataatccccagacaggagtagggtataacttcttattaagaaggcctgaaccagtataaacttcctggtcttcaaacccatcaacttttctagcttgatagccacccccttttagtattgccgaaatcttgtttcgtcatgtatcattgtcattttcatagccttcatcatggcgttgcgaatattgtgaatatatcaatggatcaacttgcatgccctaactgtgagcattcttaaaactccaaggtaaaaagagataaatgctgaagtgtgattcatgcatatgtacatattgctcctcccaaatggacatcatgcaggatcgggactaagacaacacattaaaggctctcatgctatacgcttcttgcagctgtagttaaacaagggcatcgagcagtagttcgataacaataagattcattggcaccaacaaaaccccatccattctaataaatatggcacgcatgtattttaagatttatctttgaccaagaattagtttaaatttacaaagatatttgatagaaaattagcatcatttcaatgtgtttttcaatacgaatacaacaattctatgtatatattactagtcatcaacctgtgcacttgcatgggctagaaaaattacgtgacatcaattaactagcatggaagctttattggtgcctccaattactaaatataagatttttcctttctttctcaattctttcggtcaaaaacgagcatgtgtgttattcatagaaacggaggtagtatttgtaagaagtacggtatcgaatttccaaaaagttccgaccttgtgcgataatatacacacacattaacctacataggcaagctagctagaccatgaaatataccatttctaaacctatcggtcacttactcacgttggggagcctaactaaactaacatggtctcacatggcatgcaagctagccatggtactaactcgtctactacgccatagtatgctacaaacacaactaagttatcttatgaaggactactcaatagtacacataaaacaatgttactcgttgctttttaccttcatttgacgggtacgagctaagtgtatctgaaaatcttctcttctgtccatcggcgaaagcgtacaattgtaaaattgcctggtacgcaggactagatatgaggagtttgtccagagattgtgcaacaaacatgtacatccatcaactgtatacatgcataggatatatacatacaatggaggtagccatttgagattgctagttagcgcatacgcgcgagttgctttcctagcgcatacgtacacgtgtctctcgtggagcgaacgagagaacggccgtacgacgctttcatcggaaacagaaaacgcgattagcgtctaattaggcgcagattaaccgagaaaactacgtctaatgcagttttagataatgatagtatgattttgtatatttctatttttttcaaagattttattaaagtaacagattgaaaagaaatctataggtgaaatcaaaattttaaaacttttaacccagatttggaacattgaactcgaaatttgaattttattgaagtcaaattttgaaaaatttcaacttttcatctcaaatttgaaaaactttcaatccagatttgaaaacattcaacctagatttgaaaactttcaacacagatttgaaaactttcaacccagatttggaaactttcaaaacagatttaaaatctttcaacacagatttggaaactttcaaactagatttgaaaacttttaactcagatttaaaaactttcaattctggtagaaagttttcaaattttaaatttgaaaactttcaacccaaatttgaaaactttcaaccaaaatttgaaaactttcaagtcaatatttgactgttaagttaaaataaaaaaactttcaattctacattttgtaaagaagtgtgagaaagattaaaaaaaatgggaaagaaacggcggaaaaaaaacgtgtctaaggtcagaaaaaaaaagtacgaaaaggagaaaaaaagagctcggggaggggatagccggcatgcgcgccagctaaattgatttagctggcgcgtacacgcccattagccatccccggtagccatttgcactatatccataatatacaagtaggcagccattcgcaccttatccataccaggacgatccatttgcaccttatccacattatcacataacgcttctgcctatatataagagcagcagcttacattcaagaatcacctctcaacacacaactaagaaacatagctaggtaaccagggaaggtagcatcagcagcgggaggcaatggagggaaagaggactaccacttcgatggtgatcatgtgcatggtcatcttgagcctcactgtcgactacgccaccgcagcacagtgcggctgctgcatatcctctcgagcaaaagcatgttgttttggttgtattgctgctggtggctccgactcagtctgcaagaacacttgttgtttcccatgtattctggccgattctggtaaattcactgaagtcactctattcaatgcattcttatatgtagagacagactttgtagcatatcgtggactaatacatatgtgtgtctttccatgcattttcctcaatgtactttgttgatttcacttccaatctcacgacttcaggcatatatcttgcaacatgaagacatcttatgctctacttccactacaaaattaactaatgcgctattgggatttccatattttaatttcatagttgttgctaagatggacgaaatgggagttcttgctaagatggatgaaatgggagttcttgctaagatggaaggacaagcctacactacaagaatcaatttaatctgtgacgaaatttgacgaaattttcgtgatgttttcagatatcgtcacggatatgcaactatggatacaaggcccataataccgtgacagtttatcgatttcgtcataaaccggcccaaaacatgtgacgttacagtaatttcgtcccggtttacaaatataatattaaatacttgaaaaccatataagagatgtaaattttgtgaataatgttactatcactttatcggatgaataaatgaccaaaataaaagttatagatattgatgagttgtacaacttttatgttgatgactttttcagttgaaatcatttagtatttgaaaataatattgtttgaagttgtcataatttgaaattcaaattcaaattagtgaaacagagtcatataccaaaatgaccaaaacaaaagttatagatattgatgatttatacaactttgttgttgatgactttttcagttgaaattatttagtatttgaaaatgttgtttcaagtagtcataatttgaaattcaaattcaaattactgaaacagagtcatatagcaaaatgaccaaaataaaagttgtagatattgatgatttatataactttgttgttgatgactttttcagttgaaatcatttagtatttgaaaatgttgtttgaacttgtcataatttgaaattcaaattcaaattcaaattattgaaacatagtcatatagcaaaatgaccaaaacaaaagttgtagatattgatgatttatacaactttgttattgatgactttttcagttcaaatcatttagtatttgaaaatgttgtttgaacttgccataattggaaattcaaattcaaattatttaaatagagtcatatagcaaaatgaccaaaacaaaagttgtagatattgatgatttatataactttggtgatgatgactttttcagttaaaatcatttagtatttgaaaatgttttttttaacttgtcataatttgaaattcaaacaacatgcttgcattgcttccagtcttaatgcctatcataagaatatgtcgtttggcttcaagtcatggccaagatatgttaatattatcttcaataaatagttgaccatatggggcaatctatagtggattcatctggtggtctcaactatatgtatgtggtgcatgtgtgcgctcacaagcatatttaatttgtcttgctgctttaataaggccatagcactgtccaatgtgtcattcgatggtctctgaccttagcaatttattatgaccttatcactttattacgacatgattaatattatttgtgtaggcatgttctttacctaatttatcctgagcggatttctgatgtttttgtgaggtttagactatgggacataattaagattgtcatcccaaaaagtattgcaaaacttagaaggaaagcaaaagagccgggggggtggggggggtgggagtaaacatagtcaatttcccggctgctatcccattcctcgttttctcaggtttgggagacatatagccacactaaaggcagtaaagctgaggaatgacaaccttactcacaaggacaaatagtcgttaaaaaactatgacatcactaaccatatcttatttcagtttaccaaacatacatttaaatttaggcagtattacggagaactaaatcaacaaacaacaaaccatacttcattgtcaaaacaaattgccttctatgtacttcacaaattctcacaagatcatatttgcaatttttcctaaactaattaaccaagagcaaatatgcagtggagcattccacatataatttcacattataagtatataatacagtatggtataatacacatatgcatactagggcctacggcaaaagaggcaaagatcaatgtgcatgctaacttgtgtataatacacatatgcacagtactttgaaataagcataccaggacatatgcattagttcacaccattcattcttgcattcttgcactttcaacaacaatcagatctaccaagcattcttgcacattaaaccacaagtagatctaccaataaatcacaaccttaggtagcaatgggggtaatcggaggggaaaaccttacctcgtcagacgacggaaggacaggagacggcggaagattcaccggctgctcaccatggcgcgcggatccctgaggtgtgggcatcacatctatcagcaccaacgacatcggcgggggggggggggaggactggggctctttcatagaccgatgtaaactagacttattggctttgatttagggagaggaaggaaaagagatagactttacccggcatggctttgggcctgcacggagagggatagtagttggcttggtttcagtcaaaagatatgaagagaattttaaattgtttttttcaatttaaataatgacagaaattatgttagtattattaaaattacttctttagctcggaaaatttcaaaaaaatttaagagagcataattaattattgagaagttattaaaactattccaagtcatattttacaaggtaaaattttatttcacatatcaacttgtaacatacaaggaatttcaccttgaaaaatttttgtggaaaatttaaaactttttgaattcaaaagtttttggtgaacatagaagcatactagagcatataactcccttaaataaaataaaacacatagtttttctggccaaatcaaaactaagtccaaaagtaaaagtttacaaatcttgtggtaaaaaattttaaatcaaaaattttgctttgaccataaactgaaacctaatcttctcggttttgcattttcagcctaactaaaaaaatatatttaagttaaatataaaataaatggaaaggtaggtatcaaaatacacaaacctaaatagagataaaaagaacttgcttgtatatgcatattattcttttaagattgtttttggatattcttggtgcatctcataataggt

SEQ ID NO: 29564 - DNA, 1242 bp, Oryza sativa
tttcaaattttaaatttgaaaactttcaacccaaatttgaaaactttcaaccaaaatttgaaaactttcaagtcaatatttgactgttaagttaaaataaaaaaactttcaattctacattttgtaaagaagtgtgagaaagattaaaaaaaatgggaaagaaacggcggaaaaaaaacgtgtctaaggtcagaaaaaaaaagtacgaaaaggagaaaaaaagagctcggggaggggatagccggcatgcgcgccagctaaattgatttagctggcgcgtacacgcccattagccatccccggtagccatttgcactatatccataatatacaagtaggcagccattcgcaccttatccataccaggacgatccatttgcaccttatccacattatcacataatgcttctgcctataaatagtagcagcaccttacattcaagaatcacctctcaacacaaaactaagaaacatagctagataaccagggaaggtagcatcagcaacaggaggcaatggagggaaagaggactaccacttcgatggtgatcatgtgcatggtcatcttgagcctcactgtcgactacgccaccgcagcacagtgcggctgctgcatatcctctcgagcaaaagcatgttgttttggttgtattgctgctggtggctccgactcagtctgcaagaacacttgttgtttcccatgtattctggccgattctggtaaattcactgaagtcactctattcaatgcattcttatatgtagagacagactttgtagcatatcgtggactaatacatatgtgtgtctttccatgcattttcctcaatgtactttgttgacttcacttccaatctcacgacttcaggcatatatcttgcaacatgaagacatcttatgctctacttccactacaaaattaactaatgcgctaatgggatttccatattttaatttcacagttgttgctaagatggacgaaatgggagttcttgctaagatggacgaaatgggagttcttgctaagatggaaggacaagcctaaaacaacatatttgcattgctaccagtcttaatgcctttcataagaatatgttgttttgcttcaagttatggcctagttatgttaatgtttatctccaataaattgttgaccatatggagcgatctatagtcgatccatctgttggtcccaactatttgtatgtcgtgcatgtgttcgctcacaagcatatttaattt

SEQ ID NO: 29565 - DNA, 835 bp, Oryza sativa
tgtattagcacagccttatctaaattatctttaaggtaaagactgattccaattggctttggcagatagaaaggaatgagaggcaccagaatcaaatagaatagtaactggtttagagtttatggtgaacatacccatcaatatattaggatcttgttgagcttcttctgctttaatatgatgtacttgaccacgtccaagattatgtccactcttaattattggaggatttttctttataaaacctgtagtagatggtttctgataagaagtttggcctcccatattttgacgattagggcatagtcttgcaaaatgtccaattttcccacaaacataacaaggagagtcttccatttttaatccaggtcttggtagtattggtggcatgcctggccttgcattgggtagagatgccttaaatggataaggcctccgaacttgtagtgaacctctagttagtgattgtcattgtaaattcattcttctcttagggagtccttccaccattctacgatcattttctagcctaaccactttattgactaggctttgaaaattttcatgatcttgactaatcattggtcctcgaagttcatcacgtagtccttctataaatctttcaatcttttctttttcatcttgaatgtccgaggcggcatatcgagcaagttgtgtaaatttaatcaaatattcttgtactgtcataaaaccttgcctcaatctacgaaattcattctttttcatcctgatcacagctgtaggtataaaagcatctctaaaagttgtagtaaattccatccatgtaataatatgtgtaggatcttctatagaa

SEQ ID NO: 29566 - DNA, 3430 bp, Oryza sativa
tcttataatagaagcaatcgaccgaggcaagcgagagttcctatccatcagagattgggcccggtgaatcaaggtcgtgatcaggaagatgatgaggacagaaaaactcaatggtgtccttctagtattattaaaaagaatcaaaagagaagggttcaaagattaaggaacatggagcgctttcatgaggtagagcaggagatcaactatcggctgtagaaaacaaagccgaggtaagaatggcgtgttaagaaccaagctgccacaaccgatgaggtcaaagccgatgaagcaaagaggttagctaaagggaagagcattgtgactacatcggttaacatggttttcacgttacatacggaatttggagctaaacaagccgatgttgatgaagttgaggaagcttcggctaggttaattttgtcaccagagcaagtagtttttgagaagccagaagggatagagaatcggcatcttaagccattgtacattaacggctatgtcaatgggaagccgatgtccaagatgatggttgatggtggggctgctgtgaatttgatgccttatgctacattcagcaagctgggcagaaatgctgaagatctcaacaagacaaatatggttctcaaggattttggtggcaatccatcagaaacaaaaggagatttgaatgtggagctgacagtcggcagcaaaaccgtccctacaacattttttgtcatcgatgggaagagttcttacagcttgttgcttgaaagggattggattcatgctaattgttgtattccttcaaccatgcatcaatgcttgattcaatggcaaggcgacaagattgagattgtgctagccgacaggtcagttcacgttgccagtgccgatttagctctttgggagatggacggtattgattgcctgtccggaaaagtttgggatggagattttttaaaagtgtccgattgtgatatatagccaattgaagatggagagcccaagttattatttcgagggcgtcgtggagggttcaaacgtctacaccaaggacacagtagatgatctcgatgacaagcaaggacagggtttcatgtcagtcgatgatttggaagaagttgatataggtccaggtgataggccaaggccgacattcattagtaaaaacttatctcctgaattcagaaccaagttgatagagctgttaaaagaatatagagattgctttgcttgggagtattatgagatgccaagattcagccgatcgattgttgaacatcggctacctatcaaaccaggggttagaccatactagcagccgccgaggagatacaaagccgatatgctcgagcccgtcaaggctgaggttaaacgtttatatgatgctggttttatgcgtccatgccgatatgctgagtgggtttccaacatagttccagttatcaagaaaagcggcaaagtcagagtgtgtattgatttccgagacttaaacaaggctactccgtaggatgggtacccaatgccagttgccaatcaattggttgatgctgcatcagagcacaagatattaagttttatggatggtaatgtaggatacaatcagatctttatggtagaggaacatattcataagacagcttttagatgtccgggtgcaatcggcttgtttgagtgggttgtgatgacttttggcttgaaaagtgctggagcgacatatcaacgggctatgaaatacatatatcatgatctaatcggctggttggttctaacatcctcaaattttaaagtaaaatttgactgcatcatgctgacttttgattaatttagtgtgtttcaaaaatttatttggttcctaattggttcaagtattacttctttagaaccctactaattaaccctaattattccctttattccaaaccctagtgaatttgagcaaattctcttaaatttcaaactatagattatttccttagcttaccctaatattagtgaggatttgctatacttcaaaccctagtgaaacccttccaaattcatagattaaattcattcttttctagggaaatattcaaaaattctgaaattcactgttcattgcacataaggtgttcggtagaatgcctagcccaactagagcagcccaatcccctccaatcttgtacaaagtctagaattgatcctaggggaccacaacccactcaaaaccatggctttctttgcctcttcctccccttcacgcgcgccgcccgggcatccgaatagccgcgcgccgtgtcgccgcgcgtcggcctcggggccgcttgcgcgtgcccgacctccttggcgcgccgtcgcccgtccgacaccatcaacccactgccactgcaccaatcgcaacgacgacaaagccaggacgacgaccgccgcacgaaatcgccgctcgacgccgtgcgctctgtcacatcctgattttcgtcttaggatttataaattatttaataaattattattagaatttatattaaatgttcatcaatttacaattgaagttaaatgtgggaaataaaatttcctaaatataaagcatggatggatttaagttttattaaattctccatggttaattatactctctggaattttctcggatttttcggagatcaactattaattttaatcatacaaagaacatttcagtaattatccacatattaaattaatcattaaatggtctgattataactttgtgaagtactttgagtgtccaagtattttcaggatttttcttgaaattatttgagcattggaagtatttttaacaattcaaagatcatttcagtgattattttaattggaaaaagtttttaaatcctcccctaagccgttgggccgtattcggcccaactctctccctcctcgcacgtggccaagcggcccacgtcggcccagtccaagccgccggcctcccctcctctcagccagccgaaagtccactttacctccttggatactgttcatcttccagctccagcagcccgtgccgtgccctgtagctgacaccgcttcctccgtcgaattcttcgcatcccgagctccgtttgcaaaattagttgaggagaaatattcctcttatcctcctctatcctttcccccaagaatcggactgtcacaccctaaaaatcccaaatatataaattgttgtttaattggaattattagaatttattttaaaagcctagaagagaagatctaattttaattaataaattccaatataaaatggggccagataaaattttattaaatactttgcttaattctataagtcctagatttttaataaatggatttatttgagctaaggaagtatttttaataaatggaattgcatttcatgaataattaatttaaaaagctttaaaaatctttcttttggctttgggccgaaagttggaccaaa

SEQ ID NO: 29567 - DNA, 4583 bp, Oryza sativa
cctttttccttttggaatcatcagctaattcgctttggaaatcatcggatttgagctcgattcagattcccctttcctcccgaaccctaaaactttgcatcgcgtcgccggccgccgtgggccttcgccaccgccccctagcccctataaaaggacccccaggccctccgctacccgtcgccaccctcgccttcgtctttcatcgccggtagagccctagcgccgtaagtcctcgcgctgccgtcgccgccgcaggtccagccgtgcgccgccatcgcttcggtcgtcgtcaccgctcggagaggtcgccgttgtggtcaccaagccgtcgccgatctcgtccatccctccgtcgtcgccgtagaccgccggaacatcgccgctgtcgtcgacccgatcatctccgccgcttcgacctcgacgccgtcgccgcccggtcatcgtccgccgccgttttggtcactggtgagttcgccgtgtcgcccgcagcccgtagatgccttccgttcgcgctgtcgtgctgtcgttcgccggcgagcgtgcgcgtccgagccgccgccggtgatgacgtcatcgctgacgtcatcgttgccgtccgccgtagaccggccgtggacggatagatgtcggccgttcgttttggaaagatagatcccgaccgttcgtttccgtgagccactgccgtgcacccggtccaccatgaaccgagcctgctaacgcaataaatcccttttccttttcaaaaataattcattattgtgtcataattcaattaaaatctatataaatgatttaatccgatttaatctttaaaaattcataactaattcatcttagctcggatttagttggttcaagtctctaaatttttctaaaattgagatctatatgttaaaaatatccacatgtaatgttcatacttgtttatgtattgttttggtaattttgctcttttctctttagattccgacgttcccggagagtccgattttgcatgagaagactttgaagagttccaaggccagcaaggcaagtcacacagatcccaaacaaccctttgagcatgttgatcccgtttaaagctattgtttctattcaactattgcatttattttcgaatgtcattgggtggaattaacctattgttgttatggcccttttgttcttgattactttattctttgataccttgggttattataatttgactagttgagctttatatatgggttcagctagataacttatgctacactattatttaatgatggcttaatgataactcatgatggttaatcataattggttaattaattaatttgtcaactaaaacctgataaaggtgggttgtgagcatatggttttgatgattgtgctcatgacaattaaggaccggttcacgattttcggttgtgaaacatttaccgtgccaaccacaagccagcgtgggcaacggctttactttctgtatagtatggttcatagtagtgcaccagactgtgaagtggcggagataagcccacgagggtcgctggggagtccataccttgtttataagggggtgattatgatccgagagcggagcactactttgaattgtattatatagagggtacggtcacaatctctattcgggtacttgtcaagtatcgcgacgcatggttgacatgatgttgaggttgtgtcttctgggtatagtggtacacctctgatcagagtttaaactattcgaatagccgtgcccgcggttatgggcgggtctaacaatgtctttcgtgattagtctcacacttctcaccctattaaatgatgatgttaataacttgtttagctcatggtttggaatgttgtatagcgttggattaatattgtttaattattatttaactgttttattaaattatgaaatatttattaaatgttgtttatgcaactgagactatactatgccatcctttgttatcctgtgcacttgcatatttgctgcgtggcttgctgagtgtgtcatatactcaccttgcaatcattcatcagaggaggagttctacagcgatgctgatggtgtggatgattaggcgtagccctggtcaagctgcatgtggagaggagtcgcctgcgctgtttcttttattttccgctgcttagaactttattggttgagaggaactatctacctgtgtaatgacattttattcgcttattaattagagtaataattgtactctattatcaatttgttattgtgtacctcggctgattcctggacgagggtttctacacatgtaagcgtttggaattttggatagaaattccgggcgtgacaaattggtatcagagcctccttgaccctaggttatgccaaatggttgcctatggaagccctctaaaaatattggaaaagtagaactgttgtcctctctttctcttttaattaaaccaaactaatggcacatgcagtttataattcctttaattgttctcattcaaaatttatttattattcctgcgttgttagtactgtacatctattactgtactaaaggcccatttaccagcaaagagttttacaatgttattttatttaattttgctgcaatgagctaagcttagcatgttgattttataactctcttttattttatttcttttgaaacctgttattcaaaagtgcaaagtttgtaaacctgtttctaactgtttcaacttatcttgcaaacttggtttgctttatttatttaccttttattttgaatttctaacttcattcaaaataacccaaaaacttgtgctattaactgggtaaatgacttaaccccccctcctttcacttgtctttagatgccgcgctacaagcctgagtacttgttcggtaccgaaagatttgtccaggagttgcgtacgatgtctttcctcataggatttgggattgcccctttgtatgcccagatccctcatgatcgtgatgaagagaagtgccgggtcaaagtcaccttgaacagcaaccgtgaagatattccatcagtgatgttcgaggctggaggaggaagctacattcatgcttgtcaggaggtggccaggatcgccataggagagctccgcgaaagctacaatgatcggttggccgacaccgagtatcactatcatcctcgtcaaccccagggaagtgaccgtggtagctaccttgaaccggtagggatcgagaatgatgctaccacaaggcatttggttgagatgctgtgggctatggatgaaacccgcgctgagattgtgatagccgctcaagatcgtgaagaccgaaatcgcggcaagatttgcaagctagaagacaaggtgaatcgtttggagaaggagctagctgcattgaagggagaagcaccaccgcagaaggccagggttcgtcttaccgcaaggaagagagctctattcgtccctcactaccagttggcgccaaaggttcgtgtggtggaaaaagaagctatcccaggcccagcagatcctccggtcgttaacgtaagcgatgatgatgaagaagaatgcaagcgcacccattccaagatcgagtggggaccaactcaagatgatggagacgtgccgaacgagccttcaatcaactccgatgcccggaagacctagaccgttttgtcaagtcgttgccttagattgttgtgttagtttgcttgctttagtttggttatgtgtgtgggtcttgcatgtggtttacatcattgttagtaagttggtgagttaggtggtgtgagagtcttcagttttgtaataatgaaacttagttaagatcaataaaagttaagttaatcaatttaattccctgtcctaagtagttttcccctgtttctcttcttgtgctcctgtctatgtcagatggtgctcactcgcagcaacgggaatggccccaaccccaacaacaacaacaacaacgcagagaatcccacgcttgctcaagtcttggcccaacaggcacagttgatgaatctgatgatgcagcaactccaaaaccagcaaaaccaaggaaaccaccatgcgcctccccagaacaagctggcagagtttcttcgcgtgaggccgcctactttctctagcaccactaatcctgttgaagctggtgattggctgcacgccatagagaagaagttggatttgctccagtgcacagaccaggagaaggtctcttttgcttcccatcaactgtatggtcctgcctctaagtggtgggatcacttccgccttaataggactactgctgaacctatctcttggcttgaattcaccgctgctttccggaagacgcacataccatcgggagtggtgtccctcaagaagaaggaattcaggtcgctcactcagggatctcgtactgtcactgagtatctgcatgagtttaattgtctggcccgttatgctccagaagatgtgcgtactgatgaagagcgccaagaaaagttcctagaagggttgaatgatgagctttgttacccactcatgactggggattatcatgatttccagaagttagtggataaggctattcgccaggatgacaagtacaaccgcatggagcagaagaa

SEQ ID NO: 29568 - DNA, 4274 bp, Oryza sativa
catgtgatggaagtagaagagcttagacgtcctttgatggttagtaccccaagtaaccaagcactctcatcacaacgtagcccctctgtcagaatagagatccaaggtgtaccctccctggccaaccttattctgttagaatccaaagatcttgatgtcatcctagggatggactggttagccagatataaaggtgtgatagattgtgccaatagaaaagtgactctcaccagcaatgatgggcgagttgtaactgttcatgcactgccctctgaacctctaaggtcaagtttaaaccgaataactttggaagaaattcctatagtacgggagtaccccgatgtgttccctgatgatttacctggtatgccgcctaaaagggatatagaattctgaatagatttggtaccaggaacaactccgatccataagagaccttatagaatggcagccaatgaattagcagaagtcatgtcgggtcccaaaactaatgattcggaaaccgacatgtttagactgtatcaagccctggatcagtagattgatacaggttcaacaatctagatcttcattgcatacatttgattaaggtttcaaaggagatacaaaataatattaggatatttacaagcttgtggttaactattacagcagaagctatagaatgactcaactctaatgttttgctatagacttaaaccatctatctaatctatacttgagaactaagttaaaatgagattaacttatatgattgaactcccagtttcggcaagactccaaattaactctgaaaaaggggttgaagcaagggtgagtacaatgtactcagcaagctattatattcaataataaatgtatgaaatggtaatatttgagtagagctaggtttaattgcagaaagctgagaataaagaagtagaaatcctgaaatgtttgatatgcaacagtatttaataaagtttgaaattatgtttctaaccaagataccattgtgagtcccaatgctcgataaccgcgagcacggctattcgaatagttttaataatattcatactgcagtagatgtacgctttacccgcaatccatgacgtgccaaacacattagccttgtcatggcaaagcttttcggttactaacatcagtggtacttgttccatgaactctagtccccatgcgctctgaatgtaacgttatcagcagtgagaggagttctggcgttcccgaggtttttggagagaactggttgagagacccccgtcatctcaatcagcttttcataattcacacacacagctcgcgagataatcaagatatttacctgcgcctcggtaaatatcacaatcgccctgctcggcgtaagttgcctcctgcgcgaggacttaagaagaaccactatacataggtaccacctttgctagataacttaatcagctaggtctatacccatacgagaattgaggtcgtactcgtatgttgttcacatgtacttggcaattttatatcggttggaacagtactagccacccggaaatcaaccatttctaccatactgtcccaatctaagttaattaaattttatgcataatctaactaggcagggctaagcaaaagctagcatatctggtttgctatgttcaggttatgcatttgaaatcatgtatgactaatgcatagaacagagatatagaatatagggtatttatgctcaaaggagaggaataataacttgccttgctccaacgccaataaatacgaaataggcaacctgattatctgatgcttgaaataccataggttgccatccatataaaatagactctactaaagaagaggaagaaccaaattcaataaaagccataacatagcaagaaagagataaacggttaggagggctagggtttagggtatagcttatctcttttatggggtatatggattactggctgatattttatatgtggtttctaaagagttggtggctggggtagagagggaattaagcggctaaggtcacctatattttatgtgcagactctgattagttggtggataggagtatagtggataattgaactggttgagcagatatgtgactggtattggctgatagtaggtttgggtaggattatacctagggtttggttatatttaggccgattgaggagtagggcagtatatcggccaggttctacattttatgtataggagctggatagatggagagtaaatggttgagattatagctggtggggagtctggctaataagctgactaaggtttcagttatcaagccgatatcgaggtaagataaatatcggctagggtttgggtgttcgctagtcgttgctaaagcatgacgactaggtttggtatcttctctagccggtgttgatagacaatataacgactagagggaagggagttttgtgcacgtttagcgaggcggaagtgttactccgacaaccgtgagtggcggcggagcggctaggatcacacaggtcccgaaagctaactgtgcggcgtgctgtggaggtcaaggaaatagtgaagctccgaccgctgtacgcatcgaggcgtggggtgccaggagcagcacttcgaccttaggtttggttttgccgggctttacaaccaacggtccgacgtcggggccaatagaccgcaaacatccccatggaaggcgtaaagttccaaccggcggctttttagtggctaatgggtattttggggtaaaagaaaatatttgaaaaaggcaaatataaattcaaatcatatttgaataaattcaaataaaattataaaataacaaattaggcatcaaaatgaagcatttgaatttatatgaatttaagtccaggtttcactgagaacggatctacggtttaggagatatgggcttctaaagattgggatttgaattaaataaagaaaatgggaaatagtactgtgcaggggcccacttgtcagcctttcctttcctttttcttttctctttcttcttcctttgttctcttctttctctgcctctcagtgagccgagagaagagagaggagagggcaagcggggcgtcggctctccggtggtcgaaaggcggcgacgtcggcggcaaaacatgttcccgagcgacgcgcatccggggagggtggtagctagtcaaggtgaagagggagatggccggaacggcggcgacaaaagctcagctccggctataagagaaggtggtggtgtcggtttatctcaaggtggagggagaggggaaaggggaaaaatggaatcacctcgtcgaggcgaagctaatggcgcgaggatttggttagtggagctctggtgagggagatcgggcggtggcggcaatggccggtcatggctggagagagagaggagagcttcaagctttgatgtggagagggaagggtggtcttgccggctatttataggcatcgggatgtcggttcgcagaggaggtcgtcgtcttggtcacggcggcagtggcgtgcaaggaagggcaaccgcggccggctttagtttcttagcggcgacgtttgcggcggctgcctggttgggccgatttgggccggctcagcttagctgggccggcagcccaagaggaaggaggaaaatagaaggaaaaaggattgggccaaaaggaagaaagaacggagtttcggcccgatgacaaaaagaaagaagtctaatttgtatacttgatttgaataactgggttttgcgaagaatttgaatttagagagaattcacaaaggagatttcctaatttatttgagtgcaatgtttagaggtggagtttgagggaatttatttggaagcactcaaataggaaaggaaattaatagtattccttaaaatatttttgggaatgtggtaggaaaataggtggaggcaaaaggataggatttgaaccctaaaatatatggcataagtttcaaggaattgtttgaggctaaaaggaaatttaggtgacaagggtataatttattttcttagcacaagaggaattattcacaatatttgtaataatattattcttgtgccgagaaggaaatcaagccacaggaattaaattagtggctagatcaaaaggaggaatttagatatttggcggcaaataagaataggtttggaatcaagggataggtttaagatcaaaggatgggtcgacaattaaatccaaatggaatcgtttggtttaagttctaggacaatagtggagaatttcttggaccataatctcataccaatagaaaggggtttt

SEQ ID NO: 29569 - DNA, 13563 bp, Oryza sativa
atttttgggaatgtggtaggaaaataggtggaggcaaaaggataggatttgaaccctaaaatatatggcataagtttcaaggaattgtttgaggctaaaaggaaatttaggtgacaagggtataatttattttcttagcacaagaggaattattcacaatatttgtaataatattattcttgtgccgagaaggaaatcaagccacaggaattaaattagtggctagatcaaaaggaggaatttagatatttggcggcaaataagaataggtttggaatcaacggataggtttaagatcaaaggatgggtcgacaattaaatccaaatggaatcgtttggtttaagttctaggacaatagtggagaatttcttggaccataattcataaaaatagaaaggggttttcaaactaaatttgaataaaagaattttaatcaaaagaaggttttaaaccaaatcaagaaatacctcaatttaaccaaatatatatttttaaatgaaaaacacaaaagagattaaatactagagaggttttgagcgagttagttttaggaggtacctctaattacattgtcctaagtttaggaggttattaaaaacataagaatcggcatgatgcaggattagaaaatgacacattttcaggatgttacaagtcacgaggcaagtagatgatttgttacagaaaggatacatcagaccaagttcgtctccatggggagctccagttatctttgtggaaaagaaagaccatacccagaggatgtgtgtggactatcgtgcccttaatgatgtgactatcaagaataagtacccgctaccaagaattgatgatttgtttgatcaactcaaaggtgccaccgttttctccaagatagatcttcgatcagggtatcaccagttgaggattaaagaagaagatatacccaagacagtttttaccactcggtatgggttgtttgaatgtacagttatgtcttttggacttaccaatgcccccgctttcttcatgaacttgatgaataaggtgtttatggaatacttggataagttcgtagttgtctttattgatgacattctcatttattcttgaaccaaagaagagcatgaagaacatcttcgtcttgcatcagagaagctgcgagaacatcagttgtatgccaagtttagcaaatgtgaattctggttgtctgaagtgaagttccttggtcacgtcatctcagccggaggagttgccgtcgatcctagtaatgtggaatccgtaaccaactggaaacaaccgaagacagtttcagagattcgcagtttcctaggtctcgtaggttattaccggaggttcatagagaatttctccaagattgccaagcccatgacacgattgctttagaaagatgtgaagtataagtggtcagaagaatgtgagcagagttttcaagagttgaaaagtcgcttaatatcagctcccattttgattttgcctgatccaaagaagggtttccaagtgtactgcgacgcatccaagcttgggttaggttgtgttctgatgaaagatgggaaggtggtcgcctatgcatctcgtcagttacgtccgcatgagaagaactaccctactcatgatctcgagttagccgcagtggttcatgcattgaagatttggcgtcactatcttttcggtactcgtacggaggtgtatacggatcacaaaagtttgaagtatatctttacccagccagatttgaacatgagacagcggagatggttggaattgattaaggattatgacctggtgtcacgaccggaaataacccaacgggcgttccttacgtgcgtgtattattccttgtcccaggaggcaaggtacaccaaaagttgatacaatttagagtttaatcaagcggaagcgtaaatagttaattattacatgggcaacgaaggcctagcacacagaaagacaatgaaaaacagcggaagactagggcgacgaccacaggcgcttgacggcaggcacgacctaaacaccaaagccttcatcatccaggggctcctcttctaggtttgggaaaaattgagcaagactgagtacaaccaccgtactcaacaagacacacccacaagtgcagcataaatgcaatggagttataatatagggggttagggtttgcagtaaacagcatttaaaagacacttagttgctcaaagctaaatttaaaacacgatcctagaactatttaatattattaaacaaggccgtgaacccacacgaacctgccttaacccaaggcctacgatgattcagaccgaactggcaacccgaccctgggtcccagctcgtcccaagccaacccaggccaaccattccacattttagttgttaagaaggttttaagaattaaaacactaacttgggtacattgctaggcttgcccatatccgagggcgcggctattcgaataggttttactctgatcagaggtgtacatctttacccacaagacacgtcttcctcacgtgcaaccacgtgccacataccaccacggcatatggatggatgacatgacataatttccaacccatcctagccatagacaagagtaccgacccaaccccacctacggccggaacctccgggacaggttggcaggactgagcccctagcagcaggacaccagtcctgtgccatgacatctcgactaccgggccgcagctcgtgtagccttcatttgccctacagatgtccatcgacccccgacttcgtccatctccatccgtgtacttttgtttataaccagactgagccacaaactaagccttacccactagacatgtggaagtacggtagtgctttgcaacagaggaccgaagaccggtccttatgtggccgaggtgctactatcaaaaccatgcaccccgagcccagtctaaaaccattttgggggttttgaatagaggggaaggtgtgcatccaattccgcaataatccaaccattccataatgtccaagtgatatgaatattcccaaagtctagagttataaaaccacctaatgttgcctaaataattagcgaagcatctacctaaattcatactagtggcaccatgaatagagtacccactagctggggttttgtttattctagggtgaacaaggtaataataacaatagcaataataataaggtcataacaaaggtaaacaggcatagctaaataaaacagtgataacgcggaaatttaagtaaagcgataatgcattaatttaaatcaaaataatgtcacaaactaggatccaatatgttcaaagatgatgtgacttgccttgctcgctttcccaaacgtcggcttcaaccttcacgaagagcggatcttccgatgctgcagcgtctacacgaccaacagaaaggaaaaagtcttttactctaataaactccatataacaagcaggaaaaaaaacacaaaaatgggttcttgacttcttaaggaaaaattagagacttgaacggtccaattccgagttcaaatggccaagttatggccatttgaagtttatatgctctttaaatgagtatttaagaatttcttcatttaaattttaatttaaaaagggtttattacgtcagccgaggggagagggcgcgcggaccgggtccacgggagtggggcccacgcggcagcctcacagtccacggtggaccgggtgcacccgggctcacaccggctggcgctgcgggccccatgcgtcagctgcacccgagggcacgggcgacggacggccgggccccacgcggcagccacacgccgcgcccgaaggcggccacgtcggcgcggccggcggaaggcaacgcgcccgcgcccctatggtcgccgccggcgaccaccggcgcggcggagcggcgcccgagagaggggtgggaagggggaagcgaaacggcggtccacggctcaccccgggtcgacggcgacaacgggaacggcgaccggagcggagagaggcggcggcgcggctcgggtcgacggggacggcggcgttccggcggtcggcgaccgaaacggagaggtggacgaggtcggcgaggatgcggcgaagccgaaggaggcggcgccgaggtgggaggcggtccggggtgacgacggcggcggaccggagctcggcggcgacggcggagagagagagcgacgtcgcgagctcaaatccggcgaggaggaagggcggcgagaggcggaaccggacggaggaggtgcggggagggtttaaatagagccggggagagagggggtggccggggaagggaggaaaccggcgcgggaggtcggccgccatcaatggcgccggcgagatttgcgggggcaaatccgcccgtttgaacgcgggagagagagggagaaatggggggaaagagagagggaatcacggggaatatttccccccactttattgcgcgcgtggacggcgggaggcggcgggattcgcggcggcggcggcgctagggcacgggcgagcggcgggagcggcgggaggacagggatgacaggtgggccccacccgtcagcgagggtggcgggcgagcccacccgtcagcggcgcgcgcgcggggaggaggccggatgggccgcggggaagaggagagagagagaaaggtgtcacgcccagaaattcacgaaccagaatttctaagctgaatgtgcatttaacccctgtccaggaccagccagggtacacaaacgacaattgttgacatacagatccacgtcttacaaaaatataaaagattacaaatgcagcggaaaaagataaaagcgagctaagtctgaaggcttgactcctgcagcgggcgactccattccacaagcatccttgacggcagcgacgaaaccaacctctaagatacataatcaactgggaaggacttcaacgctggtgtgggggaaaaaagagcaaaattagtataccccttgtattagcaagtcacaccggaagagcaggtataatgccgaatatagcccacgaaggctaaaggttcttttgcataaagccggcatttcaagcagtagttgaaagcagtaaaacagttgtagtaattaatctatattaaccaatcactgtccaacgttacaccacgttgcaacaggcccaaaccaccacctgaactaaccagttccaaaagctaactagggtgaaactaatcacggtgaatctggtcgaccgcccataaccgcgggcacggctattcgaatagttttactctgatcagaggtgtacaactgtacccacaagacacagccccacgacacgttcccgtgcgccgacatgccaccacgacatatcggaaagaggccgtgacaggacccttcgcataaccccctctaaccgatcgcaccacaccttagggttcgcccccgtccccagcaggcaacgggcagcccccctttcgtgccgcggtgaatccggaagccgatcaaccggacaccccggccgacccaactccatcacgcccaccctcgcctgggtacgtcggctagagaaaagctacactacaagcccagccgttgcccacgctggcttgtggtaagtacgataaattcttccagggcatcccgcgaaccggtccttaaatgccatgggtgcgactagcaagaccatgcacccacagcccaccatgacgtgtattttaattaaccaacaccattacggtggcactaaatcaaagctataccaataatcaagtctatgctttaatgtgatccccctttgtgcactagttgaactaagcatggctaagcatctcctaaaccaacatctagtcattttaatacccaagttatcaatggcgtaagggaaacaacatatagctgagtaataggaccaatcccacatgatattgtaaaacaatgcaatatttaatagaaatgcgggacacttgtatattaggtacaatatgatcaattgcaatgtatgacttgccttgctctcgcactgatgaggccacagcaacgtcttcgagaaaccgggaaccgacgaaacggccgaaatctacgcgacaaacaaagcacacaagcaaaacatgctataagactactgaaacagataacaaagccatttttaatggattctacacatttttatgaatttactgagacttgaatggacttaatcggagctcggatgaattagttatgatttttagaagattctctgtgtttttactattaaagaaaagccttaatcaatttattgcgcaatattgccccagggctgacgtcagcaaggggtggggcggcgccgacatgcgggccccactggacagcggtgctaagagagggagagggggcggctggcaggcgggcccactaggcagtgtcacaaggggggggaaggcggcctggctcggctcggcttaagccggccggccggttgtggcgagggcggcgcgcgcgcacggtcgccagcgacggcaaccggcggcgggaggcggcggcggacggcgcaaagacggcggcggcggccgaagcggcagcgcgagcggccctagcggcggcgctacgcggcgggcggcgcggcaaagggagagaggaaggggccccggtgctcaccaaggagtccggccgacgcggagggaggcgacggctaacggcgacgaggagcgaccggcgaaccttgctggacagcggacgggaagcggaaggacctagagagaaggttgggaggggttagagagagggaggtggtccatggcgcacgacatagccgatcgaaggcggcggcaatggtggaagctcaccggagtgcgaggagatgcgagctccggcgatggaattggacgggagaacagcggacgaggtggacctcgggatggcggacgcggcggcgccgatggcggggtgcggcggtgaccgtagcggctgctagaggcggccggagcagtggagatggcggcggcgggtgggtgcacggtgctaggacgatagggagctcgggagcggacggcgaaagagggaaaaaggtggagagaggcgcggtggtcggttatatagaggtggggaggccggacgtggccgggagcggcggttccgcggcgacgacgtggagaggtggaggaggagagagagggggagaggattcaaatcgaatcctgtccgtgcgggcgcgcgcgcggacgggagagggcagggcgtggggcggcgacgtggggacgtgtgggcgcggagtggggcgcggatgcggaggaagcggcggcgtgggcggcggtttcggcggcggatggtggcggctgccggaggttagggacaaccgacaggtgggccccacctgtcggcgcccgggaggagaggggaggtgggaggagggaggagccggcttgggccggctcagccgagggaaggccggcgctggagggaatgggccgggcccaagaaaaaggaaaaaggagggaaaagaaaagataaaaggaaaaaggattttcccagggatttaatattgcactatgcttattttaattggttaaaattatttccaaggctctgaaaattccactaaaaatcctgttagcatattttgacatgtagaatccaagaaaaattccacatgtcgattccgattattatttgcatttattaatttgaggaattagctctaggttaaaataaacaatttcttcggacgatttattttatgaatttagagcaagggaggggtacttcagggcgtgacaaaagggatgggccgagccggcccaagaggggaaaaggggggggggaaaaagactttttagggtttttctttttataaaatcattttaactttgtttatttcttaataattgttatttgtgctctgaaaattccactaaaatttgagggctctttttagaccaaggagattttaacaaaaattctccgggccacatttgaatttttcttgtacgtattttagtgtttgccaatttctttccgaattttaattaattctattattccttttagcgaatgatttttaattttgggatgaatttatcaggacgtgacaaatccaccccccttacaagaatctcgtccccgagattcgaggaggccagcaagaagataggttgggcggtcttctcttcttggttgacttcttccgtcgcgtcttctataacacacttgcctagcaaaacttctccactctggactgcttggctcgatctcctgttgtagatggaatcttctcttcacatgacttttccctggttgcacctctagctgacttcgactggctacggcattggaagatggggcttcagttccagaacttcttataactcatatctttggagtcaccctcatacaagttaccacttcatgtcatgcgtcaacactagcttgtcattactaagataccatgcttgtcatcatgagaataccatgcttgtcatttacttctaacttgccaccaactgcctcatattagctttcctgctctccgggtgctagctacttctgctattcgatgcaagggtcggtaactttgcctttgaattatgcttcccaagagaaccaacttatcccacttgacatactttgacgtcttcccaaatggctttattgctggatttgttattgtctaatcattatcctgccaaatttgaagcttcgttgttagatgtgattttaatctgacctctgtagactatcttcgaacatatcacttggttcataactgggaatagctcccacgaacaagcaactcggattcactttctttacattcagttttcttcccattattatcttcaggttgtcctcagttagcattcaacgtattcctttacacctttaaccttgatgtgttctttcccattggatcatctcccaagacatggcattgcctggtaaccggtgcttgcacttttcactccgtgtagcatctgataccgagttgaagatttcactctttgccttcatagaaacacttttacctaggtcatcttgcatacttaatgacaaggtgactgttgcggggcaattacaatcaggggtcttccttgagcgatgcagagcatgtttctgtttatcaatcacctttcggcctacttctttcatgctagagaacatctttgccaatctcttttatcaatcttctttcggcttatctctaacaggtggtattctttaatgtggattgcggacgcttctggggacgatgaggtcctttggcttgctgcctttcagtgaaaccttgatgtggtttgtcaaaaagctgcactgactaccttcagggaaatacattgcttgctatctgtatctatgccactagggtttaattgccgatgatcatctttagtgcttcctcgagatggggagcatccaaattgttcttctgccatatcacctttgacccttttctgatacctgatagactaattaccaaccatcgactactatgttctcaaatactgatgtctcctggatcttcttaactgtttgtaggtatatccgaacttatcaatgtagaggcatggcgggtacccttatgggtttcatccaacaatccttatcttgatctgtaaaaggcgtatccaaactcctatccccaactactgtctcattggctttttaacccaacacagtttaattggttttcttttccatcaacaggttggttattaactcgaggttagaacatagttcctctgaaatgagaccctaggtctcctttatcagcaagcaattatacacataatcacatatccgcatcttccaaaagaatcctcatagaacttgtctgtattacacatttctccctcattacatgaatactaagcactgcctaaaaggaaaggtgcttagcatcggtacattgtttctgctatgggttctgattaacacgaggcctcacgggtacggcgtttgctccagtgaccacaatacgattgggatgtctgcttcgtgtaaattggcggtaatgtggaggtcgactttgccttggttgcaggcagtccctcgagtaatgccctggttctttgcaattgtagcaaatcaacgtcttctttgctgagctatccgtctggggacggtcattctgacttggagttggaattggtggctggaaatccttgctaacattggcatcagtggtaccatagttgctatcaccatcggagtctttctcagagtcccaattgctagggttgtcattttgggtgccatcattgatactatcgtcgacatcttggtgaatgatgttgacattgcacgcttgattcgagtggtcactattggggcaagaagcatggttgttggtggtaacatcatcatcattagtattgctaatgttgttgtctgcattgtgtccatcttcttggggcggaaactcttgatgcgcaacagaagatccggtgatctgaagtggctcagtgcgctgtccttggttaccacatggaaatactggaatgttgaccatccttctcttgcagttcgtcatccgattatgctcactttcaagttgcatggctttgtccacaagtttctcaaaatcttcataatcctctaggagtagttgcactgcaagctcatcttttaacccctggagaaactgctcttgtttgtcttcatccgtttctacatcttctggtgcatagtgagccaaacgatagaactcgtgcaggtactctgtgacggtcaaatctccttgcttcaggtagcgaaactctcgttttcttagtgtgatcattcctgcgggaacatgtgatctcttgaatacagatgaaaactcgttccaggtgatggtatgtccttctggccgtgatgcttcatagctatcccaccactctgaagccggtccaaccaactgatgagttgcgaagccaacccgctcctggtcggtgcactgaatcaaccctagcttcttctcgactgtgcgcaaccaatcactggcttccataggatcgacggcaatggcaaaggttggaggctcagttttgagaaattctgataacttgcactgttgctggactgtgggtacttgaacgttggttgcccctgctgggttgttccaattctgtaatagttgaaaggctgttgccaacatgttggtttggttaaccacaatttggattagctctggtgaggtttcgttgatgcttttctcattcccactggcttgggttcttgagtcatcggatccatcattcccatagcctttgttaccagtgttatccatctgtcacaaggtagaggttgagaggggaagcatacaaggaaagaatcgaccagaactagggacaagaccttaaaggaactaactctttttgttgatgtgttgtttgttttgcttattctgcaggttgattaagcaaacaacctagcatggttacatcacaacccaccgatgcaaaccacgcgctacacacacaagcaaggaacacacgactaacaacactaccctatagggtggcttaggttctgcgacgggttcccaagatcttcactccttcacagctggcttcactgcttccttcacttcactagcggatcctgcagccttctggagcttcggcagacaattgacgacatcttcttcttcacaaagctgaccaactagtactagttgaaatttgaagaaggaagaaaagggtaaaccttgtgcaaatagcattagggaaaggagaaaaagaggaactttcgcaaatagttttagttataaaatatgtccttaggttttatccacttggcttatcctacagtcgagatggctctgataccagcttgtcgcgaccgagaaaattaccttttcccgaacgctagtgtattaatccccgtcccaggaaaagccggggtacaccacacaaacatgatacaaaaggcacatctttattatatcgataatatttacattattacaaaggcacttaaggcctgacaatcaaaaataaacagcagcggactagcgggcctacggctccatcttcacaggcgctcaactggggtataagccaggactccacctaagacttcttctccaaagcttctcttactgaagggggggaaagatagagcaagaatgagtacaaccacagtactcagcaagccacaccggcggatgcatgattaatgcaaggggtacaaggggtgataatatagggattaagttttgcagaaaacagcatttaaaagtcacttagttgcccaaagccattttaaaaagacgatcctagagctacacagtattattaatcaaggccgtgacccctcacgaacctgccttaacccaaggcctacgatgattcagaccgaactggcaacccgaccctgggtcccagctcgtcccaagccaacccaggccaaccattccacattttagttgttaagccaattttaagaattaaaacactaacttgggtacattgctcggcttgcccataaccgagggcgcggctattcgaatagattatactctgatcagaggtgtacatctttacccacaagacacatcttcctcacgtgtaaccacgtgccacataccaccacggtatacggacggaagacgtgacatagttcccaacccatcctagccataaacaagagtaccgacccaaccccacctacggccggaacctccgggacaggtaggcaggaatgagcccccagcagcaggacaccagccctgtgccatgacatctcgactaccgggccgcagctcgtgtagccttcatttgtcctagagatgtccatcgacccccgacttcgtccatctccatccgtgtacttttgtttataaccagactgagccacaaactaagccttacccactagacatgtggaagtacggtagtgctttgcaacagaggcccgagcttaatccttatagtggccggggtgctacttcccacaactggcatgcacccaaaccccaccggaaaacaggttttaggggttttgaaagaggaagagaggtgcatgtccaattccaccataagccaaccattccatagtgtccaaatgatatgagaattcccaaagtctaaagttataaaaccacctaatgttgcctaattaatcagcgaagcatctacctaaattcatactagtggaaccaggaatagagtacccactagttggggttttgtttatcctagggtgaacaaggcaataataacaatagcaataataatgtcttaacaacgataaaaaggcatggctaaataaaacagtgataacgcgggaatttaaataaagcggtaatgcattaatttaaatcaaaataattttataaactgggattcaatatgctcaaggatgacgtgacttgccttgctcgctttcccaaacgccggcttcaacttccacgaagagcggatctttcgaagctgcagcgtctacacgaccaacggaaaagaaaaggcttttactctaataaactccatataacaagcagaaacaaagcacaaaaatgggttcttgacttcttaaggaaaaattagagacttgaacggtccaattccgagttcaaatggccaagttatggccatttgaagtttatatgctctttaaatggatatttacgaatttcttcatttaaattttaatttaa

SEQ ID NO: 29570 - DNA, 4072 bp, Oryza sativa
cgtggacattaattttgaggccctcagcccattggcaagatagttgggcccatttggagttttttagttgacttatggggcctccaatccatgtaaatgtgtcctaaatgcgcggaggtgcagtttgtcgctttacggatgtgttttcttctcaaaatacctgcatacacatatttcaccaacactagtagaaatgattagtaataatacctatcactaagtgggataccatgttttatttcactatttgtaggtattgacggtcagatattttgatttaaggaccgtcaacagttcccgatcttccgaaaggttataataaacaacgatttgggcggagtcgcgacactcttaacgaccaaatttggtaatccaagtatcagagatgaagataggattgaagcagaattcaagatggaaattgttctggaaacagagtgaggatcggctaaactccgaatcggctatgactatgatcagcagagttcgagtcggactaggttggccgattcagccgatactgtcaatgtgacgtggtacatgttgtcgggttgagttaatatgcttcatgaggattgccgtgcatggattgagtcctgagaaggcaattgtatctattaattaggatatttcatgtaatttccttagagatatgtttgggctaaagtctgccacaaaggcttatggtatcttagagtttgttagagataagagtcgtgtccgacacggacatattttgtaatctcgggtataaatagatcccgagccccatataatatgataacacatgttcaatacaatctcggcgcatcgccaccctttactttcgttttgtttcgacgagttcttgctttcgggttgagctgcatcggtttcaatcttcaactagaggtaaaacttgttatggcggcttgcgttctcgggattagtgcttccatctttatgtaattcgtcgtgttatcatatattctatataatctctggcaatattgttatctaacttccaatcggcctatatctgctactagaaggcagccgatcgggttaaataccaatgttgacttagattatataggatatccaccactctatgaaataaccagtggcttgattgtctagatattgtccttcttttcatacttatagctgtatcagttgagtttcaccttataagtcgtgattagaatctcaatctatagcctgcttttggttgccgattagggtagcatcggggtttcaacctgatttaactacttttatcctatatgcttgactgacatgttaaatctgccctttatattaagatcttgctgcatttaagtatatttaggcttttgtttagtatattctacttgatttaatatcttaatatagagtagtatcagagtattagccgatacatgctagatctatctgatcggctatgctatgaacatatatagtctccttgttaatatatatttcaatctaagtgatttatactgtctcagtatggtgaccaatctatcccaataacttgttttaagtatatatcgacataaggattatatattgttaatatctacagccgatcgggtagacttagttcttttttattcattcatgatcgccgatcgatactcatatgacattggctcagagataaatgatacatcatcggcaactagccgatcggctatcctttatggatttaaccgcggtttctttgtctttatttcttgttgattgcaggatcaaatcaactggcacgctcacacacctaaaggcaagcttttggacctgcactggagttaagcagatctcccaggcctcgtgtttttacatcaacacgcttttggcacaccctgtaggacgaacaaacatgtcagcagaaaagcaatctccgtcgtcaacgggcaaatcggtctgaggttaacgaagcagatatcattccagtcactgtagacaagctttctccagagcaaaagaaagagtttgaactgatgatgaaacagacacaacaacagttcatgaattcattcatagagactcggcatgggagagttgttcaaaagtacaagttgaagctagttgccgatgtccctggaacaggttcttctaaagatggtgaggtgcaaaaaactcaagttagtatagatgattcgggtgataaaggcaccacaggcggctcaagcggcaaaggtgacggttttcaggaaggaatggttgaggatcttggtccagatggtagtggattacaaccatactttaacaatttccaagatcagattgactacgctgtgcaacatgctttgatcaatcaatcaggagtcttagtcaacactttaaccaacatggtgaaaacaatggttgatggcacaatagctgagcatcaagctacatgaccagtgtatttgccaggtggagtttttcgaaattataggcctttggttacaggaaatcaacagggttcttctaacacaccatcaactcagccgatggcaccggttacaacttctgctccggctgcacaagctacaccatcatcggcacaaaggcaaatgaccaatcctcgattgttgacaagaggacagccacaacaaggtggacaaaacatcaatcggctgactcaggagtaggtggctgctatgttcctgccaaacccaccagctaccgatccagcactgcaaagccaacatacgccaccaagacaacacattacttagccgattcaacagcaaagtttgctaaatgcatcggctaggttggggacacctgataatcagctaaggcagcatgttgcaactcgagtcgtccatgagcacttggttcataatgtacaaccagatcaatcagtgatacctcaagttatacctgaacatttggtgcgtaacatccagccgaatactcagaattacaatgggggtcacttgaattatcattatcagcctccttcacctcatgtccaccaaggggggtcacctcaacttcagtttgctcctcagttcaaccagttcgagctgatacaacagaatacgcaaggggtgccttagcagagacagtgggccgacatgatcgcagatgtgatgagggatcaatttgggcttaagccgaaggatactgggaacttatatcggcatccataccctgagtggtttgagagagttccattgcctgtccgatacaaggttccagacttctcaaaatttttagggcaagacaatgtttcgacatatgatcatgtcagctgattcttagctcagtgtggtgaagcatcggctattgacaccctgagagttaggctgcttctctaccatacaattctatcaatggttgggccgatttggagaaacaatttcatagctatttttacagtggaattcatgacatgaaactactttctgacctgacagcaattcggcaaagacatgatgaatctattcaggactacattctaaggtttagagagacaaggaataggtgttacagcttggctctaacagattcccagctagccgatttggctttccaaggtttgatagctccgattaaagaaaagttttcatcccaggagtttgaaagcttatctcacattgcacaagtgatgttgcatgagcaaaggtttgcagaggctaagaagaatttcaagaaaatcaatcatgtgtatccttacatgtatggatctgatgatgaggatgactccgaagtagcagaagtcgaatgggtcaggtgcaaaaaggttgtgccatgcccatgggtgaggagttctggaaaagaagaaagatttgattttgatatcaccaaggctgataagattttcgacttgttacttcgggataagcagattcaacttcctgctggtcatatcataccatcggctgaggaactaggcaaaagaaggtattgcaaatggcataattctggttctcactctactaatgattgcaaggttttcacacaatagatctaggtggccattgaaggggggaagattaaatttgatgactcaaagaagccgataaaggttgatggtaaccctttccctgtcaatatggtgcatacatccggaagggcagccgatggagggaaaaat

SEQ ID NO: 29571 - DNA, 1922 bp, Oryza sativa
cggtgcagggaggcacggggagcgtttaaatagtgttgggagggggagagaacggccggatgagggggaatcgaccgcggaagatccggccgccattgatgcgccggcgaagtttgcgggagtgtttccaaacgaatccgagggagagagagagggaaaagtggggggaaagggagagggaatcacggggagtgatttccccctctttattgcgcccgggggcgcgctggatccgacggaatcctcggcggcgccggcgctagggcacggtcgagacgccggtttcggcgcgaggtaggggatgacgggtgggccccacccgtcagcgagggtgccgggcgggcccgcgcgtcagcggcgcgcgcgcgggggaaggccggatgggccgcgggggagaggagagagagggagggagctgggccgagccggcccaagagggggaagggggggaaaaagactttttagggtttttttctttttataaaacctttttaactttgtttatttcttcttaattattatttgtgctctgaaaattccactaaaatttatttacgcattttaggcttttaggaaatatacaaaaatcctccaagccttattcgacttttaactttgcacattttaattgttggaggctttcacatggattttacttattctatgcacaattttgaggatgtattttagagtcgttttgggacgcgacaaacctaccccccttaaacggaatctcgaccccgagattcggaagaactggcgaagagatcgggatgggctgccttcagcttgtcttcacgctcccaggtggcttcttcttcggcgtggttgctccactggaccttgcaaaaccggattacccggttcctggtcctgcgctccatggtgtccaggattttcactggcctctccacgtaggtcaagtcttcgcgaacttcaatttgctctgagtcggcctgctcggatggcactcggaggcatttcttgagttgcgacacatggaacacatcatgcacgttgcccaaggaggcgggcagctccaattggtaagcgacttctccgcgtcgggcaatgatacggaaaggacccacataccgaggtgcgagcttcccttttgtctgaaacctgtgtacaccccgcaatggcgtgacccgaagatacacaaaatcatccactgcgaattccaggttacggcgacggttatctgcataacttttctgccgggactgggccacctttagattatcccgaatggttctgactttagcttcagcttctctcaggatatcagtcccgaacacttggctttccccaacttgatcccacaaaagcggtgtccggcatttccgcccatacaacgcttcataaggtgccatttgtatgctggcttggtagctgttattgtaggagaactcggcataggggagactcttatcccaggtcttcccgaaatccaggacacatgcgcgaagcatatcttctaggatctgatttagacgctcggtctgcccatctgtctgcgggtggtatgcggtgctgaagtttaatcgggtacccagctcttctggaagcttcttccaaaagtgagaggtgaattggcttcccctatcggatacgattttcttgggaacgccatggagactcacgatccaagtgaagtagagctcggctagtttgttccctccataggtggtcttcacaggaatgaatcgagctaccttggttaatcgatccaccactacccatatggaatcatacccaccttgggtctttgggagtccggtgatgaaatccatcccaatttcatcccatttccattcaggtacttggagaggttggagaagtccggccggtcgtaggtgctctgccttgacacgctggcacacatcacaaagggccacgaactctgcaatttcccgctt

SEQ ID NO: 29572 - DNA, 11290 bp, Oryza sativa
  unsure (1)..(11290): unsure at all n locations
tgcgggagcaaatccgtccgtttgaatgcgaggcagagaggggaaaaaggggggaaaggaagaggggatcacggggagtaattcccccctattaatttcacgcgggggtggcgggatgcggcgtattcgccggcggcggcgacgcttggcgcatgtgggcggcgggaacgccgggaggaaggggatgatgggtgggccccacccgtcagcgagggtggcgggcgggcccacccgtcagcggcacgcgcgcgggagaggccgagtgggccgcggggagaggagagagagggggagggagatgggccggattcggcccaagagagggaaggggaatttttagggtttttctttttataaaacctttttaactttgtttatttcttaacaattattatttgtgctctgaaaattccactaaaatttatttacacattttaggcttttaggaaatatacaaaaatcctctaagccttatttgacttttaactttgcacattttaatttttggaagctttcacaaggattttaattattctaggcataatttaaaggatatattttagggtcgttttgggacgcgacacctgggaattcattatcaccctggaaaggctaatgttgtagcagatgctctcagcgggaaaggttattgcaatgctacggaagggcgacagttgtcattggagttatgcaaggaatttgaaagattgaatctgggaattatcagtagaggctttgttgcagctttagaagcgaagcccactctcattgatcaagttagagaagctcaaatcaatgatcctgatattcatgagatcaagaagaatatgagaagagggaaagctatcggtttcttggaagataagcaaggaactgtatggttgggtgaaaggatttgtgtcccagacaacaaagatttgaaagatgcaattctgaaggaagctcatgatatgctatactccattcaccctggtagtactaagatgtaccaagacctcaaggaaagattttagtgggcaagtatgaagcgcgagatagcggaatatgtagcagtatgtgatgtttgtcagcaagtcaaggcagaacatcagaaacccgcaggtttgctgcagcctttgaagataccagaatggaactgggaggaagtcagtatggatttcatcactggtctacccagaacgtcgtcaggtcatgactctatttgggtgatagtcgacaggcttaccaaagtggctcattttattccggtgtgaaccacctattccggaagtcgtttggcggaattgtatatggcaaggattgtgtgtttgcatgttgttcctaagaagatagtatccgatcgaggtaccagtttactttaaaattttggatgaaacttaggaagagatgggttccaagttgaactttagtaccgcttatcatccgcagacagatagacaaaccgaaagggtaaatcagattctggaagacatgttgagagcctgtgctttagacttcagtggaagttgggataagaatttgccttacgcagaattctcgtacaacaacagttatcaagctagtcttcaaatggctccttacgaagcactgtatggtcggaagtgccacactccgcttttgtgggatcaaacgggagaacgtcaagttttcgggactgatatcctaagggaagcagaagagaaggtaaaaatcattcaagaaagattgcatgtggctcagtctcgtcataagagttatgccgacaattgccgtagagatcttaaacatatcctttgattcttgatccaaattcttccttttgatctagccactgatctaattcctgtggcttgatttccttctcggcacaagaataatattactacaaacattgtgaataattgctcttctgctaagataatagattatatccttgtcatccaaatctcctattagcctcaaacaattctttgaaacccatgccatatattttgaggctaaaaatcctatctatcttcctccatttattttctctccctctcatttgagtgcatcaaataaattccgttatattctatctctcaaaatattgcactcaaactagaaaatatctcttttggaaattatatccaaatataatttcctttcaaaattccctattcaaatttcttccaaatactaatctcatccaatttctatcatacaaataacctacaaaatttagaattgatttctaaatttaattgggctaaaatccctttgtctcttccttttggcccatcttcctcttcggcccagcccaggcgagctgccccttcctcctaccgtgggcgcatccaggcgcccgcatgcgccgctactgacgccgtgcacaactcagctaccgctgccgacatattgccttcgatgccaagcaatcgccgccaatgtcctgccgtcgccgctaaggcatcgacgncgacgtcatatgtcacctcacgccggcgacgtnagactatggagcaaaccgacatcttcaccaatcacaagccacaagccgtgccgtagcactttcttttcacgntcgacgcaccaagaccaagctcatcttttgctttacaaccgaccttcacaaccgacgtccgacgcctataaatagaaggccagccctccccttttctccacatatgagccgagctcctcgagctctctctctctcctgttatgtctagccaccaccggccactgtcgatctccctcaccggagtgtttctggccaagcccttgcgccatcaggtttgcctcgatgaggtgaactcattttcctagtttccccttcctttccccttccgaaaccaaccatcacagccacctccttttgttgtcggagcaagctcttgcctgcgccgttccagcctcctctctcacttcctctgccgactgtcaccctccccaggtgcgcgtcgctcgggaacatgtttttccgccaacgtcgcagcctctcaaccaccggagtatcgacgcccgtcctgtcccttctctctgtttgttcgtggagaaagagagaagaagcaggaagaaggaagaagaaggaaaaagaaagagagaagaaaaagaaaaaggacagctactgacaggtgggcccctacagtactatttcacattttctagatttaattcaaatcctattctttagaagcccatatctcctaaaccgtagatccgattccagtcaaacttggacctaaattcatctaaattcaaaccctaccttttgatactaaatttgctatttaaatattttatttgaatttccttgatttatttaaatgccatttgcctttcaaatatctcctgttactccaaaataccctttagccactaaaagccgccggttagaactttacgccttccatggagacgttcgcggtctattggccccgacgtcgaaccgttggttgtaaagcccagcaaattccaaaaccaaggtcgaagtgctgctccgggtatcctacgcctcgatgcgtacaactgtcggagcttcattattccctcgacctccacatcacgccgcacagttagctctcgagctctgtgtgatcctagccgctccgccgccacccctctcggatgaggcttattcagaattcttgcaacttcagggggttctggacaccttgaacttacaatcagggatgggggatgcttggaattttatctggggctcagataagtacactgctaagaaattctataagttaaattattcttcattgcaaccccccagacccatgatttggctatggaaaacaaaatgtgtcatgaagatcaaggtctttgcctggctaatgttctgtgatagacttaatacaagagatatgctggatagaagatattgtgccaaagaagatgatgatctcacatgtgttttgtgcaatgcgaactgcagagagacaagactgcacctcttctttttatgccctttcagcatcaggtgttggcaatacctgggaattgagtggaataacaatttggagtttttccaaatgatctctctagcaagaatcaaatttgctcagaagggtttcctggaaattttctttttggcagcttggcacatctggaaacaaagaaatggcttcatatttcagaacatccaaccctcttttcaggcatggagatctcttttcgttaaagaagttcttctgcatatgtgcagaatgaatgaacctttaaagcaaactgtttttaattgggtacaaaccttatagtatctctgtgtgaaccgcatgtaatatttgtaaccttgtaaatattttgtttatttataaaactacactactgggcaaagcattggcagttttcctggtcaaaaaaaaattgttagtttcgggtcccgacaggactggtatcagagcatatgtttgactataggatgaaccttaaggattactgactaagctaagtttgaatttatttcaagcttacctttttaagggggtagatttaatccacgagcatgcattataatatcatttgtgtatttcaggacaatggcagaagtgcatgagcaagaacttatagaaactgcaattactatccacgataatgactgcattgatcaactaatcaatttgatgactaaactgaagataaatgagaagccggaattctattcacatgcctatcaacggggagaacgttgggaatatgatatgaccgtgaagatcaatcctccacgaggtgaacgtgatatgtattacttttgaacacgtcataggcgggataccgtgcgagctgcactatatgatgtgtccagagaggcttttctacgtcttaatcatatctaccaagacaggttacaacactctcgctattcttatcatcgggcgaagattattgtaccctccagaatgtggattatcatgaacaaccagtaaaagcaactatgtccatctggatggaagccgtggatgatatgtatgaagaagctttggaacatatggacatacaacgtaaacgtttggaggaagctgaacacagagaagctgttctcaaacacaaatatcgtatacttcatgaattatatgaggaaagggaaaaacaaaattctatcctcaatatttgtgttgcaggagcagccttctgtcttcaccaaattccaagtatgggtagtgatgacgaagacgatgaaggtggtatggaaggacatatctcaccagtacgtgaaggtgaaccacatgggccaaaccctcaggataatggtgaagaattttacaaggtttaccaccatcaccaccaccgttgtatcctattcattctgatgacgaagcagaagaaatgcattcagccatggatatcagtgaacctagccaagaacctaaaatactcaggccaaatcgggtgtttcatatcaataaccaaaatactgccccaatttggactgaatctccagaggaagaggaagatctagaagaacgagagcttgagatacaagaacatctttctatacatgctgatgatcaagaaaataatgaagacccctactcatgctctgctctcagtaatactgcatcaacttctgcatctcatgaattttcacacttcgaacctacatcgttatttgctaatcccgcagaaggcagtggtggatggcttgacgaatagaagttatagatagttaaaggtcttaagtgtagaatagttagtgatcctactcctctctaacttctatgtgtgattaccccttcttttgtggttgtggttttctttggtttgtttcttttgtagcatacaccatgtacaatgttgttcataaataaaatctatgtttaattatggatgttgactcccctttgagaagatatcaattaccccattttctagatgaatccgggcaatggcagtatgggtgaaggagatacaggagaaatcccttcaccaaatcctactaccttggcagaagtaatggcaagacaaactcaattattgcaagccatagcacaaaatcaaggaaatataggttacagcgcacatgcagaatttatgagaattaaaccaccgatcttctctaaatctgaagaacctatggatgccgaagactggctaagggctattgaaaagaaactaaccttggtcagaacaaacgaacaagagaaggtaacctttgcaacccatcaattagaaggaccagccaatgaatggtgggaagcatatcaagcttctatagaagatcctacacatattattacatggatggaatttactacaacttttagagatgcttttatacctacagctgtgatcaggatgaaaaagaatgaatttcgtagattgaggcaaggttttatgacagtacaagaatatttgattaaatttacacaacttgctcgatatgccgcctcggacattcaagatgaaaaagaaaagattgaaagatttatagaaggactacgtgatgaacttcgaggaccaatgattagtcaagatcatgaaaattttcaaagcctagtcaataaagtggttaggctagaaaatgatcgtagaatggtggaaggactccctaagagaagaatgaatttacaatgacaatcactaactagaggttcactacaagttcggaggccttatccatttaaggcatctctacccaatgcaaggccaggcatgccaccaatactaccaagacctggattaaaaatggaagactctccttgttatgtttgtgggaaaattggacattttgcaagactatgccctaatcgtcaaaatatgggaggccaaacttcttatcagaaaccatctactacaggttttataaagaaaaatcctccaataattaagagtggacataatcttggacgtggtcaagtacatcatattaaagcagaagaagctcaacaagatcctaatatattgatgggtatgttcaccataaactctaaaccagttactattctatttgattctggtgcctctcattcctttctatctgcaaaagccaattggaatcagtctttacctaaagataatttagataaggctgtgctaatacattcacccagaggaaactgtattagtatcatctatttgtagaaatgttccggttaaattaggagatcaaatatttttaattgacttgatggtactacctacccaaactatagatatcattttgggcatggattggttagccaagaataatggactgatcaattgtgcaacaagagaggttatccttactgatgaacaaggaatgaatacaaggataatagttaaatccaatctatctatggaacaacatatgacagacatttgtatgcttaaaccaaaagaagaagttccagtggtgcaagaatatttcgatgtatttcctgaagaactaagttcattacctccagatcgggaaatagaatttattatagaattacttcctggaatggcacctatatcaaaaagaccctataggatgccaattaatgaattggaagaattgaagaaacagatagctaagctgcaagaaaaaggctttattcgaccaagttcttcagcttggggagctcttgtattattcgtaaagaagaaagatggaagtttaagaatgtgtgtagactaccgggctttaaatgaagtagctattaaaaacaaatatcccttaccaagaatcgatgatctatttgatcaattaaaaggagcaagtgtattttctaaaatagatcttcgatcagcatatcatcagttgaaaattaggcaagaagcatttggattaaccaatgcccctgcctatttcatgaatcttatgaacaagatatttatggaatatctggatcaatttgtggttgtatttattgatgacattctgatatattccaaaaataaggaagaacataaacaacacctacgaatggtattggagaaattaaggcaacatcagttatatgccaaattcaataaatgtgaattttggctagacaaagttgcatttctaagacattataactaaggaaggagttgccgtagatccggagaagattaaagcggtaatggtatggagaacaccaacctcagtacctgaaataaggagtttcttaggacttgctggatattatcggagatttattaaagatttctccgctattgcaaaacctatgaccagattacttaaaaaggataggaaattcgaatggacaccagaatgtcagagtaattttcaaagattgaaacataagcttactactacgccagtattaatcttgccagacatccaaaaagattttgagatctattgtgatgcctctcgacaaggattaggatgtgttcttatgcaagaaggtaaaatagtagcttatgcgtcaagacaactaagaccccatgaagataattacccaattcatgatttggagttagcagcagttgtacatgcgttgaagatttggcgacattacttaattgggaatcattgcaagatttataccgatcataagagtttgaaatatattttactcagatggatcttaatcttcggcaaagaagatggttagaattaattaaggactacaatttggaaattctataccatccaggaaaagccaacgtagttgctgatgccttaagccgaaaagctaattgcaatctacaacaagaaataatatcagaacaattgcaagcagaaatgcttaaactaaatctgggtattattaagtttgaagaattaaacactttggagttaaaacctaccctaatggatcaaataaaagaacatcagaaggaacattctgaaatacaaacttttaaggaacgaaaggtacaaggaaaggctgcagatattaccgaagacctggaaggaatattttggtacggagatagaattgtcgtaccacaatcaggaaacttgaggaaggtaatactaaaggaagcacatgattcagcctactctttacacccaggtagtacaaaaatgtaccatgatttgaaagacttatactggtggccaaatatgaaacgacatattgcagaatatgttgcactatgtcatgtttgtcaacaagttaaagcagaacaccaaaagcctacaggattattacaacccttacaaatacctgaatggaaatgggatgaaataggaatggattttattactggattacctaaaacttctactggatatgactctatatgggtaatcattgatagacttacaaagactgctcgattcattcctgtgaaaacaacttatactggagcacaagttgctgaactctatatgacaaggatagtatgtttacacatagtgccaaaaagaattatttctgatcgtggtaccaatttacttcacatttttggcagaaattacattatgaattaggaagttatctggatttcagtacagcatttcatccgcaaatcggaggacagacggaaagactaaatcatacattagaagatatgttaacagcctgtggtctagattttgctgctagttgggacaaatgtctaccttatgcagaattttcatataacaataattatcaagccagtttaaaaatgtcaccacatgaagccttatatggaagaaaatgccgaacaccattgatatggacataaaccggagaaagatgtatattcggaacggaccttttaaaagaagctgaagaaaaagttcgactgattagagacagacttaaagtagctcaatctcgacaaaagagttatgcagattctagacggcgagagttaacttttaatactggtgattatgtttatctaaaggtttcacctttacgagggataaaaagatttaaagtcaaaggaaaattagctcctcgttatattggaccatatcaaataattgctaaacatggagaagtagcctatcaattggctttaccagattatctatctgatgtacatcctacattccatgtttcacaattaaagaaatgtttacgtattccagaagaagaaatatcagtaagtactgttgaactgaatcaggatttaacttatccagaataccctatcagaattttagaagaagcacagagaacaactcgtactaaggcaataagaatgtttaaagttcaatggaatcatcatacagaggatgaggcaacttgggaacgggaagattatttacaattggtattcccgtatcttttcgaagactcctaagcaaatctcgggacgagatttctttaaggggggtaggtttgtaacatcctcaaattttaaactaaaatttgactgcatcatgctgacttttgattaatttagtgtgtttcaaaaatttatttggttcctaattggttcaagtattacttctttagaaccctactaatttacccaaattattccctttattccaaaccctagtgaatttgagcaaattctctcaaatttcaaactatagattatttccttagcttatcctaatattagtgaggacttgctatacttcaaaccctagtgaaacccttccaaattcatagattaaattcattattttctacggaaatattcaaaattctgaaattgattgttcattgcacataaggtgttcggtagaatgcctagcccaactagagcagcccaatcccctccaatcttgtacaaagtctagaattgatcctaggggaccacaacccacttaaaaccgtggctttctttgcctcttcctccccttcacgcgcgtggcccgggcatccgacttagtcgcgcgccgtgtcgctgcgcgtcggcctcggagccgcttgcgcgtgcccgacctccttggcgcgccgtcgcccgtccgacgccatcaaccccactgccactgcaccaatcgcaacgaggacaaagccaggacgacgaccgccgcacgaaatcgccgctcgacgccgtgcgctcctgtccaagccgccgccgagtgtgatttcgtttctatccggggtgaatcgcgccaattcttgccgcacggttggattgaagatagacggtggtatcccctctcacaattcaaaccattcacccccgagccggccgttttcaccctcgccgccattgcgtgtcgcgcctggattggcgccctcacgtcgccagccgattccaaccgcggtcaagtcaatccttcgccggtaagtatttgaacgtggcctcccgccactcaaatcgatcttacccgccctctcacagcctctgctgccctagctctatccaaatcccgagctcatccatggcgatgacggtgtccgagctcatccgctcctcctagccctataaataggaccccaatcccttccttgtccatcatccatcatcaacaatcaaagccctacaaccccgaagctctgcttcg

SEQ ID NO: 29573 - DNA, 2575 bp, Oryza sativa
ttaaattaaaatttaaatgaagaaagtcgcaaatatccatttaaagagcatataaacttcaaatgaccataacttggccatttgaactcggaattggaccgttcaagtctctaatttttccttaagaagccaagaacccatttttgtgctttatttcggtttgttatatggagtttagtagagtaaaagccttttcttttccgttggtcgtgtagacgctgcagcttcggaagatctgctcttcgtggaagttgaagccggcgtttgggaaagcgagcaaggcaagtcacatcatctttgaacatattgaatcccagtttgtaaaattatgttgatttaacttattgcattatcgctttatttaaattcccgcgttatcactgttttatttagccatggctatttacctttgttatgaccttattattattgttattgttattattaccttgttcaccctagaaccaacaaaaccccaactagtggacactctactcatggtaccactagtatgattttaggtagatgcttccctttaattaggtaacattaggtggttttacaactctagactttgggaatattcatatcacctggacactttggaatggtttggttattgtggaattggcttcacaccgctccttctattcaaaatccccaaaatggttttaggctgggctcggggtgcatggttttgatagtagcacctcggccatataaggaccggtcttcgggcctctgttgcaaagcactaccgtacttccacatgtctagtgggtaaggcttagtttgtggctcagtctggttataaacaaaagtacatggattagagatggacgaagtcgggggtggatggacatctctaggacaaatgaaggctacacgggctgcggttcggtagtcgagatgtcatggcacagggcggtgtcctgctgctaggggctcagtcctgcctacctgtcccgggagtttcggccgtaggtgggattgggtcggtactcttgtctatggctaggatgggttggaaactatgtcacgtcttccgtctgtataccgtggtggtatgtggcacgtggttacacgtgaggaagatgtgtcttgtgggtaaagatgtacacctctgatcagagtataatctattcgaatagccgcgccctcggttatgggcaagccgagcaatgtacccaagttagtgttttaattcttaaaacctgcttaacaactaaaatgtggaatggttggcctgggttagcttgggacgagctgggacccagggtcgggttgccagttcggtctgaatcatcgtaggccttgggttaaggcaggttcgtgtgggttcacggccttgataaataatattgtatagttctagaatcgtgtttacaaaatagctttgggcaactaaatatctttaaatgctgtttactgcaaccctaaccctttatattataactcctttgtactcccttgcatttattctgcacttgtgggtgtgtcttgttgagtacggtggttgtactgagtcttgctcaatttttcccaaacccagaagaggagttcctggaggatgaaggctttggtgtctagctcgtgcctgccgtcaagtgcctgtggtcgtcgccctagtcttccgctgtttctcgtttgtctttgcgtgtgctgggccttcgctgcccatgtaataaattaactatttacgcttccgcttgttaaactctgaattgtatcaatcggctcggtcttgattcaggagcttgaggggaaggaaagagttgtgttttatttgagccgtcggcttttggaggcagagacaaggtattctcctgtggaaaagttgtgtttgtgcttatatttctcttgcataaggttaaggcattatctattgtccaatgaatgcactgtaatatgcaaagccgatgtggtcaagtacatgttatcagctccgattctgaaaggaaggattggaaagtggatatttgctttgatggaatttgatcttcggtatgagtcaccgaaggcggttaaggcacaagctatagccgattttattgttgatcatcgtgatgactcaatcggctctgtcgaaattgtgccttggactttgttttttgatggatcagtgtgcactcattggtgtggtatcggcttggttataatttctcctcgggaggcaagttttgagtttgcctatactatcaagccctatgcaactaataatcaggctgagtatgaagcggttctcaagggcttgcaattgctcaaggaggttgaagccaatgctgctgaaattatgggtgattccttgctgttgaaattatgggtgattcaattagtagcagaatatgagtgcaaaaatgatatattaatggtttacagtgagaagtgtcgagagttgatggatggatttcggctggtaactttgaagcatgtatctcgagaacaaaatgtcgcagctaatgatttggctcaaggggcatcggaatataagccgatgatgaaggatgtcaaagtagaagttgccacaataatagccgatgattggagatatgatgtttttcgatatttgcagaat

SEQ ID NO: 29574 - DNA, 2108 bp, Oryza sativa
cgattgatggggtattacttaaatgtttgagtgccgatcaagctaaggttgcgataggagaggtacatgaaggaatttgtggaactcatcaatcggctcataagatgaagtggttgctttggccatttagaggttgattctggggatgctataaaatttgttcaagagcatattatttatcgatttggtattcctcaaaccattacaaccgatcaaggctcgatcttcgtgtccgatgagtttgttcagtttgacgatagcatgggtatcaaattgttgaattcttcaccatattatgcacaagccaacgggcaaccgaggcgtctaacaagagtttaatcaagttaattaagagaaagattttcgattatcctcggcaatggcacacttgattggctgaagcattgtggtcctataggatggcttgtcatggttcgatccaagttcctccttataaacttgtttatgaacatgaggctgttttaccatgggaagttagaattggctcaaggagaacggagttgcaaaatgagttgacagccgatgagtattataatctcatggccgatgaaagggaagacttggttcaatcgagattgagagcccttgcaaaagttaataaggataaggaacgtgttgctcgacattacaacaagaaagtggtgtccaagtcttttttcggaaggtgaacttgtgtggaaattgattttgccgatagagactggagataacaagtttggcaagtggtcaccaaattgggagggactgtttcaaatccataaggttgtatctaaaggggcttacatcctacaaggacttgatggggaagtttatggccaagcgctaaatggcaagtacttgaagaaataatactcaagtgtttgggttaatgcatgatcggctggtgttgccgatacatgatagccgatgtatttacatcgccttgagatggccgatattgctatatcgcccttagttgtttttatgttgtaatcggttgtgatttgccgatgtacaatggccgatattgttatatcgcccatagttcaatttataattttatcaatgccttcgtccttgtaaaattaggggggcacatatatagaaaagttgcaaatttgaatttttgagtttttgaggaaattttttgagcaaattgaaagttatattaatcggcacagcagtacagtgatacaaggagcattaaagtttgctagccgattacaaagataagttatcctattacaagaccaatcatccagacaaataacactggatagccgatacaacccgttgtctaatttgaactacttcttcgatggcttggatgtcttgggcgtcggttccagggatgattttgagggacttggtcatatcagccacattctttatagccgatttaagtatggatttatgttcttcgacagcatttggaagattggctaacttttgcttctccagatccaactcagcattgcattcttcaagttgagctattagatcaatcttgcgggcttcaagccgatctatgttcgattgaatcggaccagcagagagttgatcaagcttggctttctcctcatgcacaagctgccgattggcttggatagtggcttcaatatcttttcgctcccgtcgatcagctattctttgcttagccttctccagcttgaattgatgttgctcgaggtatacagctggagtaatggtgttcgccagatcatccgggattaaggcttggatttcagcaaaccgtgcccggattgagccacaatcggccaccagattatccaatgatgactctagcggaagggatatgtcttcaagtgttttcttgatagtttcatccagagggtctagagccttgctagtggtttcttcctttgtctcatcaaagtaatcctttatatcaaaagagaacaaatcggctaaggcctgcaaaagagaaatccgaagacaattaaataatcaaacaaatttagccgatctaagatcttattatagagagaaacttactaggatggcacgagcggctggttggtcttcttcttcatgatgatgacttcctgtagctgatggggtacagtcacttgacatctgctatacag

SEQ ID NO: 29575 - DNA, 6305 bp, Oryza sativa
agggcctcttgccaccttatataggatgggggccaggattacaagatagaaactttaaccaatgcggtatcggtttcgtaaatctactttacaatattaccaaccaggactttaggctgttccgtaatatataaggaaacgtaatacccgagccatgatctgttacatattccatagatataagttatcccctatgactagtcggataaccatgccgtatgggtatggggtacccataatatccacagtagcccctgagaccttcgcagtcgaaaagataatcttctctcgaaccagattactccaaagccgagtgcttcaatcatcttcgtcatggtctcccgagtacttttaccaaatctgaagactgtggagggctggaaaataaagtcaggtgcaccgactggatgcacctaataggtgtagccctcgactatgcggttaagtgaacaaaccaagcatatagtcaaggaataaataatccaaccaaccgagtggcttcgataattatagttaaccaagcgacttgatattaatatatagcatatgcggtgtgaatccccgaataatatgatccaagtgatataccgactgcttggcaaaatatgatgcgtacaacctaaagttgacaacatctttgaaagttcacatagcaaaacaactataaagaagcttgaatgctgtgaataaagaaatttccaaagtattgggcatacgccatgcgcacactgctttaacagatgtgcttaagtccctaaaagacacatggtttcaccactcctggaaatatatggcatatatggtataacatccgagtaagtaaactcataaaggatctaccaaccgcctgaaaaatgaccataatatataatcagcctaagccataatattggtcaataaaaatgcacacttacatggcaaaaagcaatgatattgtatccaatcaattgcttgataaacccaaacagcaccttgactatataaaaaagtcagcggggcagctatataaagctttactgtttgacaccttttaagatgcatcgtaccaactcctaaaaagtcgagtaactgcggtataaaaggattttaaggtattgggcacttgatcacgcgcactttggcctaagcgaaaagtgcctaagtccctaaaagaacgtgacaggccacacctgaaaatatgggctgcagacatattaggcctaggccaaaaaatatgccttcgacaccctttaaaggatgacgcatgtaacatgctcccgagtaataaatcttccgggtaatatagaccaagtgtagctcatatgaatagcttctgatctgaatgattatcccttatgggatactccaaaataaatataataattgaatcccgactggcgcaagtattcggttgatagcccttacggggaataataattggtccagtctttgagcatagaaaatagactcatgactatgaatccatgtggaatgtatccggaacaagtccaaattggagatataatcctcacgcttgagttgatgagcccctgagcatatagcttgtccttctgtcatagtcaaaattgtctattggcaatagctgacgcagtcggcatggagatgaaatgaccaacatgaagacgaaattgctcatcagaagtaacggaagatgtcagtggtagtaaaaacagtgacaccaatcaaaggtaatgaagttgcataaccatggaggcgaagaaaccagtcggcaacagtcaggtcagctagcagtgaagatgtaggcgcccaacaacaacaaaagaacagtcggtggtgacaaaagcaaaccgacgatgaagacgtagacgcgcatcaacggtgatggcgaaatccaccaatcatgaagatgaagaaaataatcggcggcgacaaacgcatccgacggtaatgatgattagcggcaacagagatagccgactatgatgacgaagtttcccatcaacggcagcagagtaggctatgttgaagaggcttaacaagatgttgatgaagatgacgatgtcggtgatccagtcaatagcgatgtagcagccgatgataacgatgagatcctctatcggcagttgcgtagtaggtcaaccgtcaaggtgaaataataagtcggcgaaaacataatcatccattagcaacagcggagatgtcagggtcgatgaagcagaggtgctggagatgatgtcagtgacaataatccatcaaattaatgttatagctgttgtagatgcttcacttggaggagagttgatgatgttgtccaactcgtccaaaccgaaatatttgaagttgttggagtagaatgtctgttccgaagcaaagatgaagataatgactcctggagttgactcattggcttatataaaatttgtcaaattttgagccttatatttgtgtagcccccgactctttggttagttgggaaacaactgaacatagagtcgagaattatagcttcttgtcgtcgagtagtcattgcttgattgaagatatgtgttgaaggtgtccaagtagaaatcctgaatattggagagtcacttgttgtagtaaaatatcatggcattgcatgccgagatgtcgaggttcacaaagacgtcatggttggtgaagtagtaaaacttgcgaagtagcagcaatagagtttgccggtgccgaagataataaagatgaagtcgctccaccatgatgacaaagttgtattgccgtaatgaagtgaacacaagtcggcggcaacagaagcaaaccggtagtgaagacgcgtagttgtgaagataaaagcaccaatcgggggcagcataatcagtcggcgacggaagatgatgatgtccatcagtagtggtagctgtataatccagacgtagaggtaagggcactagtcagcagcagacgagacgaccggcgatgaagatgtagatgcccaacaacagcggcataataggccaatcaacactggcagaatcatgcagccatggaagtgaagaaaccagtcggcagccatggcaaacgtaggcagcttgtgttgaagatactgatgcctattagtagtgacagcgatgtagtcagccgtgaagaagatagcatcagttggcgttataacaggccagccgtgcaggcggtgacaccagtcagcggcggatgcggtggccggtcggtgaagacgtagacgcccaccaacggcagcataataggccagccgtgcaggcggaaacaccagtcggaggcggcgaaggcaagccggtcggtgaagacgtaaacgcccaacaacggcggcataataggccagccgtgcaggcggaaacaccagtcggcggcggacgaggcggccggtcggtgaagacgtagacgcccaacaacggcggcataataggccagccgtgcaggcggaaacaccagtcggcggcggacgaggcggccggtcggtgaagacgtagacacccatgaacggtggtgtgaccaaccaaccgtataggcgaggacaccagtcggcggcgacggaggcaggccggcggtgaagtcgtagacgcccaacagcggtggcataataggccagccgtgtaggcggaggcaccactcggcggcgacggaggcaagccggcggtgaagtcgtagacgcccaacagcggcggcataataggccagccgtgtaggcggaggcaccaatcggcggcgacggaggcaagccggcggtgaagtcgtagacgcccaacagcggcggcataataggccagccgtgtaggcagaaacaccagtcggcggcgacggaggcaggccggcggtgaagtcgtagacgcccatgaacggtggtgtgaccaaccaaccgtataggcgaggacaccagtcggcggcgacggaggcaggccggcggtgaagtcgtagacgcccatgaacggtggtgtgaccaaccaaccgtataggcgaggacaccagtcggcggcgacggaggcaggccggcggtgaagtcgtagacgcccaacagcggtggcataataggccagccgtgtaggcggaggcaccactcggcggcgacggaggcaagccggcggtgaagtcgtagacgcccaacaacggcggcataaaggccagccgtgccggcggaaacaccagtcggcggcggcgaaggtaagccggtcggtgaagacgtagacgcccaacaacggcggcataataggccagccgtgcaggcggaagcaccagtcggcggcggacgaggcggccggtcggtgaagacgtagacgcccaacaacggcggcataataggccagccgtgcaggcggaagcaccagtcggcggcggacgaggcggccggtcggtgaagacatagacgcccaacaacggcggcataaaggccagccgtgcaggcggaaacaccagtcagcagcggcgaaggcaagccggtcggtgaagacgtagacgcccaataacggcggcataaaggccagccgtgcaggcggaaacaccagtcggcagcggcgaaggcaagccggtcggtgacgacgtagacgcccaacaacggcggcataataggccagccgtgcaggcggaaacaccagtcggcggcggacgaggcaagccggtcggtgaagacgtagacgcccaacaacggcggcataaaggccaaccgtgcaggcggaaacaccagtcggcagcggcgaaggcaagccggtcggtgaagacgtagacgcccaacaacggcggcataataggccagccgtgcaggcggaagcaccagtcggtggcggacgaggcggccggtcggtgaagacgtatacgcccaacaacggcggcataaaggccagccgtgcaggcggaaacaccagtcagcagcggcgaaggcaagccggtcggtgaagacgtacacgcccaacaacggcggcataaaggccagccgtgcaggcggaaacaccagtcggcagcggcgaaggcaagccggtcggtgacgacgtagacgcccaacaacggcggcataataggccagccgtgcaggcggaaacaccagtcggcggcggtcgaggcgagccggtggtgatgttctgactgatccattcctggagcgtaagagataagcttaaagccatgaatcccttttatgcatatctggatctggatcctgcagaacaaacatataggatgagtagtatctgatataaatataatactcgagaaaaaatcaagtattttaaaatatttataaatatgtatttctcctcttgtcaattttgatttccccgagcagatgactctgtacgtttaaacactctgtccgactagtcatagcccccaagcatcgggagtcggcctaggcatttcccaaacatgcatatgagtgacatgagttcgtcattaatggaacaaagtttcacggatcagaatttactactcaggtacttttgcaattattaagagcagaaaataaatttatctcatctctatgcttttgatttattccgaataatacttagcaccttgcgttactcggtccatccaacgagcccccgggtgctaggaatcggcccaaaggcaaccatccattggcaaaccaaacggaaagcataggaagatagaactccataactcgataggtacttttgtactcagattatgtcgcaagcaatcaagataaatattataaaaaatatgatataacatctgtagcccccgactcactactcaatggaagaccaattggtgtagtgaggcagaggaaaaggaaaaatatcatataaagaataaaataaatgatgacttagctttgtaatattccccttggtgatggcagaagtggccaatgtgggaacaaagtcgtccatcaataacaatgaagacaccagtcggcggcgacgaaggcggtcgacggtgaaagcgaagacgcccaacagcggcggcataataggccagccgtgtaggcggaggcaccagtcggcggcgacggaggcaggccggcggtgaagatgacgatgcccatcaacggtggtgtgaccaaccgaccgtataggcggggacaccagtcggcggcgacggaggcaggccggtggtgaagtcgtggacgcccaacagcggcggcataataggccagccgtgtaggcggaggcaccactcggcggcgacggaggcaggccggcggtgaagatgacgatgcccatcaacggtggtgtgaccaaccgaccgtataggcggggacaccagtcggcggcgacggaggcaggccggtggtgaagtcgtagacgcccaacagcggcggcataataggccagccgtgtaggcgatgcatggacgcccatgaacggtggtgtgac

SEQ ID NO: 29576 - DNA, 5195 bp, Oryza sativa
aggcggaggcatggacgcccatgaacggtggtgtgaccaaccaaccgtataggcgaggacaccagtcggcggcgacggaggcaggccggcggtgaagtcgtagacgcccaacagcggcggcataataggccagccgtgtaggcggaggcaccactcggcggcgacggaggcaggtcggcggtgaagtcgtagacgcccaacagcagcggcataataggctagccgtgtaggcggaggcaccaatcggcggcgacgaaggcaggccggcggtgaagtcgtagacgcccaacagcggcggcataatatgccagccgtgtaggcggaggcaccaatcggcggcgacggaggcaggccggcggtgaagtcgtagacgcccaacagcggcggcataataggccagccgtgtaggcggaggcaccaatcggcggcgacggaggcaggccggcggtgaagtcgtagacgcccaacagcggcggcataataggccagccgtgtaggcggaggcaccaatcggcggcgacggaggcaggccggcggtgaagtcgttgttgttatcagcaatggcggtggcgaagacaagccggcagagtggactcgcggccgatcgaccggaaagctgagacgcctcgagtccatgaccagcatcaatcgcctcaatagtgccgcgtaattatatgcgaacaacaacaaaaaatagcaagagattaatctgggattaaaaataaatacgataaataatgataaaaatcagattgagtttccccctgactgatttggatcaagtcagagaagaggagcttgaagaagtggtcgacggaaaggaagtgaaaactcccaaagcgaaaacgaagtcggcgactcatgaaattgattccatcgcgcttgttgataggaaactcgacgcaacccctacctggcgcgccaactgtcgaaacatgatttcggcaataataaaagggggtagcgcacgagatctaaaagtggatggatgcagagacaaaggatttagacaggttcaggccctctcaatgagaggtaataccctactcctgtttggggatttgaatccgccgggtgtagtatagatctgacgatcaggttgtctcatatgccccctagagggcctcctgcccaccttatataggatggggggcaggattacaagatagaaaccttaaccaatacggtatcggtttcctaaatctactttacaatattaccaaaccaggactttaggctgttccgtaatatataaggaaacgtaatacccgagccatgatctgttacatattccatagatataagttatcccctatgactagtcggataaccatgccgtatgggtatggggtacccataatatccacaccggtggagctggtttaagtattgttgctgccgatttcttcctcacagcagtcttctttttctgcaaaagtgagatttataagtgatcggctatgaatgaaataactgcaaaaggaaattagtatgagtggtttacccttgagaaatgagctagggtagcaggagttgggggagtttgcttgggtgaagccgatggtgttttttctgtatcacttactttggctgcagcttgatcgacatcttcttcgatctcttcttcatccagggcttgctcgatggatggatctaaagcaggcaagtcatcggctggcttaggtttgttcttcttggtcttcttcttgggagccagagctgattggtcaatagccaatgccttggcctttctcttcctgccaacatcggccggttctctcatctgtcgttgaagcagacttgaggtcttaggggcatggtagccgatgacaggaggagctaatccacctccgtttggtagaaggcatggagcatattctatgtccctgccgctattgctcttgcgaggaggagaagattctgttgtctgcaaggtaaagagagaagttagtcaagattcaagtcagctaataattattcaaacaaaattggcaaaataaagatgtacctgagggacaacatcaggaaataggtctgtcatgtacatagaagccgactgatggaatatatgttgcttccattcgccccaccatttgtcaaaattcctactcctgagtcttgccaactctatgttctcgatgctgcccagagggggtgatgtgcactagggttcccgatcttcctaaaggtcctgataaacaacggtttggacggagtcgcgacacagatcgacccggcttcttgaacgcgcacgctcttgagccccgcaatcgcagcaccacgtctcctctggttatcacccgtgtcgaaacgtggatgacctcgccgagaaggctaatccctgtttgccaatcgaagaacacaaacaagaacgggatagaaaaacaaccaaaattgcatatgaatgattaagctcacgagttggggtcttacaaaccgatctagcggcgaaactgttctcgacagattaatctaagcaaaacccaaaaacctaaagatgttggtgggtactgatatatagagtttaggtcgtgtaaacccctctcgacgcaaccctaatgggttccaacacgatacacgggccaaaggcccaaatacggtgacgcagcaccaggacagattctggacgtcaaattgttcggacaattcccgttgactcggaaagaatttggatgtggaaccaaaaccattggaaaggttttcttcttagctttccatccatataaagaacgccctaatccgagcacgtatgtgacctgggcgcccattttagtgtagactggtcctggactccgaattgcacccgacgtcgagttggtttgggcctccaccttgacttggacgtccccgatggtcctccatggctctaagtatttctccaagtgtctccttgtcccctccattgttcctaagcacaatataatcattaggtagcaagctattcttgaattcatacaaagaagaacataggaatgaactcacctctaaatttaattgtcgcgcacgagctcttgttatcgggccttgaatgaccattggaggattgttgtgtgtatctgaggtagtgatgtccgcatcagggggtcctgggatattgagtagccgatccatcatcagtgtggatgagatctcctcgcttcattggattttatcggcaaagaataagccgattggcgtctatcccattccaaactgtctagcatgggcaccaaacttgtatgtttcttccttgatggatgccgacaggaaggatgcatggactaatagcagccgagaagacttatctggacttgtcaaatttttcggaattgatatcctcaaatctgaagtctgctgggatacccaaatttacttaatcttcgtatgggaaccaaactcgagcatctctctggaagccttcataaaagctacagaaccaatccttgagcaattcagccgataactttgctccagcatcggctggtgtggatgcatattccccataggacatacacctgcggtgggtgcgctcttctccatcatcattggtaatcggctttaatcttggaaactcagcttctgtcatagctggccgattgacagctttcatggctaccaggtttagccaggtttgcagcaaccaccatggcccgcctacactaacagctgagcagacaacaattttagccgatgcattgttcagcatttgatacaagtagccgaggaggatcttgcctaaaggaaattgcctctttgattctaaggcttcagctaaaaactgccagttggttgtggggccgcaacttgatccacaaaaaaggaatttctcaagccacatcagcagaaaggccacttgttctcgggaggtggcagttcctttgcccatatatgctgctacataatcagaccagccacatatgctcttagttctgaagtcaaactggttcttggtgttcaagctcatgaggttagccgacgaggtcatatccaaaccgatgatcatggtgatgccaagcaaaatggggttcatcggcccttggttgaacaggaaagcattaatggtgttggaccaaaaataggtggcagcggccatcaggggttcatctttagctgaatttgctatggtaaggccaagtgcctggccgatgccgatttcgtcccaattgccctgcttgctacccgataccagtttatgccacacagaccaacttttctccgtagtggttttctcaagagaaggccaagacataaaggtgtttttccagtgacctagatttgggttggccaatctaaaagggatcctattggtttcagcgatgatgaactcggtgggatcaagattgccgatcggaccaaggaaataatggtgctcatgtgacagactcgggatcgtgtccagattggacaagtgctacagatgtaaacaagaatagagaagaagaaaataagatgaggcaaggaagaaccaatctattgcgaaagaagaggatctagccgatgggtacttaactctgcgtatttttccgatggcgcgacggatggactggcggaggacgacatctttgcgagcggatgcttggccggagaggaaatcatcttagggtcgtctggtgcacccaggggatcgccggagagagagaggacgaagttggcttaagcggtgaaaaaggagctaatggtgtgaaatttctcggggacgacggttagtatttaaagcagcgcgataacggtcggaaaaacggaagtgcgatattctctcggagatgagatatggcaaatccgaaacattaccaaatattccggacttggggtcatgtgttaacgaccaaatttggtaatccaagtatcagagatgaagataggatcgaagcggaattcaagatagaaattaatctagaaacagagtgaggatcggctaaagttcgaatcggctatgacaaggatcggcagaattcgagtcggactaggttggctgattcagccgataccgacaatgtgacgtggtacatgttgtcgggttgagttaatatgcttcatgaggattgccgtgcatggattgaatcctgagaaggcaattgtatctattaattaggatatttcatgtaatttccttagagatatgttcgggcaaaagtctgccgaaaaggattatggtatctttgtcgacgggtggcacccgtagaccggatatagacggtattggggtatgttggtac

SEQ ID NO: 29577 - DNA, 1412 bp, Oryza sativa
taaaacaagtggaagcgctagcctggaaaagacaggaaggctgcgctgttgacatgcggaccccacatgtcaacctaagggaccacggcagaccgggtacacagagacggtccacgggtcgacggaagcggatcccgtgtgtcaaccgaggcgagtgaccgacaaacggactccactagacaccacacgggttgcacacgtggaaatcacgcggctaccgagcgggcacactaacacggtcaccacacgcacaagcgaacgactaccgacaccggtacacgggtaccggggtcgacaaccgcacaacgggtacggggcgacaccgaaaggacgaggacggggaagcgagaagacggatccttaccaccacgcgacgaggcgtgggaacgacaacgatgaacgggcgcggcgaagacagctcggggacgacggaggcgaacggcgagggaacgacttcagcggcgatccttggacgaaggcgagacgcggctggcacaaggcttgatgacgcggagccgaggacgaagacgaggacggggctgccgcggcttgcttgacggatgcggacgacggacgagaacggctcgacggagggacgaacgccacgacgaccgggaacgacgagaggacgacgacgacgacgaccggggaacgatgccacggtgtcgaaggaggagacggcggcgtcgatcggcgcaccggcgacgccactggacgccggcgggaacgtaactccgggggtctccgcgggaaacggagggcaagccggggaaggggaggtgactgcgatgccgggagaggcgacggcacggccggacggtgcgcgggtgaggtggcacaggcggctggaggcggccggcggcgtgggagagagaggagggcggcggggagaggtggtgaggccacgggagaacgcgggagggggctaaaactggagaacggatcgagggggttccattttatagcggaagggagggagccggccacgggagagacggggaacggcggcggaattcgtggtcggcggccatggaaggtgaccggggttggcgcgggcgttcccgacgattgggggcacgaatcaagggggaaattggggggaattgaccaggaaggaaaggggattaattccccctaatcaatttggaaagagccggctcgaatggggtggatttgcaggaggaacggcgctaggttttgcacgggagagagaagaggccgtgcgggaggaaggagatgaccgggtgttgggacccacgcggtcgcgcggtcagcgcgcgtgacgggcgcgtgcggcgcggcctgggaaggctcggctgggccgggacacggcccaggtgggaggggaagagcagggagctgggccgagggggaaggggaggcccaagagaaggagggagaggaggagaggg

SEQ ID NO: 29578 - DNA, 2099 bp, Oryza sativa
agtttttggtcgtgatgacatagtggactacagtaccatcattgtacagcgggtgctcagcacgcaggtacagcagcatgacaggttgcaacgccataatttgttttagatttttttcgtcatcaacaactgtcgtgcacgtgtgatcattgatggatgtagctgcaacaacttggtgagttctgatttggtcaataagcttggcttgactacatgtacacatccacatccttaccatattcagtggttaaacgattccggaagagcaaaggtaacacaggtttgtagggtttcgttttccattggctcatatgcagattctgttgattgcgatgtggttcctatgcaagcttgttcacttttgctggggcgtccttgggaacatgataatgatgctacacatcatggtaggagtaataaatacacttttatgcataatgggaagaaaattactttgctacctttgacccctgctgaaattgtagaagctgataaagaacgagctgctagtttgaaagttgatgaatctgaaaatcagcaagtggctaaatctgtttttccacctaaaaaggataagctttcacctagttctaaggttgagggaattaagttgaagggtggtgttatgcttgcaacgaaatgtgacattggtgatatttcaaatgatgatatgtgctatttcttgatatgcaaacaagccttggtttctttagatgatattgctagttcgatacctcctgttgttactaaccttttgcaggagtatgaagatgtcttttcagctgagatacccccaggattcccacccatgagagggatagagcatcaaattgatttgattccaggagcatcattgccaaaccgtgctgcttatcgaaccaacccagatgagactaaggaaattcagtggcaagttcaagacctttaggaccgcgggtatgtacgtcaaagccttagtccctgtccagttcctgtaattttggttcctaagaaagatggttcttggcgaatgtgtgttgattgtagagccattaataatattactatccgatattgtcatcctattcctaggttagacgacatgcttgatgagttgtgtggctatattattttcacaaagattgacttgcgtagtggctatcaccaatttagaatgaaacttggagatgaatggaaaacagcttttaaaactaaattcggtttgtatgagtggttagtaatgccttttggtttgactaatgcacctagtactttcatgagcttaatgaatgaggttttaaggccttttattggacgatttgtggtagtgtactttgatgacatattgatttacagcaagtctttggatgaacacatggatcatttacgtgctgtttttaatgctctacgcgatgcacgtttgtttgctaaccttgaaaagtgcatcttttgcatggaacgagtctcttttcttggatatgttgttactccacagggaattgaggtggatgagtcgaaaattgaagccatcaggagttggtcggttccccaaaccatcacacaggtgaggagctttcttggtcttgcaggattctaccaccgtttcgtcaaagattttagtacttttgctgcaccattgaacgagttgacgaagaaaggcgtggtcttccattggggaaagacacaggagaagtcctttgacattttgaaggagaagcttacgcatgcacctttgctacaacttccaaactttggtaagacttttgagttagaatgtgatgctactggagttggcattggaggtgtgttgatgcaagatggtaagcctgttgcatactttagcgagaagttgcatggtcctattttgaattattccacatatgataaggaattgtatgctcttgtacgttccttagaaacgtggcgtcattatttttggcctaaagaatttgttattcactccgatcacgaatcgacttacaatatcttcgctctcaaaataatttgaatcgtagacatgcaaaatgggttgaatttattgaatcttttccttatgttatcaaacacaagaaagggaaagataatgtgattgcagatgctttgtttaggcgctatacttt

SEQ ID NO: 29579 - DNA, 4627 bp, Oryza sativa
ccttgagcatattgaatcccagtttataaaattattttgatttaaattaatgcattatcgctttatttaaattcccgcgttatcactgttttatttagccatgcctatttacctttgttatgaccttattattattgctattgttattataaccttgttcaccctagaataaacaaaaccccaactagtgggtactctattcatggttccactagtatgaatttaggtagatgcttcgctgattagttaggcaacattaggtggttttataactctcgactttgggaatactcatatcacttggacattatggaatggttggattattgtagaaatggacgcacacctccccctctattcaaaaccctcaaaatggttttaggctgggctcagggtgcatggttttgatagtagcaccttggccacataaggaccggtcttcgggcctctgttgcaaagcactaccgtacttccacatgtctagtgggtaaggcttagtttgtggctcagtctggttataaacaaaggtacatggatggagatggacgaagtcgagggtcgatggacatctctaggacaaatgaaggctacacgagctgcggcccggtagtcgaaatgtcatgtcacaaggctggtgtcttgctgctaggggctcagtcctgcctacctgtcctggaggttccggccgtaggtggggttgggtcggtacccttgtctatggctaggatgggttggaaactatgtgtcacatcctgatttttgtttcaggatttataaattatttaataaattattattagaatttatattaaatgttcattaatttacaagtgaagttaaatgtgggaaataaaattttctaaatataaagcatggatggatttaattttttttttaaattctccatggttaattatactctctggaatattctcggatttttcggagctcaattcctaatttttaatcttacaaagagcatttcagtaattacccacatattaaattgatcattaaatggtctaattataattttgttaagtactttgagtgtccaagtattttcaggatttttcttgaaattatttgagcattggaagtatttttaacgattcaaagatcatttcattgattaatttaattggaaaagtaataataatcctcctcctcagcttgggccattttcggcccattccttcctttccttcctctctctttcgccggcccaacctgagccggctcctctcctctcagccaagccggaaaagtctacttttcctccctgagctactgttcatcttccagctcaggcagatcccgagctagccgtgccgtgcacagtgccgccgtctcttccttctaaatctcgcctccccgttgctcctttttccaatttaggtgaggggaaatattcctcttatcctcctctatctttaccctcaaaaatcggagctaaccgttgagtatcttatccgaatcgaactcgttttcgagtttatctccaaaaccgagtttttgatttcccggatcgatttcttgcgggaggagtccgatctcttcaatccaaggctataaataggaccccctagtcctcctctttcgttgcccctctcccgtgcctcgtagcgccgccgccacgtgctccaccccgccgtcgtcgccggccgagctccatccgcgtcgtgccgtcgcctccgtcgtcgccgccagtcgccgtcaccgccgtaaggtgcgccgaggtgtggagaagcccggccgccggagccccgaagccgccgatcgccggagccccgaagccgtcgaccgaagccgcgccgccgctagacctcgtcgccggccgtcatcgttcgtcgtttggttcgagggtgagtaccgttgggttcgtctcgtcgtcctctacgtgtaaatgtcctccaaagtcgcagccgaccatccaatctccggcgaggtcgtcatcttggttcggccgccattgatgaggtcatcatgacgtcatcatcgtttttctttttcctgtttttctaatagattaaatcttcagaaattcataactaaatcatcgtaactcggttttgagtggttcaagttgctaaattcatctaaaattatgatctacatgtttgtttactttttatgtattgtttatttggtttttattagtctttttcttcgttttgcgtgaaagttagtcgtttccgtcgttgcgaaggttcgcgagtacgccggaagtattcaagaagattaattgaagaccgattattgcaaggcaagtcacacagatcccaaacaaccctttgagcatgttgaacccgtttaaagctattattttatttcaactatgcattatttttgaatgtcatcgggtggtgaacctttccccattaattaatggccgaagatgatcttattttcctatgggttataattcgattagcatgaaccttatatattggattggttcagctaaatgctatatgtaagtttgcttagctatgcttagaaacattagctaactaaaggggttaattataaactatattatattatattattattatggttatatttaatggtcgctcacgatggttaatcgtgtgatgttaattaattgataattaaaatctggataaggtgggttgtgagcatatggttttgatggttgtgctcatgacaattaaggaccggttcgcgagctactgttgtgaaacatttaccgtgccaaccacaagccagcgtgggcaacggctttatcttttgtatagcatgattcattatagtgcgccagactgtgaagcggcgagaagtccatgggggttgctggggagtccatgccttgtttataagggggtgattatgatccaggaaaggtgcgctgtaatggcttatgttgtgcaaggggtattgtcacaactcctttccgaggtaccgtggtggtattgaggcacatggtgacatgatgtggggttgtgtcttgtgggtacagtggtacacgtctggccagagtaaaactattcgaatagccgtgcccgcggttatgggcgggttgagcaatgtttttcttgattagtctcacacctctcacaataattatggatgttaatacttggtaataatttgcttagctcctggtttggagttagatctgtacagccgggtatggttgttcaggatggttgggcctgtgcagcatgggtgtgttgttcagtgttgattaaaatttctgattaattactccactgttttacttctcttaaatgttttgctaaatgctgcttttgcaaatgagcctatattatgccatcctctggtatccttgtgcacttgcatatttgctgtgtggcttgttgagtatgtcatatgctcattcttgcaataatcatcaaacctcagttgaagataaaggatccagaaggagaagacatttggcttataccccagttgagctgcctgtgggagtggagctgaagccatcgctagaccgttaattccgctgctgttttcttttctttttaagtatgtaacgttattattaagatggatttgtatattaaaattgtcagtttgtgtacctcggctgattcctggacgaggattttatgcacaaataagttcggaaattactagtgaatttccgggcgtgacactatgtcatgtcttacgtccgtatgccgtggtggtatgttgggacgtggttacacgtgaggaagacgtgtcttgtgggtaaagatgtacacctctgatcagagtataatctattcgaatagccacgccctcggttatgggcaagcctagcaatgtacccaagttagtgttttaattcttaaaattttcttaacaactaaaatgtggaatggttggccttgctgggggtgtcttcttctgtttgttcatcaagatagtctttgatatcgaaagagaacagatcggctaaggcctgcaagaagaaatttgaagacagttgattatcaaaatgagttattcagccgattcaagattttcatagacaagacttactgggatggcaggagcggctggttgttcttcttcctcaacatggtgacttcctatagccaatggagttcaatcacttgatgtttgttgtacaggaggtgaagatgggggaggaggctgtaaaaagacaaatgttaagtaaatatcagctatgattggattaatgaaaataattatacacaatagtctttctggtggagctggtttaagtgttgttgctgccaatttcttacagcagttttctttttctacaaagatgagatttataagtgatcggctgtgaatgaaatagttttaaaaggaaatcagagagagatgtttacccttgagaaatgagctggggcagaaggagttggaggagtttgtttggatgaagccgatggagttttttctgtgtcacttacttcggctgcggcttgatcaacatcttcttcaatctcttcttcacgcaaagcttgctcaatggatggtgtcgacgggggatacccgtagaccggatatagagagtattggggtacgccggtataaggatctacgtagtacgacatcgagcaatcaaaagacaagaattatactggttcaggccccttgacaggtaatagccctaatccagttg

SEQ ID NO: 29580 - DNA, 1194 bp, Oryza sativa
acgccggtataaggatctacgtagtacgacatcgagcaatcaaaagacaagaattatactgggtcaggccccttgacaggtaatagccctaatccagttgatatgggattatatggtggaaaacacagattacaaaggaaaagacttaactcgggagattcgacgagatcgtagtcgagatgatccgactagctctcgtcgacttggctctttgtaggctctgacttcgtaggctgtgttggttgtctaggctttgagattcgatgagctatggctccgcggggggtcccttttataccgtaggttgggcgatatctgagtaggactcggatgtaccaaacctggtacgatacgtaggtaacccaattcttgttcgagaaggtttctccttgtttgttgtctttacgaagaatttccttaagtgctagaggatttatccatatacacgtggatataccttgtcgatacgtgacgtatatcgtagggtgaagggtatgcctaacccgtaaccctgacagtagcccccgacttctgctcaaaaatgaactcgtgagaccgtttgcgactccaggtgtcgagaacgttgccattccaggtgcgagaaccaaggagatgacgtgtaatcgagcgcaccgtttgaagtccaacggtcacgaatgaattttgaactgaagtccaaaaaccaccatgcacaacggacatagaaatctccggcggggatttctcctatttccttggaattcgcaccgtcgggagtgcgtctatttaaaggtatttagggcgtgagctttgaggtccgcctacttcattaagtatacactgctcctttgcattcctcgccttcctcgccgccgcaaaaagccctagcctcaccgattcatcgtccgtttccggcgatcttccggcgatctcccgacggccatggatcttgggaagtcgacctccaccgccgcgaccctgaagaaacttcaggaggagggtggcctccctggccacgacaaggcagagagggaagcaggaggtactactccccagcccgtcctaggtcgcatggttgcgattgaggattacattgtctgcgggtttcttcctcccccctctgaattccttttgctggtcttaaacttctatgggctttcacttttgcacttgaatcccaactccatcgcatttctcagcattttcgtgcatctt

SEQ ID NO: 29581 - DNA, 11262 bp, Oryza sativa
cgatctcccgacggccatggatcttgggaagtcgacctccaccgccgcgaccctgaagaaacttcaggaggagggtggcctccctggccacgacaaggcagagagggaagcaggaggtactactccccagcccgtcctaggtcgcatggttgcgattgaggattacattgtctgcgggtttcttcctcccccctctgaattccttttgctggtcttaaacttctatgggctttcacttttgcacttgaatcccaactccatcgcatttctcagcattttcgtgcatctttgtgaggcctacattggagtagagccttttctagatttgtttcgcttttattacgagttgcgttggatggaactcaacaaggtgtctggctgcgttgggttctgacttcgtgatgggatgaagtcgcaatacgtccccttccagtgcccctcttctcgcagcaaatggcagaacaggtggttttatctcgagattaaggactcgaatcctgccctcattgttcctgacgagcagccaaacaagattccggtttggaccgccaagccccctttgaccccctctctccaatcgtttatcgacatcatcgatgatcttcgagaacggggcttatcggggtatgaagtcgttgcagacttcgttggtaggagtatccagccgcttcaggctcgagcccacccggcgtataattattccaggccagatgacgcgacccgggtttctcctcggggtatgtttcttgtattcactttgatatggccgtattcgcgttcgcttttgacttatcggaaaatgattcttctttgatagctctgagcagtgacggcgtggagcgacgcgttggtcaggtgatgatcagcggcgcgacaaccgcgagcgacatccctgtgcccctttgtgaaaagggagaggcggaacgcgacgaggcgatcaatgtaagtctatttagatgtctttttcctccttcatttggaatcagcttgtgatcggacttagcgtaggcccttcccttgactgacgtcatcggaccgctcgcggatcaccaggtggcggcttctctgaaggagaaggtggtcgaggaggcatccgacgccgctgctggtagtggtggcaaggctccgagtaagccaaggaagttctcgtccgtgctcggacaccgtcgcaaggcagagacttcgacggtaacattcgccttgtcgttaagctgagcaactaggaaagttcttgttctcactggcgactttgcaggtttccgacgcatcccctcctcttgcagtcgtcaacgccttgtgacgatcggcgagaagtaagtcgcgaaacttctcagattcttaagtcttctttttgaaccgaactctgatccatcggtgttgacagggaggcacgagcgaaagcggctcgggccaagtctggggggacttctagcgcgtcccctgtaacagcgtcgactgacgtcgctcccgtgatcgggactcgggaggcgacgccaagcgggcccagcggcgaccccgtcagaaaccgtggcgcgccagagtccatcctcacctgggaggagctccaagtcgagatggggcgccttctcgaagccggcgctcgcggcattggtcgcgaggtcacggaggcgagggcggagacagcggcggctaacgcgcgcgcggagcggctgttgcgggagctggccgaagcccgcgaggacctcgtgaaaatgagggaactagtggccggcaacgagtgccaacgcaagggactcgagaaccgcatggcggaactcggagataacctctccgagatccgtggttctctgagggtcacatacaccggcctccaccagcttgccgcggagtgtggggtcaagtcgacgatccccaagaaccccgacgagttctccctcacctcttctctagcggagctggcgacggcgatgggagaaatccctgcgaagcaggcggcctgagttgcggaggagacgtccaacggtatttataccggggcgtgtcacgtcctcgcgtccgtgcggttgtcgcgtcctgaactagatctccgcgagatcctggatcagggggcggcaagcgacgcacgtaagggggtgatggaggaagtcggtgatctgggggagtctgtcctccccctcttcgaagagtaggagcacttgtatttttatttccttctcatgatttgtgaaccccaaactttggttgtcttcatgtatattactaccagctctgttcatctttgatcttgaaaattcatcttatcgattgtagagatgtcgatgatgaggatgtccggcagcgcgggcaacctgaatcgatggcgataaccccggtactcgagttagaaccgagcgcggcgcatatcgtcgatggccaggttgctgatgcagagaccgaagtggcggcaactgacccgagtgagtgatcttgtgcgccttgtcgctttttgttggtttccaagctgtggtaatgaccatcatttttggcagatctcgaggatgcctttgcgactcaagatcgtcgtatccaatactggaagacgaaatgtgaagtggcggaactcgagagggcgatgctagccatgaaaaaggaccaagctgtggaaacactccgaggtcgagaggtgtggttctcctcttatctgaagaattgctgcacctcgatggcgagggtgtgccgagatcttcgggtagcccgcggtgatcctgaagagtcggcggccgggtacatctcgtggctcaatggagcctgcgctcaactcgacggcattggtcagcggatcgacgaggccctgaagcaagagtgtcgtcgagcgagtcgatatgccggggggcatgtgttggcctgtgtgcgagatcaccgcccgcgcctggatctcgaatttcttcgtgagggttttggccgttctcggagaaatccggcagagattgaccatctcgcgagatcaatgtcgccgctggccgagaagattttcgttggccttcttggtagaatttgtaccctgtaacaagatatcttgggaaaagacgtaatttgacataatatttatgtgctaactgtaaggaatattttgtgaataaagaaatatatctttaacaaatgtttcttactctgggtgttgtttgtaagagcgtgttctcagttaacgaccttagttagccgtttgagttgtacactctccctagcccccagccttgtcgtcggagggatgtcctcgggtgacaaggctcttggactcctggcctgtcttggttgaaatagctctgatcctagcccccagccgtgaggttggaaaagtcaatttccgattacacggcttggttaatacgcacggcgagaactcttacacgaccaggtcttacatggtctttcgtctctgaaggatctgacaaggccttatcggctctgggcatccccagccgaagatgtcacgcccggaaattcactagtaatttccgaacttatttgtgcataaaatcctcgtccaggaatcagccgaggtacacaaactgacaattttaatatacaaatccatcttaataataacgttacatacttacaaagaaaagaaaacagcagcggaattaacggtctagcgatggcttcagctccactcccacaggcagctcaactggggtataagccaaatgtcttctccttctggatcctttatcttcaactgaggtttgatgattattgcaagaatgagcatatgacatactcaacaagccacatagcaaatatgcaagtgcacaaggataccaaaggatggcataatataggctcatttgcaaaagcagcatttagcaaaacttttaagagaagtaaaacagtggagtagttaatcagaaattttaatcaacactgaacagcacacccatgctgcacaggcccaaccatcctgaacaaccatacccggctgtacagatctaactccaaaccaggagctaagcaaattattaccagttataacatccataattattgtgagaggtgtgagactaatcacgaaaaacattgctcaactcgcccataaccgcgggcacggctattcgaatagttttactctggccagaggtgtaccactgtacccacaagacacgattccacacatgttgccatgccccgaaataccaccacggcattgcaaagggggaaatcgtgacaataccctttgcacaacacaactcaaaacagtgcaccgttcctggatcataatctccccctcaaaaccagaggcaatggactccccagcgacccccacggacttctcgccgcttcacagtctggcacactataatgaaccatgctatacaaaaggtaaagccgttgcccatgctggcttgtggttggcacggtaaatgtttcacaacagtagctcgcgaaccggtccttaattgtcatgagcacaaccatcaaaaccatatgctcacaacccaccttaaccagattttaattatcaattaattaacatcacacgattaaccatcgtgagcgaccattaaatataaccataataataatataatataatatagtttataattaacccctttagttagctaatgtttctaagcatagctaagcaaacttacatatagcatttagctgaaccaatccaatatataaggttcatgctaatcaaattataacccataggaaaataagatcatcttcggccattaattaatggggaaaggttcaccacccgatgacattaaaaaataatgcatagttgaaataaaataatagctttaaacgggtttaacatgctcaaagggttgtttgggatctgtgtgatttgccttgggcttccgcaaacgcttcggaaccttcctcaacggaaacgctctcctctggaacgtcggaaactaaagcgaaagaataaaaatcaataaaacagtaaaaaaaacaagcataaacagtacatgtgaatatttttaacatgtagatcttgattttagaaaaatttagcaacttgaaccacctgaaacagagttacggttaattagttatgattttccgaagatttaatctattagaaaaacgggaaaaagagaaaccgatgatgtcacgatgacatcatcaaaggtggccggcttcggatgacaagctcgccggagttagagcagccggctgcggatttggaggacacagacacatagagggcgacgagacgaacccaacggtactcaccctcgaaccaaacgacgaacgatgacggccggcgacgaagaggcgacggcggcggctcggcttgcacggggcggcggagctccggtgaccggcaacggaaaaggaagggtggccgagcttcccctcaccacggcgtacccaacggtggtgacggcgaccggcgacgacgatggaggcggcggcgcggcggcaccggagatggccggcggcggcggtttgcttggcggcggtggcgacggagctacggagcacgggaaggctcgggaacaggggcaaacgaaagaggaggactagggggtcctatttatagccttggattgaagagatcggactcctcccgcaagaaatcggctcgggaaaaacaaaactcggtttgggagataaactcgaaaacgagttcgattcggacaagatactcaacgaatagctccgattcttgaggggaaagatagaggaggatgtggggataaaaacccctcaactaatcggactcgagggcgaccggaagaggcgaaattggcggagagaggcggcagctcgggctcggctaggcggccggccggctggaggttagggatgaccccgacaggtgggccccacatgtcggtggctagaggaggagggggcggggcggctcggctgggccgacttgggccggcttggccgcgcgcgggaagagaagagttgggccggaaacggcccaacaactttagggaggggttttggaactttttaattaaaataaatggtgaaatgttgtttcaattattaaaaatacttcccttgctcaaacaattcccagaaaattctagaaaatagaggaacaagcaaagtatttaataaaattttatctagcccaattttatattgagatttagcaaattaaacttagatcttctcttttaagcttttaaaatcatttctaataattccttttaaacaacaatttataatttaaggattttaaacgataaaagcacttaacaattataattagatcattattgatcaaataattactgaactgttctttgtatcatttaggaattgagctccgaaaaatccgagaaaattccagagagtataattaaccatggagaatttaatgaaaattaaatccatccatgctttatatttaggaaattttatttcctacatttaacttcacttgtaaattaatgaacatttaatataaattctaataataatttattaaataatttataaatcctgaaataaaaatcaggatgtgacagaagatcccttgggttcctcggaggccttgtcgagacggcgtaaagggacagtaggataggtttcaacgctaggcgttgtcagagtgaggggttgtcgggtgaagatactttagttgttatatgtgaacaaaaaagtagtctttattgccttacaggtacaatggtattgactcatacatagaatttacgtagttggtcaacattccatgaatttgctaattcgcgaccgtcgcccgtctgcgattttgtatgcgcctggccgcaaggcttgtgtgatcgtgtagggttcttcccatttcagtgagagtttgtttcgacctgcctgggtctgaactcgtcggaggacgtagtcgccaattgaatgtatgcgtgctcggatgcgcttctcgtgataacggcggagggcctgttggtagcttgctgctcatacggcaactcgctcacgatgctcctcgagaaggtttacatcgatgtctcgctattcatcctggttctcgtcggaatgcttctgtacttgagtactctgatgtcgtagctcaccggggagcatggcttcagaaccgtatacgaggaagaagggtgtttccttattggacgttgtcggtgtggtgcgtatggcccatagtactgatgggagctcttcaacccatttcttgtcatgtgacatgagtctctcgtagacgcgggtttttatcccttgtagtactatgccgtttgccctttcgacttatccattgctttgagggtgagagaccgaggcgaaacatattttgactcctaagccgatgcagtaatcttggaaatcggcgctgatgaattgggagccgttgtcggttatgatgcggtgcggtagtccgtatctgcaaaatatccctctgatgaacttgatggcgttatcggccttgatttctttggttggtgatgcttcgatccatttggtgaacttgtcgattgctacaaacaggaatttgtagccgccctgtcctcgtgggaatggcccaagtatatctagcccccagcacgagaacggccaagtcagagggatagtttgaagcgcttgtgcaggtagctttgtgtgtttgctgtggaattgacaggcttcacatcgctggaccatgttgcatgcatctttaagggccgttggccagaaaaacccttggcgaaaggctttgccgaccaatgtccgaccggcggcgtgcgacccacatatgccttcatgtatgtcgaggaggagttgtctgccgttgtcggtagagacgcatttgagaagtatcctgtttggggcttttttgtataggtcgttgccgatcatacagtagatttttgctttacgggttattttctcggcctctgtatagtcttcgggtaactcctcgctgctaatgaatttgatcaatggggtacgctagtcatccgtggtttcgatgttagccacagcgcgttatgcctcggtgacctccgagctgatgtcgcgggtgctcgggccaacttcgccgctaacttcttttaccgacggttttgtcagtacgtcgagaaaggtaccaggttcgagcggttctcgtctggatgcacgtcgcgctaagtcgtctggctcgacattgtctttgcgatagacgtgtcggacttcgatcccatcgaacctcttctcaagcttcctgacttctgcaaggtacttggataactcggggttggaacacttgtagtctttgtgtacctggtttgcgacaagctcagagtcccctttgacgattagtcgcttggccccaagtgcggctgcagctcgtatcccggcgagtagtccttcgtattctgcagtgttgttggttgccctgaagttgaggtggattgcgtgtttgaattgatctccggatggagatgttaagataaatccagcccccgctccttggttattgagtgcgccatcgaacaccattgtccatgtctcattgtcgctttggttatctggcttgttatctggcatggtccaatcggccacgaagtcggcgagtacctaagacttaatggctgtttgcggcacgaagtggacatcaaattggcttaggtcgactacccatttcgcgatgcggccgacaacgtctttgtttctcacaacttcgccaagagggaaggaggaaacaattgtgaccctgtgggcttgaaagtagtgacgtagcttccttgatgtcatgataactgcgtagagcagtttttgaatctgtggatatcttgtctttgcgtcatggagagcttcgatgacgtaatagactggttgctgtactttctctcgctcgacgacaatgacagtgctaacggagtatggcgtagcagcaatataaagaaataattcttcattaggttggggagcaacgagtacaggagggtttgataggtagcacttgagtgcaataaatgcctcttcggcttcctgtgtccatacaaatatgtcttgttttttcaacaaggcgaaaaaaggctgtcctcgttctcccatcctagcgacgaatctgcttaacgccgccatgcatccggttagcttctgtacctccttgagtcttgtgggagacttcatgttctcgattgctttgatcttctcgggatctgcctctattcctctgccagaaacaaggaatccgagtagcttgcctgacggtactccgaacgcgcacttctctggattgagcatgagacgatatcgtcggaggttgtcgaacgtttcccggaggtcgtcgatcaatgaatcgcttgtcttggttatgacgacgatgtcgtcgacgtacgcctcgacattgttgccaagttgattgctgagtgtgccttggaccatgcgttggaaagtgttgccagctgttatcaatccgaagggcatcttgacgtagcaaaatactccgaacggggtgatgaacgttgttttctcctcgtcctccttggccatgctgatttggtggtagccagagtaagcgtcgaggaagcttaatagttcgcatccggctgttgaatccaccagttggtctatttgagggagagggaagtgatccttggggcacgccttgttgaggtctgtgaagtcgacgcacattctccatttaccattggctttccacaccataactggattggcaagccactctggatggagtacttccctgatgaagctagctttgagaagtttgtcgagctcttctcgtatggcttgttttcgatctgttgcaaatctccgcagtctttgcttgactggtttggcatcgggtcgcaccattagtttgtgctcaatcacctccctggtgacccccggcatgtcggacggttgccaagcgaacacgtcggcattgtcgcggaggaaggcgatgagcgcgagttcctatttctcatctagtgtagccccgattttgacagtcttgtcggggttagcactagagtgtggaacgatcttgatggcgccgtccggcttcggcgtcttgtttggcttgctcactttcttgggtggcttagacgtggcgggtggagtggacgtttgctcgaccatgtcgaggcttcgcttgtcacactgcaccgccagttttgcgttcccttgaatagtgattgtccccttcggccccggcatcttgagtacttgatatgcatagtgggatgcggccatgaacttcgcaagtgcagtcctcccgatgatggcgttgtaagctgtatcgaattcagtgacatcaaaggtgatttgctctattcggaagttgttggcttggccaaaggttacaggcaacgtaatcttgcccaaaggtctggatgatgattggggagtaatcccatggaaaggttgatcagtcggcgtcaactcactttttgggattcccattgcatccagagtgctagcaaaaaggaggttgatcgagctgcccccgtcaatgaggactcgtgctaccttgatgttccgaatagtgggttcgaccacaatcggataccgtcctgggataaccgcggtcttgggatggtctacttccgagaactccatcttctgctcggaccacttcatcttgggtgcagccccctgccatgtcgagcaaacttcgcgttccactttcttgtattctcgcttggaggagtacgtcgtggaaccgccgaagatgtgcgaaacatggaggtcggagtctgggtacgcggagttcgattcgtgaggaggcgactcctcgttcttctcgacaacgcgtactcgcttgcctttctcaaacgccatgtgcttctcgagcgactttttgaaaagaaggcaatcctccagagaatgtctatctgttttgtgtatgggacaccatgatttctttgtgtcgctgctttgtgggtccgggcgcttggaagggttcgcgtactctgctgcgaggacttccgcttgagctttccttttcccgtttttgcgatttttcttcttgctcgactcagatgtgtctgcggctgactttttctctcccccagtcttcggcttgtcgttcttgcgtcttagtgcgtcgtcgacgtgggcgcatctttcaacgatctcgaataaccttcgagtagttgtgatatgccttgttgccaactcttgggtagtgtagcgatctctgacgccagacttgaaggcgcgaattacagaagcgtcggtgatttcggggatggtattcctgcacttgttaaagcgccgaacgtattccctcaaagattcacctgagttctgtgttaacgcatgaagatcgtcctcgatcgcgtggcgcttgtatgttccttggaagttggcgacaaactgctgccacaggtctgcccacgaagaaattgagtagggagggatatg

SEQ ID NO: 29582 - DNA, 5088 bp, Oryza sativa
  unsure (1)..(5088): unsure at all n locations
gactttttctctccnccagtcttcggcttgtcgttcttgcgtcttagtgcgtcgtcgacgtgggcgcatctttcaacgatctcgaatacccttcgagtagttgtgatatgccttgttgccaactcttgggtagtgtagcgatctctgacgccagacttgaaggcgcgaattacagaagcgtcggtgatttcggggatggtattcctgcacttgttaaagcgccgaacgtattcctcaaagattcacctgagttctgtgttaacgcatgaagatcgtcctcgatcgcgtggcgcttgtatgttccttggaagttggcgacaaactgctgccacaggtctgcccacgaagaaattgagtagggagggatatgcatcagccacgaacgtgcagatcccttcaacgcggttggtaaatagtttgccaacgcgttgtcatctgctccagcggcataaagcactatcgagtagacttgaaggaattcttctgggtcggtgctcccatcatacttttcaatagctccgggtcgaaatctctcaggccatcggacatcacgtagggaacgaccgaaagccctacacccagcgctcggagtggtgggttgtcggtggtcgcgtgaccttcgtggatgtcggtctgacgatgaagaggacgcggaggatgatgatgatgacgatgggtcgcttggttccggcgtgcgattacgagggtgacgacctggatctcgggaatcttgtcttcgtctctcgttgttgtctcgacgccgatctcctccatcttcgtcgttacggcgacggccgtgactagtgttgtctggccctcgccgatcacgatcatcgtggtttcggttatcgtgtgggcgacttcctcgatcatggcgtagtgaggagacatggtgccgagagcggtttgcttcatcccgtgtgcgtcgtgcttctcggcgcccattgatttgatctcgaaggtcacccgtgccacgaggtggaggggtagctcgttgaggtgattctctatgttctggaatttcaccgttagcatcgccgatgggtgattggttttgttgtgccgcggtggcggcttcttcgaacgcgttgctgaggttagccaccgatgcccgtagtcgttccgtccaacgctcgaggtctttgttcaggacaggatcgtaaggtgtttccctcaatatggcttgaacagccctgatatgttgggctggggtggtcgattgatccgccgtctccgcgtttgcttgtgctgatgtgccaacgtcatcgatagccaacacctcccgcgccgcgtctgatgtcgatgacccataatcttcgaggagatgtaaaacagatggttcgtggggattaagattgattaccccaacgaaccgatctggggccagagtcgctccttgttccttgccgttatcccggactgggacgtatgacttatgagacggagttttcatggcgccaagtggaactttgcaactcgagaggtcgtgattctttgtcttatggatgggacaatagacgttccgagttggagaagtacgctggattccacgttctttgcaggcgcggatctcagcacgagcattgacgaatacccagcaatcttgaagagtatgtttcttggttttatgaataggacaccaagacctgatagtttcggaagtcatctttgctggcccgcggtttgtgtcggagggacaaggcctggtcgcatcagaatccttcacgaacttagatgtagtcggcaatccgttctccgtttcaacgggtggatctttcgacgtagaggcgtcttggtttgtaaccaccgcgttctcgtacccagtcattggacgactggttgagatcggcattgtggtgtaaaccgggcagacgatttcgccgacttgagtccataccagcattgtcgaggtgggaagaacttgaccggagttggtgttgacgttgttgtcgacgaagcttgatggcataatagtagaaccttgaataccaaggccccctacctggcgtgccactgtcgacgggggatacccgtagaccggatatagagggtattggggtacgccggtataaggatctacgtagtacgacatcgagcaatcaaaagacaagaattatactggttcaggccccttgacaggtaatagccctaatccatttgatatgggattatatggtggaaaacacagattacaaaggaaaagatggaactcgggagattcgacgagatcgtagtcgagatgatctgactagctctcgtcgacttggctctttgtaggctctgacttcgtaggctgtgttggttgtccgagctctgatattcgatgagctatggcctccccggggggtcccttttataccgtaggttgggcgatatctgagtaggactcggatgtaccaaacctggtacgatacgtaggtaacccaattcttgtccaagaaggtttgttgtctttacgaagaatttccttaagtgctagaggatttatccatatacacgtggatataccttgtcgatacgtgacgtatatcgtggggtgaagggtatgcctgacccgtaaccctgacagatggatctaaggtaggtaggtcatcggatggcttgggttttggcttcttagctttcttcttaggagctagggccgatggatcaattgccagtgtcttgatctttcttttcctgccaacatcggttggttctctcatttgccattgaagcagaggcctggaggggttaatccaccaccagttggcaagaggcctggagcatactctatatccctgccgctgttccttttgtggggaggagaagattctgttgtctgcaagacaaagaaaagtcagtcaagatctaagtcggctaacaattattcaagcgaaattaacaaagtaaaggtgtaccggagggataacatcagggaacagatctgtcatatacatggaagccgactgatggaatatgtgttgtttccattctccccaccatctatcgaagttcctgctcctgaactttgccagctctatgttttcaatgatgcccaaaggaggtcttgggatgttgagtagccgatccatcatcagggttgatgaaatatctcctcggcattggattttatcggcaaagaacatgccgattggtagctgtcccattccaaattgcctggctgagctcatcggatggtagaattcgttggacacttgtatatttcttccttggtggatgccaacacgaaggatgcatgggctgatcgcagctgagaagacttctctggatttctgatatctctcatgattgatatcttcaaatctaaagtccgatgggagatcaagattcaatgagtcttcataagggaaccaaacctgaggttctttctgaaagccttcataaaagctgcagaaccaatccttgagtagctcagccgataattttgctccagcatcggctggtgtggatgcatattctccataggacatacatttgcgatgggtgcgctcttctccatcatcatttgtagtcggctctaatcttgggaattcagcttctgtcacaggtggccggttgacagctttcatggctatcaggtttagtcaagtttgcgacaaccaccatggcccgcttgcactaataactgagccgatagcaatcttagccgatgcgttgttcagtgtttgatacaaatagccgaggaggatcttgcctaaaggaaattgcctctttgtttccagggcttcggctaaaaattgccagttggttgtggggccgcaacttgatccacaaaagagaaacttctcaagccacatcagaaggaaggcttcgagttctcaggaggtgacaaatccttttcccatatatgttgctacatagccggaccagccacctatgctcttagttctgaagtcgaactggttcttggtgtttaagctcatggggttagccgatgaggtcacgtccaaaccggtgatcatggtaatgtcaagtaaagtggggatcatcggcccttggttgaaaaggaaggcattgatggtattggaccagaaataggtggctgcggccatcaagggttcatccttagccaactttgctatggtgtgggcaagtgcctggctaattccaagttcgtcccagtgaacttgcttgctagccgacacacgcttataccacacggcccagcttttctcgagggaggttttctcaagagatggccaagatttgaatgtgtttttccagtggcccaggttagggttggctaatctaaaggggattctgttggtttcggcgatgatgaattcagtagggtcaagattgccaatcggaccgagaaaataatggttctcatgtgacagacttggaatcgctaccagattggacaaatgctacagatgtaaacaagaacagagaagaagaaaatgagataaggcaagagaaaactaatctgttgcgaaaggaaaggatctagccgatgggtacttacctccgcgtatttggctaatggcgcgacggacgggctggcggaggacgacatctctgtcaccacctgccatcttgtcgcgaccgagaaaattgccttttcccgaacgctagtgtattaatccccgtcccaggaaaagccggggtacaccacacaaacatgatacaaaaggcacatctttattatatcgataatatttacattattacaaaggcacttaaggcctgacaatcaaaaataaacagcagcggactagcgggcctacggctccatcttcacaggcgctcaactggggtataagccaggactccacctaagacttcttctccaaagcttctcttactgaaggggggagaaagatagagcaagaatgagtacaaccacagtattcagcaagccacaccggcggatgcatgattaatgcaaggggtacaaggggtgataatatagggattaagttttgcagaaaacagcttttaaaagtcacttacttgcccaaagccattttaaaaagacgatcctagagctacacagtattattaatcaaggccgtgacccctcacgaacctgccttaacccaaggcctacgatgattcagaccgaactggcaacccgaccct

SEQ ID NO: 29583 - DNA, 1318 bp, Oryza sativa
ctcggtctgcccatctgtctgcgggtggtatgcggtgctgaagtttaatcgggtacccagctcttctggaagcttcttccaaaagtgagaggtgaattggctgtccctatcggatacgattttcttgggaacgccatggagactcacgatccaagtgaaggtgagctcggctagtttgctccctcaatatgtggtcttcacaggaatgaatcgagctaccttggctaatcgatccaccactacccatatgaattcatacccaccttgggtcttttggagtaccgggaatgaaatccatccaatttcatcccatttccattcaggtacttggaggagttgtagaagtccggccggtcgttggtgctctgccttgacacgctggcacacatcacaaagggccgcgaactctgcaatttcccgcttcatactaactcaccagtatttctccttcaagtctaagtacatcttcatactgccagggtggatggaataaggactttcgtgagcttcctgaagtaacagctgtttaagttctctgttatctggaacgcatactcgatttccgttccatagggttccgtgttcatcctctgtgaaaccagcggctttaccctgtttcatattcttgaggagtccatgcatgtccggatcgttcttctgagcctcgcggatttgatcgagcaaggtaggcttggcttccaacgcagccaagaatccgcgaccaactatgcttaggttcagggcttccatctgttgactaagttcgagtggaatgccacggacgttaagagtgttgcaatggctttttcgacttagagcgtcggcgaccacgttggccttaccaggatgatagtgaattctgacgcgaccgagaaaattgccttttcccgaacgctagtgtattagtccccgtcccaggaaaagccggggtacaccacacaaacatgatataaaagacacatctttattatatcgataatatttacattattacaaaggcacttaaggcctgacaatcaaaaataaacagcagcggactagcgggcctacagctccatcttcacaggcgctcaactggggtataagccaggactccacctaggacttcatctccaaagcttctcttactgaaggggggaaagattgagcaagaatgagtacaaccacagtactcagcaagccacaccggcagatgcatgattaatgcaagggggtacaaggggtaataatataaagggtaggttttgcaagtaacagcatttaaaagtcacttagtttgcccaaagccaattttaaaaagacgatcctagagcttcac

SEQ ID NO: 29584 - DNA, 692 bp, Oryza sativa
ttcatcctctcttcttctctcagccaaagtccggttttgctccctcttctaatcaggctgagaaaagaaaagcccggcaagaagtctattatccttcccccgcgctactgttcatcttccagctccagccgccggctgtagctgagccgagccgccttgccgagtcgccttgccgcgccgtttcctccccaatctctccccttttcttccgattgtttgaggggattttatcctctcgttctcctctacctttcccctcaagaataggagcatttcgttgagtatcttatccgaatcgaactcgtttttgagtttatctccaaaaccgagtttttgatttcccggatcgatttcttgcgggaggagtccgatctcttcaatccaaggctataaataggagcccctagtcctcttctttcgtttgccccctctcccgtggtctcccgtgtcccgtagcctcgccgccaccaccgcctagctcaccggttgccgccggccatctccggcgaggtagcgcagccgtctccgtcgtcgtcgccgcttgccgctgccgcgtttaggtgcgccgtggtgaggggaagcccggccgcccgtcccctttcgtcgccggccaccggagctccatctccggcgaggtccgagccgccgccgccgttcatctcgtcgccggccgtcgtcgttcgtcgtttggt

SEQ ID NO: 29585 - DNA, 510 bp, Oryza sativa
gtcgtcgtggaggcgggggagacgcgtccgaggcctgaaaaacggtcgatgcgaagtaaggcgtaattcttctggctgtacgatctgacgacaggataacttaccaagggggttgacgccttgcgatgatgtccgcttacagaggagaacttcctcccctttgtcggaacattgccaccactagtggtagtagcagcagcatcagacgcctccttggcgaccttctctttcagagacgccgccacctgatggtccgcgagcggcccgatgatgtcagtcagaggaagagcctacgcttaatcaagtcacaatgtgatctcgaaaggaaaatgcaggatgcctatcgagaacacttacgttgatggcgtcatcatgttcggccgcccccttttcacaaaggggcacggggatgttactcgccgttgtcggaccactgatcatcacctggccgacacgacgttccacggcttcgctgttcagacctgcgaatcaagaaccaaatctcgataa

SEQ ID NO: 29586 - DNA, 589 bp, Oryza sativa
gaggggcggacgaggtcagccatggcttgtgatcacgatggcgaccttccggagtggcgacgacgactggagcgacggcgacgcacggctagaccaccggcgatgacgccggcgcacggctgcacggtgctagggctctaccggcaacgagaggcgaaggcgagggtgccggcgggtaccgaagggcttgggggtccttttataggggctagggggcggcggcgaagtcccacggcggccggcgacgagaaggaaagttttagggttcgggaggaaaggggaatccgaatcgagctcaaatccgatgatttccaaagcgatatagacgatgcttccaaaaggaaaaaggtagaggagatctcggggatcctttcccctcaatcaatttcatcggatcgggaaaggggcgacggaattggatgggcggcggcggcgcggctcggctagggttcgggcgcgaggaagacgacgaccccgacaggtgggccccacctgtcagcggcggacgcgcgcgcgtgagcggcggcttggctgcgggccggcctgggccgaggagagagagagaggggggttttgggccgactttcgg

SEQ ID NO: 29587 - DNA, 911 bp, Oryza sativa
cgggaggagtccgatgtcttggatccaaggctataaataggagcccctagtcctcttctttcgtttgccccctctcccgtggtctcccgtgtcccgtagcctcgccgccaccaccgcctagctcaccggtgccgccggccatctccggcgaggtagcgcagccgtctccgtcgtcgtcgccgcttgccgctgccgcgtttaggtgcgccgtggtgaggggaagcccggccgcccgtcccctttcgtcgccggccaccggagctccatctccggcgaggtccgagccgccgccgccgttcatctcgtcgccggccgtcgtcgttcgtcgtttggttcgagggtgagtaccgttgggttcgtctcgtcgtcctctatgtgttcatgtcctccaaatccgcagccggtcgctctatctccggcgaggtcgtcatcttggttcggccgccattgatgatgtcatcatgacatcatcggtttttctttttcccgtttttctaatagattaaatcttctgaaaatcataactaaataactgtagatccgattcgagtggttcaagttgctaaatttttctaaaatcaagatctacatgttaaaaatattcacatgtactgtttatgcttgtttttgtactgttttgttgatttttattctttcgctttagtttccgacgttccggaggagagcgttttcgttgagcaaggttcggaagtgtttgcggaagctcaaggcaagtcacacagatcccaaataaccctttgagcatgttgaacccgtttaaagctattattttatttcaactatgcattattttttaatgtcatcgggtggtgagcctttccccgttaattaatggccgaagatgatcttattttcctatgggttataatttgggtaccgagctcgaattg

SEQ ID NO: 29588 - DNA, 5278 bp, Oryza sativa
ccgtcctcgtctccgtgcagccgctgccggcttccctcgtcgcctcctcgccggcccggtcgtcgtcgtcatcgtcgtcctctcgtcgtcctcatcgtcgtggcgttcgtccctccgtgcaagcctgcgcgttcgtcgtccgcattccgtcaactgagccgctgcagccccatcatcgtcttcgtcctcggctccgcgtcgtgaagcctcgtgccggccgcgtctcgacttcgtccaaggatcgccaccgaagtcgttccctcgccgttcgcctccgtcgtccccgagccgactccgccgtgctcgttcgttgtcgtcgtgccgcgcctcgtcgcgtggtggtaaggatctctcctctcgctgccccgtcctcatcctttcggtgttgccccgtacccgttgtgtggttgtcgaccccggtacccatgtaccggtgtcggtagtcgttcgcttgtgcgtgtggtgaccgtgttagtgtgcccgctcggtagccgcgtggtttcacgtgtgcagcccgcgtggtgtctagtggagtccgcttgtcggccactcgcctcggttgacacacggggtccgcttccgtcaacccgtggaccgtgtctatgtactcggcctaccgcggtcctttaggttgacatgtggggtccgcatgtcaacagcgcagccttcctgtcttttccaggctagtgcttccacatgttttatagttgcaaagcttaattataataatccgcaaatctccatataacagcattaaacttcggatgatcgtatcttggtcatacgaactctgaatcgacccgttcaagtctcctaatgtttgttataacctaaagaaccctgtgctttctttttatgtattgttattacttctttatagggtttagctttgcttgtgtgcttcgcgtagcttctgtcgttccggaggttctcgaagcgtggttcgcggtcgtcgccgaaggttcagcaggccgttctctctgagcaaggcaagtcacatcatccttgagcatattgaatcccagtttataaaattattttgatttaaattaatgcattatcgctttatttaaattcccgcgttatcactgttttatttagccatgcctatttacctttgttatgacattattattgctattgttattattaccttgttcaccctagaataaataaaaccccaactagtgggtactctattcatggttccactagtatgaatttaggtagatgcttcgctgattaattaggcaacattaggtggttttataactctagactttgggaatattcatatcacttggacactatggaatggttggattattgtggaattggatgcacacctccccctctattcaaaaccctcaaaatggttttaggctgggctcggggtgcatggttttgttagtagcacctcggccacataaggaccggtcttcgggcccctgttgcaaagcactaccgtacttccacatgtctagtgggtaaggcttagtttgtggctcagtctggttataaacaaaagtacacggatggagatggacgaagtcgggggtcgatggacatctctaggacaaatgaaggctacacgagttgcggcccggtagtcgagatgtcatggcacagggctggtgtcctgctgctaggggctcaattttgcctgcctgtccgggggttccggccgtaggtgggttgggtcggtactcttgtctatggctaggatgggttggaaactatgtcgcgtcttccgtccgtatgccgtggtggtatgtggcacgtggttacacgtgaggaagacgtgtcttgtgggtaaagatgtacacctctgatcagagtataatctattcgaatagccgtgccctcggttatgggcaagcctagcaatgtacccaagttagtgttttaaattcttaaaacctgcttaataactaaaatgtggaatggttggcctgggttggcttgggacgagctgggacccagggtcgggttgccagttcggtctgaatcatcgtaggccttgggttaaggcaggttcatgtgggtccacggccttgattaataatattatatagctctaggatcgtgtttacaaaatactttgggcaactaagtgacttttaaatgctgtttactgcataacttaacccctagattattatccccttgtactcccttgcattaattatgcatctccagtgtggcttgctgagtactgtggttgtactcattcttgctcaatctttccccccttcagtaagagaagctttgcagaagaagtcttaggtggagtcctggcttatacccccagttatgcgcctgtgaagatggagccgtaggcccgctagtccgctgctgtttatttttgattgtcaggcctgaagtgcctttgtaataatgcaaatattatcgatataataaagatgtgccttttgtatcatgtttgtttggtgtaccccggcttttcctgggacggggattaatacactagcgttcgagaaaagacaattttctcggtcgcgacacgtcgtgcgcagagtgtatgtgcttgccttgctcttgccctgatggtcgcgcccctgtaattccttctctgcaagcatagcaaatcgaaacaactggttgacagagttaaattccttataatcaacaatgttctgaatttcctccctcaaactagtgtagaaacgacaaatagcatcctcgaccccctccactataccacagcgtctcacacccttctgtagctcaccatagtaatcctgtacagatttatccccttgttccaaacgcatcagtttcttacgtaaatctctatgataagatggaggaacaaacctatcgcgcatagctaccttaagttcttcccaagtagtaggtagtaccccctcatcagataacccagcccaccacataatagcaaaatccttgaactcactactggctcgtctaactctatgttgctcgggtacaaggtggacattaaacttttgttctactgtcatctcccaatcaaggtattttttagcatcatcatatcccaaaaaagatggtattttaaacttaaccttagcataaggatcatcgggcacacgatcattattattaccttgttggtggcgagtgccacccatacctgtgcggtttgtgcgtagacgacgtcgtagccatgcttgccttgtagccggtgcgtcaatatagccactggaatcatacaccgtgtcttcaggatgagcatcgtcgtcaccactcaccacttcctcattggaaggtgtctccaacacggcgacccgatcagttagagtggatatccgcttgtccaacctctccatgtggtttaggaagccgattttagtgaaggcatcttggacagactttgcaacagcctccgtgatgtccttttgagtattttgttggagagttcgtagttgctcttggctgacacagtcagcaaaatcctggggactcttctcgccttcgttacctgacattgaaacaccaaaacagaaacaaaacggtgaaggttatccctaataatctactacgcaggtgtagtggtgcctctcaacgattctcagcaatatggagttcctaaccatggtcttataaggttcttaccagcaaagcaaaggatacctggaaggcgtagtcagcaattgcagtgatcaagaacctgtgctgttcagaagtaatatgtggagctaggaaggccaaaaatatgtttatgagtggtacacaatccaatgacagatagtaatgctgaataaaaatcccaagtcacttgcccttagttgctggtctactcgtgtcctagacagtagtgataacaaagatggctcaaagaatatgacactagtaaacagcaaagaaggactgacaggcaagcttcagcgagtttcagcaaaaactacaaaaccgaactggcagataagctcaacggagcgcgtcgtgagctcaaagcactagtggaaatcaacttttcttttttttcttttatttttttgatattttttttctttttttagaacacaaaaataggcacacctccaagttaaagctcaattggagtaggtatgtggcctatggatttttctgaaaccactataaacaaggtgcaggaacttgtgagctcgaacagacaattttgcaagccaatttttggaattttggattcgccaaaccagccaaaggcggggataaacggatataaaattttttctcttatccgaaaagttaaatttttcctgattccgagtccgtatgcaaaagttatggctgtttgaagtttcggcttccggctaggttttccagaggggatataacctagtctattttgcggtggaattgggatatggtggcagcggagttgtagggtgttctggagatgcttggttatctggatgggtgtttatgatggcggaaacggctctcaaaggatgaagcctaacacacggtgaaaggtagcggctagggttacaaaggacaaacacatgactagactaaaacacacactagaccagcaacatgaacttaaactaggactcaaactcaacactacggactctgagagagaatcatgcaaaggctaaacacggtctaggttaaggtaactaacaactaatttttttttggcttttctgtagactctaggataattgcgaaaaaaaaaactaatcaagggcaaagaaactgagcgaacctgacggtgaacctagagctctgataccacttgatgtgcactagggttcccgatcttccgaaaggttctgataaacaacgatttgggcggagtcgcgacacaaatcgatccggcttcttgaacgcgcacgttcttgagccccgcaatcgcagcaccacgtctcctcaggttatcacccgtgtcaaaatacggatgacctcgccgagaaggctaatccctgtttgccaatcgaagaacacaaacaagaacaagatagaaaaacaaccaaaattgcagatgaatgattaagctcacgagttggggtcttacaaaccaatctagcggcgaaactgttcttgacagattaatctaagcaaaacccaaaaacctaaagatgacggcgggtactgatatatatagtttagggtcgtgcaaacccctctcgacgcaaccctaatgggttccaatacgatacacgggccaaaggcccaaatacggtgacgcagcaccgggacagattctggacgttaagttgttcggtcaattcccgttgactcagaaagaatttggacgtgggaccaaaaccattggaaaggttat

SEQ ID NO: 29589 - DNA, 1026 bp, Oryza sativa
caagatctatccggaactcaatctctcgcttgggcggcataccgggtagttctttcggaaacacgtctccgaactctctgacgatggggatttctgacagtcctatctgatgaagttctgaacttctgacagaggttgggggtgcaaagaaaacaatcggttgttccggccctcggtacagggtgacagtgcgtctcgcgcaatccactactccttggaattgagccaaccaattcatcccaaggatcacatccaagttcttggtgtctagcagaatcaaatccgagggaaaaggaatcccctgaatttctatagggacggcaggactataatactttgctgtcataacccctccaggggtggtgatgagcagagggttcctaagcctttctatccccaactgatttctccccacgaatggcacagatataaacgagtgggaagctccagagtcgaacaaaatggtagcagggatggaatgaatgaggaacgtaccaacgatgacgtctggagttgtcagcacgtcctcggccgtcacatggttcacccgaccccgaatgacatccttcccaccgttgttggagcggggaggcgcttggccttgctgacgcctcggctttgggcatttatccgcaaagtgcccgggctcgaagcagttgaagcacagacgctgcggacctgaagcgtccctgcggacttggccaggctgcacagttggcgtaggaggacgaggcgcacgagtcccttgctgactctgctgttgctgcggctgtgggacgcgcaccacgaattgaggtcgaggcgcggagcgaggttgctgctgttgttgctgctgctgcgaggaggatccccctggatagggattggtgtagcggaccctttggttagcaccctgttggttgcggaaatttgccaagcggggcttgtgcgactcagttccttgtgcttggcttccaagcggatgctcttgtccaccagacgtaggaaatccgatagtccccggagactagaccgacggacagctca

SEQ ID NO: 29590 - DNA, 4753 bp, Oryza sativa
tgcctttgtaataatgtaaatattatcgatataataaagatgtgtcttttatatcatgtttgtgtggtgtaccccggcttttcctgggacggggattaatacactagcgttcgggaaaaggcaattttctcggtcgcgacagcaagggtagagagaaccttcaaagattggtcttttaaaatttaactctccacaagtgttgttactatctattgtacattactacaatcccatcataacattgttatgaaagtgtggtaaattttataagttttgcagtaacaaagcatcttactgcaattcttgaatagtgttactgcatacacttgtggtaacgtgtatctgccatgcagtaacacttacacttttgtgcagtaacaaatatatggttagcatgtagacttttaactcatatatttttttttcgatttctagtttactacaatttcactacgatgttactatcaaaagtgcagtaacatcctatatgttttgcagtaacgtgacgtggtactatacttatacgataatgttactactaaaacatagtaacttgttatgagttttgtaataacatatatatttgtcttctaattagcttcttacaactatggaactttgtgtcctgtagagttgtaacagtttatgtgcttttacagtaatcgagtgtgttactactatttcttctcgaagattggtattttgaaatttatctctccataagtagtaatactaaatcattattgttactactttttattgtgtgttactaccattccatcatggcgttactgtatgtgtgcagtaacaactataacttttaaagtaacactgcatgttactgcaatttcttaatagcattactgcaataagaggtggtaacaaccaaacacaggtacaggacctatcacccactttgaactagtaaaatgtaaatgcaagtgatatcttttgaattcacatctttaaacaataatatctctcacaccacatattatatttttgaaccgtttgcaccgtaatgctttaaaaaaaaagctctacaaaactagatccgtcatgactatattttaactatattttattagtattactgcaagtaaggtacagtgttactgcatagtggtcgtcatgttactgcaccgttcgtacgagacaaggacaacaaataggtggatgtgggaggaagttagcacacgggtttgaccgacatggcagcgatttgaccgtcctttgaccatgctttgactggggtagcaggtgggttttgagcccaataaaaggagggggtagtgggttgggctcttaagggcgacggggggtatagaatagtctcaccatatatatatatatataatgattctatactcccaggagtaggtactcccggttccatccaccgtccatcagcgaacaccaccgaccaagtcagcaagcggatccagataccgagcccgttttgatttttagttacgaaaaaaatcctcataatctgaattattccgtaataaccggaacccttttgaatagctcgtattaaaatctcatgggtggttgtaaacagaatcgatagatcgatccgcaggttatctcgatcagcgattcgaaggcgacggcggcgcgacccatcggctattcgaaggtcgtggcatctgctgatgtctacgccggcgtcttccattaccaatgccttcggtatgactatccggaggcgactggctggccgaagagctatgaccagacaacgacgccgttgatcttcgggcaagtcagtgtggccgtgcggcgacggcatcgatgcaggcccatgctacgatcaagacgacgttgagcgtcgtccggaactggaacatcgactatactgcaggcaagtccttccttcttccgattttcttgatttgctttttctacgttgcaaatcgataatgcatgcatgcagatcgaatttgtttggtgcatgcaaatgcgagatgcatgtatcgtggacgtagatggtgctgatgacagaacagcccagcatgtgtggccgtgcggcgacagcattgtcgtcggcattgaaccgtgattcctagctaatggtgttaatccaggaagacacattcttgtccacctctctccggcgtgcggtcagcgtgatcccatcgatgttaaccgagatctgtctgtggggatgcagagattcttcgatgagccacatcgaggggtgatcccgttatgttttgttcttagtttccgaaagtctgcgttgatctttttctttggtctggtaatgtccattcagaattcagtgcccttctagggtatttcattaatttaggtttattcataatgcaacagccgatactttgccagtgattcaggcatacatctgaatttgcacgtgaaaagcatattaattattctattcaactgaaaagcatatgcatccagcttccatggatagcaaatatacgacttatctaagaaatactggtacatacttatttatatactgagtgaaaaaaagtagtatacatagtatataccgatcaaacaagaaggcagtataacctcctttagcgaggacgatgcagtataccgaccaaacatgacaattagtacatgcagtatactgacagaacaagtagtgcatacaatatatactcaaataataacaaatgcatatactgataaaaaaaagaagcagtatatactccttcaatgaggaatgtagtatatatacactgaccaaagagcagttcataccgattgtagaagaaataagtatataccactccgagtagctgttcataccgattggagaagaaataagtatataccactccgagaaaagtcagtatatatactcgttccaaaaaaaaaatcagtatatactcattccgtgaaagaacagtatatactcattcgctcgttgcagtagtatatactgcgcgtaccaataaaaagacataatcagtatatatatatactcgttagttctggagtaagtatatgatgtgcactagggttcccgatcttccaaaaggttctgataaacaacgatttgggcggagtcgccacacaaatcgatccggcttcttgaacgcgcacgctcttgagccccgcaattgcagcaccacgtctcctctggttatcacccgtgtcgaaacgcgaatgaccacaccgagaaggctaatccctgtttgccaatcgaagaacacaaagaagaacgagatagaaaaacaaccaaaattgcagatgaatgattaagctcacgagttggggtcttacaaaccgaactagcggcgaaactgttctcgacagattaatctaagcaaaacccaaaaacctaaacatgatggcgggtactgatatatagagtttagggtcgtgcaaacccctctcgatgcaaccctaatgggttccaacacgatacacgggccaaaggcccaaatacggtgacgcagcactgggacagattttggacgtcaaattgttcggtcaattcctgttgactcggaaagaatttggatgtgggagcaaaaccatttgaaaggttaccttcttagctttccatccatataaagaacgccccaatctgagcacgtatgcgacctgggcgcccgttttagtgcagactggtcctggactccgaattgcacccgacgtcgacttggtttgggcctccaccttgacttggacgtccccgatggtcctccatgactctaagtccttctccaagtgtctctttgtcccctccattgttcctaagcacaatataatcattaggttgcaatctattctcgaattcatacaaagaagaacataggaacgaactcacctctaaatttaattgtcgcgcacgagctcttgttatcggtccttgaatgaccattggaggattgttgtgtgtatccgaggtagtgatgtccgcatcatcctccccctcttgaattgatgtcgtcctcgactcaagctcatactcttctcccaagtatggcttcaaatctgaaatgttaaacgtgggactaaccccaaactcgggaggcaactcaagtttatatgcattatcattaatcttctcaacaattttaaaagggccatcagcacgaggcatcaacttagactttctcaattccggaaatctatcatttctcaagtgcaaccaaactaaatcacccggttcaagcttaacctcttgcctacttttactaccagcaattctatacttttcagtcatcttttcaatgttgaacttggttgactcatgcattttcaaaataaattcagcgcgtgccttagcatcattatgaaccctctcactagtaggtaaaggcaacatatcaattggagcacgagggttgaaaccatacactacctgaaaagaacttaccttggtagtagaatgtgttgcccgattgtatgcaaactccatatgaggcaaacattcttcccacatcttcaaatttttcttcaaaatagccctcaacatggtacctaaagtgcggttgactacctccgtttgtccatctgtttgtgggtgacatgttgtagaaaacaatagctttgtacccaacttgttccatagcgtgcgccaaaaatgacttaagaattttgcatcacgatctgaaacaatagaaggcataccatgcaagcgaacaatctcatggaaaaatagatcagcaatatgaacagcatcatcacttttatgacatggtatgaaatgtgccatcttagaaaaatgatccaccactacaaaaatactatccctccc

SEQ ID NO: 29591 - DNA, 5315 bp, Oryza sativa
ggctgcaagcttgacttggtgcgaggaggctggtttagcgatgtctgccctgttaaaccaaaggaaagggcttctttggcatatacccatggacaattcagggcatagtgtccttgctctctacaatcatgacaaaaggggacatgctcttttggcattggaggctcattgacctgggtggcaaatgctcgatcaaacacacactgattttggtcttgacttccaactaatggtaactgtgaaccaagcagcatgctcggaatggaccaagggtgtgcccttgttaactctcttgaggccagtggtggattgagttgaaaacttgagttacttgaggcatacccgctgacattctttcctttttctctgttaaacatctgttatagggattgaggtgagagtggaaacaagccaggaaagaatagaccagaactaaagacaggaccttaaaggaactaactcttctcgttgatgtgctgtttgtttcacttcttctgcaagttgattaagcaaacaacctagcatggttacatcacaccccacagatgcaaaccacgcgctacacacacaagcaaggaaacacacaactaacgactctaccctagagggtggcttaggttctgcgacgggttctccaagatcttcactgcttcctccacttcgctagcagatcctgcagccttccggagcttcggcagacaattggcgacatcttcttcttcgcaaaactaaccatccagtactagttgaaatttgaagaaggaagaaagagtaaatattttgcaaatagcacaggggaaaggaggaaaaagggactttcggaaatagtttcatttataaaatatgtccataggttttatccacttggcttatcctacagtcgagatggctctgataccagcttgacgcgaccgagaaaattgccttttcccgaacgctagtgtattagtccccgtcccaggaaaagccggggtacaccacacaaacatgatataaaagacacatctttattatatcgataatatttacattattacaaaggcacttaaggcctgacaatcaaaaataaacagcagcggactagcgggcctacggctccatcttcacaggcgctcaactgcgtataagctaggactccacctaggacttcatctccaaagcttctcttacagaagggggggaaagattgagcaagaatgagtacaaccacagtactcagcaagccacaccggcagatgcatgattaatacaagggggtacaaggggtaataatataagggttaggttttgcagtaaacagcatttaaaagtcacttagttgcccaaagccaattttaaaaagacgatcctagagctacacagtattattaatcaaggccgtgcacccacacgaacctgccttaacctaaggcctacgatgattcagaccgaactggcaacccgaccctgggtcccagctcgtcccaagccaacccaggccaaccattccacattttagttgttgagcaaattttaagaattaaaacactaacttgggtacattgctcggcttgcccataaccgagggcgcggctattcgaatagattatactctgatcagaggtgtacatctttacccacaagacacatattcctcacgtgtaaccacgtgccacataccaccacggtatacggacggaagacgtgacatagttcccaacccattctagccataaacaagagtaccgacccaaccccacctacggtcggaacccctcggacaggtaggcaggactgagcccccagcaacagggacacgggccctgtgccatgacatctcgactaccgggccgcagctcgtgtagccttcatttgtcctagagatgtccatcgacccccgacttcgtccatctccatccgtgtacttctgtttataaccagactgagccacaaactaagccttacccactagacatgtggaagtacggtagtgctttgcacaaaggcccgagcttaatccttatagtggccggggtgctacttcccacaactagcatgcacccaaaccccaccgaaaaacaggttttaggggctttgaaagaggaagagaggggtatgtccaattccaccataagccaaccattccatagtatccaagtgatatgagaattccccaagtctaaagttataaaaccacctaatgttgcctaattaaacagcgaagcatctacctaaattcatactagtggaaccatgaatagagtgtccactagttggggttttgtttattctagggtaaacaaggtaataataacaatagcaataataataaggtcataacaaaggtaaataggcatggctaaataaaacagtgataacgcaggaatttaaataaagcgataatgcattaatttaaatcaaaataattttataaactgggattcaatatgctcaaggatgatgtgacttgccttgctcagagagaacggccttccgaaccttcggcgacgaccacgaaccacgcttcgggaacctccggaacgacgaaagctacgcgaagcacacaagcaaagctacaagcctataaagaagcaataacaatacataaaaagaaagcacagggttctttaggttataacaaacattaagagacttgaacgggtcgattcagagttcgtatgaccaagatatgatcatccgaagtttaatgctgttacatggagatttgcggattattgtaattaagctttgcaactataaaacatgtggaagcgctagcctggaaaagacaggaaggctgcgctgttgacatgcggaccccacatgtcaacctaaaggaccacggtagaccgagtacacagagacggtccacgggtcgacggaagcggaccccgtgtgtcaaccgaggcgaggggccaacaaacggactccactagacaccacacgggctgcacacgtggaaaccacgcggctaccgagcgggcacactaacacggtcaccacacgcacaagcgaacgactaccaacaccggtacacgggtaccggggtcgacaaccgcacaacgagcacgggcgacaacgaaaggacgaggacggggcagcaagaggggagaccttaccaccacgcgacgaggcgtgggaacgacaacgacgaacgggcgcggcggagacagacggcgagggaacgacttcggcggcgatccttggacgaaggtgagacgcggccggcacgaggcttgacgacgcggaggcgaggacgaagacgacgatggggctgcagcggcacacttgacggacgcggacgacggacaagaacggcttgacggagggacgaacgccacaacgagcgaaaccgggaacgacgagaggacgacgacgacgacgaccggagccggcgaggaggcgacgagggcagccggcagcggctgcacggagacaaggacggcgtggaacacgccgcaacgatgcccacgacggaggcggcgccgcgagacgacgaaccgggcgaggaggaacgatgacgatgacgacgaacactggcggggttcggtcgaaggggaggcgaggccgagggcggcgtcgcggctgcgatgcggaaggtggtggaggtgcggccaaccggtgcaccggtgaggagggacgggcggccgaacaactccggcgaggcggatggagaggttcgcggcgatgtgcggcggcttccgggcgaaaccgaggggtggacgaggtggagggctacgtcaccgtgccgagagaggggacggcagcgccggctgacgcacgggcatggcgaaaggggttgccggaggagacgttgacgaggaggaaggtgaggccggcgcgggcgacggtgttccggcgaaattcgggcgaggaggaggtgatgccggggatgagagcggcatcgcggagccgagggaggtggtggcgacgtcgaccggtgctcaggcagggagacagaggcggctggaggcggccggcgcggaggaaagggaagggcgacggcgggaacgcagctccgggggtctccgcgggaaacggagggcaagccggggaaggggaggccactgcgatgctggaggaggcgacggcgcgaccggacggcgctccggcgaggagggagaggcggctggaggcggccggtggcacgggagagaggaggacggcggggagagggctagggaccacgggagatcgcgggagggggctaaaacgatagaacggagcgagggggttgcattttatagcggagggaagcgagccgagcacgggagagggcggaacggcgacgggaatggcggccggcggccatggaaagcggccggagaaaacgcgggcgttcccggcgattgggggcacgatccaagggggaaattggggggaattgaagaggaatcaatgggatttaaaaccccccaattaattttggaatccatggtttgatttgcgcggatttggaggaggaacggctctaggttttcccggagagggagaggaggctgagcgggaggaggaagaagacgacggccggcctggcgcgtgggcctcacgcgggcgcgcggcgtcagcgcgcgtgcggcgcgcatgcgcacgcggctggctcaggcagggggggcgccgctcgggttgggcccggaggcggcccaggtgggagggggcggaacggcttgggccgagaggcggcccgggaggagaggagggcgagggagcccgggagagagagggaggagggagtgggccgggaggggaggaggcccaagaggaggagggagagaaggagagggagagaaagagagggaggagagggagactttgggctgggcttggcccaaaggaggaagaggatttatttttaggtttttctttttaataaactttgattattgtttttgttgcttaataattattttcggtgctctgaaaattcaagtaaaatttgagggctcctttttgaccaaggagaatttaacaaaaattctccgggccacattcgaatttttcttgtacgtattttagtgtttgccaatttctttctgaattttaattaattctattattccttttcgaaaatgatttttatttcgggatgaatttatcaggacgtgacaaatccaccccccttacaagaatctcgtccccgagattcgaggaggctagcatgaagataggttgggcggtcttctcttcttgtctgacttcttccgtcgcatcttttataacaaacttgcctagaaaaacttctccactctaggctgcttgtctcgatcccttgttgcagatggaatcttctcctcacctgacttgtccctggttgaacctttagctgacttcgactg

SEQ ID NO: 29592 - DNA, 676 bp, Oryza sativa
gagagggagactttgggctgggcttggcccaaaggaggaagaggatttatttttaggtttttctttttaataaactttgataattgttttgttgcttaataattatttccggtgctctgaaaattcaagtaaaatttgagatctcctttttgaccaaggagaatttaacaaaaattctccgggccacattcgaatttttcttgtacgtattttagtgtttgccaatttctttccgaattttaattaattctattattccttttagaaaatgatttttatttcgggatgaatttatcaggacgtgacaaattcccacatcataatccttgatgagttctaaccatctcctttgccgaagattcagatccgattgggtgaagatgtatttcaagctcttatgatcagtatatatttcacagcgattcccaatgagatagtgccgccagatttttagagcatgaaccaccgcagctaactccaaatcatgggtagggtagttgccttcatgagcccgtagctggcgtgaggcataggccaccacatgaccattctgcatgagcacgcaccccaatccttggcgcgaagcgtcacaatacaccatgaaatccttgcgagtatccggcaagattaacactggtgaggaaaccagcttttctttgagggttttgaacgcctt

SEQ ID NO: 29593 - DNA, 1643 bp, Oryza sativa
aaagacaggctccgacacagttataccacacaccggcataaccatgccccacacaacccaacaagaagacaaacgagaaagaacacacgcgcaagcctactaactgctcgtctaccgctgcgacgggccaggacggaaggtgagcaacagcgcatcctccgtgctaccaacgctggaggcttccccctcctggggaaccacgggcgcgggctcggcacgaggggtctcgacgaagcaagtccacgccagggactgacgaacaagctcgggcctggaggtgctcttgcgggcggtgatcttctggctgcggcagacacggcgacgcttggggcggcagacctctccctgggcgatcttgagctgatgcagctgcgcctccactgcgtctaggtccttcttgagctgcagattctcttgacacagctccaggatcttcatgttgttctcgaccatcccacggcgcaccatctgatggaagtcgatacgagccgcgtcgtacgcctccaccatgcacgccaggtgcacgagggtagcgtcatcctccgagctagcatcccggaaggtggcgtagtcgtgggctcctccgcggcgaggggggtagcggtaggcgaagtgctgcaactcgtccgggtatcgctggtaaagagtgccgatggcgagaagagcggcgctctggcaagcgcggggaaagaatctccacccgcggtgactgccagcgaagtccgctcgggagagccagagaggatcactgcagtgacctcccaaccagcgtggggctttgcatcgtcaccctcctgctccggaagcggcctggcctggtagtccactccatgtggataccccaggaccacgcacatgccccgcagctccaagacgaagccagtcatgtccaaaccacgacggctgacgctaccggccatctacaaacaaaaacagaaagaaaaaaccacattttaaaggtcagattttggcgataaatgaagcagcaagacagagagagactagacagttttcacaaataacaaaggatttttatttttgaaaatattgctaaggcttgggatctacggctcgtcctagggtcaagggggctctgataccaacttgtcacgaccggaaataacccaacgggcgttccttatgtgcgtgcattaatccttgtcccaggaggcaaggtacaccaaaagttgatacaattcagagtttaacaagcggaagcgtaaatagttaatttattacatgggcagcgaaggcccagcacacgcaaagacaaacgagaaacagcggaagactagggcgacgaccacaggcacttgacggcaggcacgagctagacaccaaagccttcatcctccaggaactcctcttctgggtttgggaaaaattgagcaagactgagtacaaccaccgtactcaacaagacacacccacaagtgcagaataaatgcaagggagtacaaaggagttataatataaagggttagggttgcagtaaacagcatttaaagatatttagttgcccaaagctatttcttaaacacgattctagaactatacaatattatttatcaaggccctgaacccacaccaacctgccttaacccaggcctacgatgatttataccgaactgcaacccgaccct

SEQ ID NO: 29594 - DNA, 572 bp, Oryza sativa
tttattgcgaataattccgacaacctccggggaaaaaagggcatttacttattatagagatggtgcgatttgactcttttttttgtttttttagcccctacctacaccccggttttacgagaaagagtgggggttcgcggagagaaaaccaaattagtaagggaaacccacgcttagggaaggtgaggtgaactaacaactccttctgtcgtgtatcctcgactgacgcggcctcggatgcttcaattgtagattttagtattgagcgaaaggttacacctacaggataggttctgtattacaggctaatcctactctactagtactaataggtagcataggggataaaagcactacacctagaaataggaatcaacaagagaaaaactttgttagaaattaaccctttcctgattggtatcagggctgggaagaatggttgggataccaaacaaccatcaagtttgtcctttggatacccctataaccatcaaagatcgttgaagtggctaattcctctaaatagaaggcgttgagaacaaagaaattcttggagctatcgttttcctcta

SEQ ID NO: 29595 - DNA, 588 bp, Oryza sativa
ccggcaactggactggtgttatcagtagcagcacaggtcaggtcactggcctctccttgccaagtctccatatagccagaccaatcccagcctccgtttgtagcctcaagaatctgacctacatagacctctcttgcaacaatctcaccggtgatttccccacggtgctctacggttgctcagctttggagttccttgacctatccaacaatcaattatccggcagacttccggaccgcattgacaggctatcgttggggatgcaacacctcaacctgtccagcaatgctttcaccggcgatgtgccgtcggctattgcaaggttctcgaagctcaagtcattggtccttgacactaatagattcaatgggaattacccgggtgccgccattggaggccttgtggagcttgagacgctgacgttggcatccaacccattcgagccgggtccagtcccaaaggagtttggcaagctgacaaagctgaaaatgctgtggctgtcatggatgaaccttactgggaccatccctgatgatctgtcgtcattgatggagctcacattgttggacttgtcacaaaataagatgc

SEQ ID NO: 29596 - DNA, 4800 bp, Oryza sativa
  unsure (1)..(4800): unsure at all n locations
catctctcctcattaactttttagatacctcggtttttgttttacatgaaaatgcatttaacactataaaaattagatgagatggaacgttgagtgcccttagtttatctccacatatattgttaattgactttgtttcttttggtggaggtgaacttaatgattcgaaaaggatctcttagcatgaacacctaataaatcttatgcaaaatagggtagaacaaagggtggattattgaccagaattgttgatgccattaattgttcgtggttcaaaagcctctgttgatgtaggtgttagtgtagtgcagattcacctgcagcagaaaactcaacgcaaaaatggattagcactggtgcatgtggaccttaattaagatcgatggcgtatgtatatggttttgggggtggcttaaatcaaagtccaaacatctttttaattagtctcgagaatactgatcaatatatatacagaaaattccttaggttcctcggagttttcaattaaatttttcccctaaattttgtttcgttccttacgtgtctgagttcttgattattttggattccaatttccaatccgtgcattctaaacccttgaagcccagacaccttaaagcaccatatgaccgtcctatatacatctagctagtcgactgcgagttaaccgttagactcttttagaaataataattagcatacttcctctgttttatattataagactttctagcattgtctacattcatatagatgtttgctataaaagtcttataacctgatgaaacggagggagtagcttcaaggtgaaaaagattcgtttatgaaaagaaaaaaacaaatggagcagaccaaaaatttaatatttgtaaatatttttaaatgtttccactgaaatttaaacccaactgaaaaaaactttgccttttcagtttcttggtgaatcttttgtatgtgtttcatcaaattcgtaaaaaaaaactattttctatatttggggtcataattatgtccagtttgattttatcacaattctttttagattatgtttacaaagtagaaagcataagtacgtatgacatataagtcattttgaaaaaatctaacagtcaactaatagaatagatataaaggagataaaaaaaacgcaaggacatgtaaagataagataaaattcatgaatatagaagggattctttgagcaatttgtttctatattctttgtgcaagttccatttaaccatcattttcaccatagcatacatatgtgtctgtgctaatgatttaattattgttttgacgttgtaattaattaattaatatttaataggccggagcaatggtgacatgttgggagagaagatcaacataccacctgggccgctatgtgcaaagcgaccagacctctgcaagaactgctggtgttgtgaggtcagcgacgggcaatgctaccagagtctcgaggcctgccaggtcaactgcccattaccatcgccaccggccatttgatcagatctcgatcgatgcatcatatcgtttgtgtgataataagctgatcaatcaaccaataaagaaggcattaattaagtatcgtactctgttcgttttggaaataaaatgctgatgccatcaatggatgcatcatgcatgcatgaattaatgttctggaaaatatgtgataatcacatgtcgtgaaaacttgaaaacaaccttggataaaataaaaggacacctgatatttatccacgttatttagagtaaaaattttacttgcggatttaatcatgagtaaaaattttactattgatgacgtggataaatctcatacgttcatttttaaatccaacggtagctttcaggtttgtacgtgatatattttccttcttaataacgtttatagtgccagatatgggacaattgatcttttgtccatattttaaagtctaactataactatacacatttgaccctacatttttaactttgcttatttgatcttattttttttaaatcgaagttgttatttggccctattgtataggaatagatttagaagaaaataaaaaatgaatttagagagggaagaagacttaactgccccctgtgatttaccaaagcacatacgcgcggctagagttacatgggcgcggaggagaccaatctcatgagcacagagccaatctcggtcagcaaccaaattgtacacattctgatatgcaatacttatattattatagtctttagacttatctttgtcggctttagtttctgcttgttccttggatttacattcttcggaagtttcaataacggatccaccaatatctgatttagacagattattgtgtgctttggtgaagaattagtacttaactggcccccgcgtcatcctcccttacgggcgatacgggaggcagaaaccaccgccatcgtccgctccccctctttcctcctccgcctcgccgccgcccgagcggccgcaaggacggcggcggcagggcttcgtttctctcactcgccaacggtgggggaccgtgcgggatggtgaaggccgcccagatccgggccgtcgcagtcggatcttgcagggacacagccggcggcagggtagtgtgatgaggcggcggcggttggcaatggtggcggtggagtatgaaagtggtggcgatgaaggagaagagaggggatccgtcggcggcggggatgaagatggcggcgaggatggcgacagcgggcaggactcggtcacgccgaaagcggatcctgccccctgaggacggatctggtgcagggcgaggttgcagcggtagcggcgcggcggagctgcggcgacggtgtcggtcgcaacggcgcagacttcgtggtgacggtgacggtggcaacggcgtggagcttgtggcgatggtggcggcagcggttggacggcggcgacagcacggtggctggtcgacggaaacggcggctgccggcggctgtggcaacggggtgcactcacggtggtgatagcggcgcggagctcgtggcgacggtcgcggctggacggcggcgagggggctactgctagtcggcggcgaggtgttcgttggcagtagcggctgcggtggtggtgaccgtatctacggttggaggaggcatggcagtcttggacagctaaccgggggtgtggcagacgcccgcacctggccggcgtggaccgattgaggggcgagngcagctggtaaaaaaaaaaaaaaaaaggggcacaacccgatggcagtggaggccagtaaggcgcaanaggcgtggccgcgacgagaaggcccgcttggagcgaaaggcgttaccgatggcgggaggccgaactggcgcaagaggcgcgtccggtgttgaaggccggcgcagcacgatgaggtgcggccgccagtaaagaagccaaccacggtgcgatatgaagctcccgggggtgtggcgcggtcttgggtacacgaaggctggctgaagggggcaccggtgcagtggtcccacatgtcaccagaggttgagtggtggtaaagcattggtgcgacaaccatggacttgcaggtgatgagcggcgggtgaaaacccagcccggcctttgccggaccgacaacaatggttcattccccctcctaagggcgttgtcgtgccgtctcatcccttaagggtgtttgccgggcgaaagcccagtcttgactcttttgagtccttgacggacggcggcagtggttttccatcgcttctctccttgaagacatcgtttaggcatctccttgtcgaaaccactcgaacgattggtgcaagcacactctagatagagttaggctttgtgttggttgtaagggcgtttttgggcattttcgtctgtgttcctttgttggcctagcggcggtcggtcacgcttagcggcaaccggttcggtgctagtcttctctcggacctgtgtgttggtggtggtatattttttctctttttcctggttacgaccttctaggaatgtaatcttgtaatttttttttctgctttatcaatagaacttcgcatcgtctcgtgcgagtcgctcaaaaaaatatctactttagagaatcaggttcttaggccctgtttagtttgcgagacgaaaagttttggtgtgtcacatcggatatacgggaacacatttgaagtaataaacgtagactaattacaaaacatattacagattccgcttgtaaactgcatgacgaaattattaagcctaattaattcaccattagcaaatgtttattgtagcatcacattgtcaaatcatggagcaatgaggcttaaaagattcgtctcgcaatttatacgcaatctatgtaattagttttttatctatatttaataatccatgtatgcgtccaaacattcaatgtgatagagtgaaaagtttttgtttgggaactaaacagggccttattcatctgaaagcctgaaacttatgtcattatcagattgcaaatcataaaatggtactcacaccgtcccaaaatataagcatttttgaccttaaaacaatctttgagacgctactctgaccaataatatctataaaattaagtcgttttaaataaaaagatatatatattatgatattttgtttaatgataaatctagtagcatcaatttaaaatgatcttttttatttttttcactattaatggtcaaaattaaaattgtttgacttagcattattttaaaaatgcttatattttaggatgaagggagtagtattcttgaataccattatcaaatatcaattatttatgtggaaaaatatgt

SEQ ID NO: 29597 - DNA, 4066 bp, Oryza sativa
gctcggtaccctttaggaaatatacaaaaatcctccaaaccttatttgacttttaactttgcacattttaattgttggaggctttcacatggattttacttattctatgcataattttgaggatgtattttagagtcgttttgggacgcgacacacaaactaagccttacccactagacatgtggaagtacggtagtgctttgcaacagaggcccgatgaccggtccttatatggccgaggtgctactgtcaaaaccatgcaccccgagcccagcctaaaaccattttgagggttttgaatagagggggaggtgtgaatccaattccacaataatccaaccattccatagtgtccaggtgatatgaatattcccaaagtctagagttgtaaaaccacctaatgttgcataattaaccagcgaagcatctacctaaaatcatactagtggtaccatgagtagagtgtccactagttggtgttttgtttattctagggtgaacaaggtaataataacaataacaataataataaggtcataacaaaggtaaataggcatggctaaataaaacagtgataacgcgggaatttaaacaaagcggtaatgcaataatttaaatcaaaataattttataaactgggattcaatatgttcaaggatgatgtgacttgccttgctcgctttcccaaacgtcggcttcaacttccacgaagagcggatcttccgaagctgcagcgtctacacgaccaacggaaaagaaaaggcttttactctaataaactccatataacaagcagaaacaaagcacaaaaatgggttcttgacttcttaaggaaaaattagagacttgaacggtccaattccgagttcaaatggccaagttatggctatttgaagtttatatgctctttaaatgaatatttgcgaatttcttcatttaaattttaatttaaaaagggtttattgcgtgagccgaggggagggggcgcgcggaccgggtccacgggagtggggcccacgcggcagcctcacggtccacggtggaccgggcgcacccgggctcgcaccggccagcgccgtgggtcccacgcgtcagccgcacctaagggcgtgggcggctgacggccgggccccacgcagcagccactcggcacgcccgagggcagccaagccggcgcagccggcgggaggcggcgcccgcgcccctaacctatactaaagtcaacacatataatagattagctataaggttacctataattttcttcttctatctctatctctcactcatacatttaatctatttgtcttggagcttgtgttaagttagctcttgcatgagagccaacaccattctcttttgtttatctctttcctccacataagcttatagtaagcttatagatcactattatactggctctcatcctcgcgtgcatatgctattaattcctagtatgatgggattggattttaatttttctcatggctaattattctttcgggtatagacagtatatacgggtgacaacaagacgtccctgacgactttgacaatctcaagatatatctgccaagtgtctcagaggtgcttacagaggtagtgaaacggccgcggaggccaagacgacgaggacgacggcaataagggggtgccatttccgcccctgattatcggctccgctttgatcaattggcagaaaattcatcgatatgatgatgatgtgctggatcgagtagtgtacgtgcttcgatcgtcagggctgtatatatgccttgtatttatacacataaattagtaacgcgtgagatatatttttatacaactaggtgtctatatgtgtatggttcagtgaacaaatggagtgaagttttgtcaggaagcatcgatgtctattctccgtgatttcaggcgctggtgcatgacacattgacaccaattatttatatgtactccgtatataccggagtaggaattaagtggttcaaggtgtgctgcatatataaagaacgtagtatagatgctgtgagtattactatctttttgtgtggtcctggcgcacagaaagtataaaaaaacaatagggcggtaaaccgatattcaatatctattggtcactttggcttgctagtaatgatgtagtcttaaatggctcaagtattaactctctcttgcaggttattttcagggtaacgcatcgggctcgccagtggtctttgcttcttaaagaaggtgatgagaaagctttaaagattgggtgcctaaaattgaaagttatcattatggaattctactcaaaatctaggtggaattgaagaggaagattgaattgtgttagataaaatcttttgttgtgagacttgttctggatgtctttgtcgtccattcgccttctacggcatcgttgccttttgaacctgtttgtagcctaagtgcttgatgatgtaatactatggttgtgtacatccctcaggatatagaggccaggttttatttaatccattatctaaaaaaataaaacgggttacaaaatcaatatagtggtagctaaacacgaaagaatgccatagaatatccaaacttgatacgatattaaggcataatattttataagagagttagcctatatctttagggcactaattacggatgctcatccctacgacaatagcattactgatcttcaaatgacaatagcatcactattcatgaaactataatagcccatcctctacatccacagagtggatgtgctcatgtgcatagccaatttagctttcatatatcggacatgttagttgaattttacctacctagctagggtgtaaccgtgtagctagattatcatcccctaaatatatggtgctatcatgttcagctggtaaacgcagcaaaatgcaaaatctggatggctttcaatttagggttactttgatccatgccattgcaaatttggctattcagaaaaatatcattacaattcgtctattcgtaactgtgccactggaattttacaaaaatagaaccgcgtcacggcagtggcggctccttctttctcgcatttcttccgagagccaagctggcaagctcagagtagtcagcagcgagacccaagcacgcgagatctcgcgcgggagcggtagcggcgatgccaccggcggtcgtccatccatccatggccgccgcgagcttcgacagcttcggtggtggagcaagcgtcggtggatctggcacggcatggcgcgagcaggcctgacggtggcgacgaagacttaaagacggtggagaggtgtcctgccgcttgcggcgctcgcggcaggcggcgaggaggcatttggagaggcctgcggacgaggagagcagggagaacaccgccgtgagggacagcggccggcgtgaggtgctcaccgacctggaggccaaagcgggagccgaggtcgagcagcgatggggaagaagagggtcacgccgccggtcactctcgacgcgcagcctaggcttccgccggttccgcccgacgccactatcgtccgacaccgccaccaccggattcgtcggtcgtgcccaccgctggatttgccagtcgcgcctgatagagcgagctatggcaggtggctcggctgagggagtcccatgaagagctgcgggagcgtgtcgagctgcttgcccgcaccctgcaggagaccaacgccaggatccgcgccacgctctaggttgggttcgttcaccttgccagcaagctccctctccggcttgactccgggaagatgatgggagaaggaaggaagaagccggaaaaggaagagaatggatggaaaatgtgacggcagtggcacggttttaattttgtaaaattccagtggcatggttatgaataggcgaattataatagtatttttctgaatagccaaatttacagtagcatagatcaaattgacccttcaatttaaagctatgtctttataacctttattattaaaatgaaaaaaaaaccaaagatgtgggctaacggtagggctgtcaacgagacgagctcgaatgagctcagaatgtgctaataagactc

SEQ ID NO: 29598 - DNA, 2174 bp, Oryza sativa
aatcggaggtgcctaaaaggtttgcaacttcatcctccaatgtttttttttgtcatactacatttgcacctatgttttgcacactttttttgtctccaaaatttagttgtaagttgatgagagagaaaatgtgtgtggggaagaaagaatatatagaaatttagttcatttgctaaacaaggttttataaaatagttgagaaggaaaactctagtgaaagttaatattaaataatagaaaacaaactaaaataaaaattaaaagaagttaaacacattaaaattagtttaaaactttacaaatagtttttaagaattatttggtgtaatattttatgatttttgtatgaataaagatatcttataattattgtatgactgtcattattgtaagaataattatttgtgtgcggtttttttgactcatgtagatggatcggcaatggatgtacgctgatcggcggtccaaagagtttattgacggcgtgcactattttttgagagtggccgaagctaacaggcaaaggggttttatttgttgtccatgcaataagtgtaagaatcagaaggagtattctgcatccaggactattcatttccacttgtttgagtcggggttcatgccaagctataattgttggacatcccacggagagcaaggtgttgaaatggaagaagatgaagtggaagacgacaatattccggactttgctcagtatgttggatttgaaggaaatcaaacgggcgaggaggaaatagctgctgatggtaacgacgttgcggatgatcttggtcagatgttgcaggatgccagggaagactgcgaaagtgaaaaggaggcccataaattggacaagatgttggaggaccacagaacttcgttgtacccaggttgcgagcaggggcacaaaaagttggataccactctggagttgttgcaatggaaggcaaaaaatggggttagtgacaaggcatttggcgatttattgaaactcgtcaagaacattcttccggggggaaacaaattgcccgagacaacgtacgaggctaagaagatagtctgcccgttaggactggaagttcataagattcacgcatgtccgaacgattgtatcctatatcgcggtgaggagtatgagaacctagaagcatgccctgtttgcaaagcactacgatacaagattagacgggacgatccaggagaagttgacgggcagctaacaaagaagagaattcctgctaaggtgatgtggtattttcctataataccacggctaaggcgtttgttcaggaacaaggggaatgctagaatgttgcgatggcacgctgaagagcgtcaacaggacgggatgctgagacaccccgccgatggttcgcagtggcgaaacatcgacagaaaatttaaagaatttggaaaggacgcacgaaacatacggtttggtttgagtacggatggcatgaatccttttggagagatgagcagcggccatagcacttggcccgttatgatgtgtatctacaacctccccccctggctatgcatgaagaggaagtacataatgatgccgattattattcaaggccccaagcaacctttgtacgacatcgacccgtacctaagaccactgggcgaagatcttaaacagttgtggaagaaggaaggtgtccccgtgtgggacgaggacaaacaggaggagtttaacctacgagcgctgctgttcgtaaccattaacgattggcctgcacttagcaacctatccggacagtccaacaaggggtacaaggcttgcactcactgtatggatgaaacagaaagtacgtatcttaagcattgtaggaaggttgtatacatgggtcatcgtcgattccttgcaacaaaccacccggtacggaagaaaggcaagcacttcgaacataaagccgaccaccctacgaatcctaaacatcgcagcgggaaaacagtgtttgctatggttaaagatcttaaagtagtgttcggaaaggggcctggaagccagcatatagagagcgaagatggtcacgcggcgatgtggaaaaagaactctatattttgggagttaccatattgggaattcttggacgtacgccacgcaatcgacgtgatgcacctcactaagaacctttgcgtaaaccttcttggcttcctaggtgtat

SEQ ID NO: 29599 - DNA, 635 bp, Oryza sativa
atttcattacgtagcgatttcttgtttaattactaatcaatttcatacattcatatagtttattcgcatgagggataacctgaccacacacaaggaatttatcgcggcggttcaagaacaactcatgggattcatcaacgaagaaatccttgatcccaagggtgaattctactacgacggaaacacaattcaccggtccttagcttctgagctagcagcgagtactactacgtcgaaatcgtagctagctaggacatataatggattgtaattaatacatgactacatatgtttctatatgcatgtgtacacattttctataatgtaaatatattttgttcatatatatatctatatacaaatgcatttgcataacatatatatgcatggtttatatatatatatatatatatatatatatatatatatatatatatatatatatatatataaaccatgcagcaacaggggcatgcaaaaaaaaaaaaggtcagctctatctttagtcccggttggtaacaccaaccgggactaaagatcgatctttactcccggttatttcacccgggactaaagatagcgatctttagtcccggattggtactcccggtttggaaaccgggactaaagggggg

SEQ ID NO: 29600 - DNA, 2942 bp, Oryza sativa
tcatcaacctgctgcagggatgggacaatgccaccattgcaggtaaaaaggttttacttcccgtgtcgtgctagattggttatttggttgagagtttgtgagtactaggaaatatgaacagctgtcaattttttcttaattatcagtgttggtgtaccttctaaatttttcagattaatagactgctttagatcagatgtttgttgagtgctaattatggtcttctagtaacatgtctggtgttgttgtttgagtcctaagagcaattggcacaattgtttatcagcaaactggatcgcatgatattaatagtctcttaatttttctagatctgtactaatcttattgaagaaagagatgttctaatcataattgttagctattgtgttgtctgttgaatcattactgtttgccattctttgttctgaacacctgtaaagattgttctatccaacaagaaagtgtaaatgttaacaaggcacaattattaaacttcttcaggtgctgtactatacataaagaaggaattcaagctagaaagtgagcccactgtggaggggctaatcgtggccatgtcactgattggtgcaaccatcatcacaacattctcagggccggtatcagactggatcggccggcgccctatgctcattctctcttcaattctctacttcctcagcagcctcatcatgctatggtccccgaatgtctatgtgttactgctcgcacgccttatagatggattcggcatcggcttggctgtcacacttgtacctttgtacatctcagagacagctccttcagagatcaggggtttgctgaatacactgccacagttcagtgggtcaggagggatgttcttgtcctactgcatggtgtttgggatgtcactgttgccgtcacctgactggagaattatgcttggtgttctcgcaatcccttcgttgtttttcttcggattgacaatattctatctgccagaatcaccaagatggcttgtcagcaaagggcggatggctgaggcaaagaaggtattacaaaaattacgtgggagagaggatgtctcaggtatgttttgctgaaaattttgatgttcatttcacccatatttccagctgaccagtttaaaaacaatttctcccagattctaaactcatggttaatactagaaaacatgtgtggcattggtaactgttaatttcttgacacgaacttaacatatgcagaaatagtgtatttttgaaaaaaaagggtaaaagaaatcaaaatctattaagcgccttctatcggtgctcttttgaaaaagcttatgaatcttcaagtaaaaattactaagtacacataactacactaattcattttccatagaaggcagaacatggaatgtacaatcgttatctcaccaggtagagcccaaatgaggtgtcccaactttttgctgagtcctaatctggagaaaaataatcaggtgatctagatagacatcgccctcttttttttttttttggtaagggtaactctagaatttggggggtgggacctgctggtataatgtggatgtgggccgacccacgggtccttatctactctagtttaactaaatgaactatattttgcttttgagattttaaaagtgaaattaagtccatctagttgacctagagtgggtcaaggagccccacagcggccatgcctaacaacagtgattgttcagaaacgttagtaatgatttatccttaagttcatgctttcctcaaactaattacataatacatgtgtcaacatcaaaataggcatatgctgttagcaagtggtttctctattttctcctctacaacagactaaatggacagtattcggttggctgagagcataatattgctgttattttaagttcatcgaacttcgctgtaagctggttgtccccagctgcactatgctagctttctattaaagctgggcccttatatttctgttatttgtttctggcacaccattcatatttatattgctgctttattcatagttactacttatttatgccaatgtttataccaatgtccaaataaaatcatgtaatctacgtgaaaaaataaagttgcataatcattcaaattatcaaattgcgcaggagaaatggctcttcttgttgaaggtttggaggttggagctgacacttccattgaagagtacatcatcggaccggctatagagccagctgatgagcatgttgttgatggcgataaggaccaaataacactgtacgggcctgaagagggccaatcatggattgctcgaccttccaagggacccagcattcttggaagtgtgctttctcttacatctcgtcatggcagcatggtgaaccagagcgtgccacttatggatcctatagtcacgcttttcggcagtgtccatgagaacatgcttcatgctggaggaagcatgcggagtacattgtttcccaactttggtagtatgtttagtgtgacagatcagcaccccaaggttgatcaatgggatgaggagaaccttcatagggatgatgaggaatacgcgtctgatggtgctggaggtgactatgaagacaatgtccacagcccgttgctgtcccgacagaccacgagcgcagaagggaaggacattgcacaccatgctcatcgtggaagtgctctgagtatgagaagaagaagcctcttggaagagggtggcgaggcggtgagcagcactggcattggtgggggatggcagcttgcatggaaatggtcagagcgagaaggcgaggatggtaagaaggaaggaggatttaaaaggatctacttgcaccaagaggaagtgccaggatcaagaaggggctcagttatttcacttcctggtggaggggacgctcctgaaggcagcgaattcatacatgctgccgctttggtaagccaaccagcact

SEQ ID NO: 29601 - DNA, 602 bp, Oryza sativa
catgggattcggtccgatccccaacattctgtgtgcggagatcttccccactagggtccgcggcatctgcattgccatctgcgccctgacattctggattggtgatatcatagtcacctacagcctccctgtgatgctgaatgccatcggcctagcaggtgtctttggtatatacgcagttgtttgctcgattgccttcgtgttcgtcttcctcaaggtccccgagacgaagggcatgccgctcgaagtcatcaccgagttcttcgctgttggtgcaaagcaaatgcaggctacaaaggcctaattcttcagcaactctgctttcaatctttatataacactgtaaattggaatctgcaagatcacaccatgaggctggaggagctttttgagttgtaaatgagagaagaggattgctattcatgctccttatgcaagggaaaagagttcattactggcacagggcagctgtaaagtaggaaattttcatgttattcatgtccacttcttgtttatttagtactgtgttaggtaatgttgttattcatcagtagttgctgctagggatgttcaaaaataagcttgctaatctgattttgagc

SEQ ID NO: 29602 - DNA, 1523 bp, Oryza sativa
ctacagccaactttgacagaaaagttcagtatactgtcgatagcatactgtcgttgtaagcgtcaatagcttactggtttggggctttcccccaatccatctcgacagcatactgtcgttgtaagcttcaaaatgtaatgaaccccctcttctttcttaatgaaattggttgactgtatctttcggccgacccggcaaaagaaaagttcagtatatggtatccctgtttgattcatgtccacttattcagttcaggaggcaagctatctgtataactactgctgacagattaagatccattctaccatacatcattgccttaaaccatacttcacctgaagatctagctggggcaggatctcttggtttaggtcgcaagcttgatgactggccagctttcggcaatgtaagcttctggacacggttcaccgccctagtcctgcatgagaaatagcaagttacagataaccagtggaaataaatttcacattatacaaaacaagtttttttagataatgacattatacgaaacaagtatgcaataaagatgtcaaattcagaaaaaaaaaagagttagctagtataagaacaagattggaattactcacaaccgctctttcgcagcagtgttggatgttttctcttgctcttgatctgctacattgcttactgaactatcagcttctgcacccatggaaataccatccgaagcatcgcttaaccttccatccgagtcgacatccgcaaggccagaaatctcaggatcaacggagagcatggacccagcttcagattgcctgtcactggtgtcggagaagttatcaagatcagaagctgccccactgccaacacttgtgcccttccctagggatgtaatgcccggggaagaggacgaatgcttcaatacggaatcagcttgtctcgttggcttcaatctggtgctactattgagtaattgaagcctgtcgatttcctcatccttctttgaaatggtatctttcagaagtgaaagctgcaaggagaacattacaaaacaatagatgtaacagtatttttcatggtgaattactattccattgcttacatcacataatgttttgacattcccgaacaatattcttaaccttttgccatttcaatactgagaccattatgtcaagagaagtcagaagtgacttgatgattattgagaaatttggttacctgatccattaattctttgacatcttttccctccttcccctccttattgctcctagcaacaccaagttccaccccagacactcgttccgcaaatttcagagtacttaaagtctctgtgtaagatgaaacatctgggttgacctgcacaaacattagggtttttgcatgcccacctgcatatcaaactatgcatgtcaatacaactccgtgtatggcatgtaaaatagttctcaagtgaagcagaatacccagtgaagtctgcaggacttgtgtgagcttgctatttctgtatggtacatgagcattcttttgtgataaag

SEQ ID NO: 29603 - DNA, 1557 bp, Oryza sativa
acatgaatggtcacaacgctgcaaaaaaaatatgatctctagtaagaagggttagtcctacgacaaaaaaagaaaagagaaaaggcaagtaaattacctgtgagacctgctactcctctcattcaaagctgttgcactcatggctctattgtcatgccctgtttgcattagctcgattacatgagaagttgaggtgacaggacacattgttgcatcaggaacagcaagtccattgggttggatggtgttctggatccctagtgtgttggaagttaagaaaaaggaggatatttcttcacatcaattcagtctgcaaaaatcaatgtatggaacttctcaagcaagatgatcgcactagaatctgatgaaggatggccatcgtgtgtgtacacaataaaaaactgcaaattttattgcagatttaaattctatttggtgaaaggctacactaatgcaagtctgggggaaaagaatatttcttctgcacgccaccactgccaaggagatcacggatttgctcattgtagatctcaatcatctgaacaccaagttcgtaagtgattgtgtctctacggtcatgagaaatattgaaaaggtcatttaatgccctataattgactccccattccttctcagttgccttttcaggtcccatctgagaaattgatagaaacagatcgttgtaaacacatagtgactgtagagaaatcttctggcacgcaaactgaaataaacagaccaaatgtttttgccctgagcttcagcgtaccatagtgtatgtttttcctgatccagtttgcccatatgcgaaaatgcagacattgtagccatcaagaactgatctaattagtggctgtatgtccttgaagacagcatctattaacaaaataagagggataagagaattgatgtatatgacatacactattatgggatataattttttgaaggatttgttgaactaatttgatgcaatagcttcaatggaaacccaacagaagattaagttgtactgaccacttatcatgtaccttgtgtagtgatagggccaaaaactttgttaaatgtgaaatttttgcccccttccttcccttgttttgtagggtttgatagaactagttcaccattgtccccaatatattcaactgaactggacttgtcatcctccccaggtcgaaaaggtcttatccgacaatatactctgatgtttcctgctcagaaatactatgccaaggtgatatcttttgacctagataaccagacaaaatggactgatgattgtagttcacatgtaccttttagttcctggatctcattgaacaattttctgttttctgcaagagctccatgatacttttctgcagtatttgttaccaccttaaggctttttcctgttgaagattgcaactggtaatgttagttgcaatccatcgatgagaaaagaagtatttgtatatgaaacccacaagtaatcacaaggttaattcttaccaaggccagctagttcttcagaccacttgttttgacaatttaagatttcatgcctaacggaaaggg

SEQ ID NO: 29604 - DNA, 1509 bp, Oryza sativa
ctcaactactaattttaataatacaaagaacatttcagtaattatttaaataataaattaatcattaaatgatcttgttttaatgttgttaaatacttagagtgtccaagtatgttcaagatttttcttgaaattatttgagcattggaaatatttttaacaattcaaagattatttcattggttaatttatttggagaagtaattaaaaatcctctctctttcttgggcctaatccacgaagtttacagcgccgaaagtccgtttcatgtccctacttcttctcctctcgggccagcctttttccccaaagtccacaccacgtcccagtcgctacagtgctgtcttcaacctctggccggagactgagcccgacccggcgccgctttctcctccaaatcctggctcccctttcgatcttttccaaaattggttaaggggaaatatttctcttatcctcctcttccgttttcctcaagaatcggatcttatcttgaagaaatcaacgcggaattgagctcgattcgagcttatctgtccaaaccgaatcctagtttttgtggacaaagcggaaggggacggtgacggacgaaaaaacgcgggtcaaaggatgcgacgagaggaataatatgaatcttttaattagttaagattaaaattgagtttaagatgtaaacgtagtgggggctttgtgtaaaacttcggatcgctaccaaatgtatcgactcgaatcaagggggctttgtgaaaatcgtatcagaagagaaatcgtggccgtcggatcatatgcgttgcgaagatcccccctcttccgcgtcagcgccggcgccgcctccgcgccgcgcacccctgaaacctccccgggggacgccggcgcctctcctccttccccccacccctagccacggattccatcgccgcggaggacgaggcgcgctcatcgatccgccgctccccgtcgacgacgaagcgacagcatcaagggttctaaccacctcttcccccgccgtcgccgtgagcgcctttttctcttcctccttctccggaagaattgggcgggggatttcgctctcatcacgaaggtatcgaaatttagtttactaccgcctgctgtctttgcttattaattgccttgataattctgaatattctgatatatatattccctggattcccaatatacagtagtaagctttagctgaagttttcctgtctccaatgcacaacattttcaccaaatttttttagctaaatgtatatgttatgcatggttgtatctggtttaatgaacatgtgttggcagcagcagaacaagcacagatatggtagtttaaggagtcctctaaaaataaaggaaaaaacaacatcctaggaagtaactatcattatacacagtatggtagtttagaggtgtaaagtttctggttttattgtttgaaaatgaaatctaaatactatcgataccactggaactggaacatcatatgttaactatttggaacatcgatta

SEQ ID NO: 29605 - DNA, 2456 bp, Oryza sativa
ttatactctgatcagaggtgtacatctttacccacaagacacatcttcctcacgtgtaaccacgtgccacataccaccacggtatacggacggaagacgtgacatagtttccaacccatcctagccacagacaagagtaccgacccaaccccacctacggccgggacctccgggacaggtaggcaggactgagcccctagcagcaggacaccagccctgtgccatgacatctcgactaccgggccgcagctcgtgtagccttcatttgtcctagagatgtccatcgacccccgacttcgtccatctccatccgtgtacttttgtttataaccagactgagccacaatgtcacgaccggaaataacccaacgggcgtaccttacgtgcgtgcattaatccttgtcccaggaggcaaggtacaccaaaagttgatacaattcagagtttaacaagcggaagcgtaaatagttaatttattacatgggcagcgaaggcccagcacacacaaagacaaacgagaaacagcggaagactagggcgacgaccacaggcacttgacggcaggcacgagctagacaccaaagccttcatcctccaggaactcctcttctgggtttgggaaaaattgagcaagactgagtacaaccaccgtactcaacaagacacacccacaagtgcagaataaatgcaagggagtacaaaggagttatactataaagggttaggggtgcagtagacagcatttaaagacattagttgctcagggctattttgcaaacacgattctagtactatacaatatttttttatcaaggccgtgaacccacacgaacctgccttaacccaacgcctacgatgattcagaccgaactggcaacccgaccctgggtcccagctcgtcccaagccaacccaggccaaccattccacattttagttgttaagcaggttttaagaattaaaacactaacttgggtacattgctcggcttgcccataaccgagggcgcggctattcgaatagattatactctgatcagaggtgtacatctttacccacaagacacatcttcctcacgtgtaaccacgtgccacataccagcacggtatacagacgaaagacgtgacatagtttccaacccatcctagccatagacaagagtaccgacccaatcccacctacggccggaacccccgggacaggcaggcaggactgagcccctagcagcaggacaccggccctgtgccatgacatctcaactaccgggccgcagctcgtgtagccttcatttgtcctagagatgtccatcgacccccgacttcttccatctccatccgtgtacttttgtttatgactagactgagccacaaactaagccttacccactagacatgtggaagtacggtagtgctttgcaacagaggcccgaagaccggtccttatatggccgaggtgctactgtcaaaaccatgcaccccgagcccagcctaaaaccatttttggggattttgaatagaaggagcggtgtgaagccaattccacaataaccaaaccattccatggtgtccaggtgatatgaatattcccaaagtctagagttgtaaaaccgcctaatgttacctaattaaaagcgaagcatctacctaaaatcatactagtgataccatgagtagagtgtccactagttggggttttgtttattctagggtgaacaaggaaataataacaataacaataataataaggtcataacaaaggtaaataggcatggctaagtaaaacagtgatgacgcgggaatttaaataaagcgataatgcaataagttaaatcaacataattttacaaactgggattcaatatgttcaaagatgatgtgacttgccttgctcgctttcccaaacgtcggcttcaacctccacgaagagcggatcttccgaagctgcagcgtctacacgacaacggaaaagaaacggcttttactctactaaactccatataacaagcagaaacaaagcacaaaaatgggttcttggcttcttaaggaaaaattagagacttgaacggtccaattccgagttcaaatggccaagttatggccatttgaagtttatatgctctttaaatggatatttacgaatttcttcatttaaattttaatttaaaaacatatttattgcgtcagccgggagagaggagcgcgcggaccggttccacgggagtggggcccacgcggcagcctctcggtccacggtggaccgggtgcacgcggcttacgccggccggcgccgtgggtcccacgcgtcagccgcacccgagggcgcgggcggctgacggccgggccccacatggcagccgcggggcgcgcccgaaggcggcctcgccggcacagccgacgggaggcgacgcgcccgcgcccctatggtcgccggcggcggccataggcacggcggagcggc

SEQ ID NO: 29606 - DNA, 920 bp, Oryza sativa
aatggttctgactttagcttcagcttctctcaagatatcagtcccgaacacttggctttccccaacttgatcccacaaaagcggtgtccggcatttgcgcccatacaacgcttcataaggtgccatttgaggctggcttgatagctgttattgtagagaactcggcataggggagactcttatcccaggtcttcccgaaatccaggacacatgcgcgaagcatatcttctaggatctgatttagacgctcggtctgcccatctgtctgcgggtggtatgcagtgctgaagtttagtcgggtacccagctcctcttggagcttcttccaaaagtgagaggtgaattggcttcccctatcagatacgattttcttgggaacgccatggagactcacgatcctagcgaagtagagctcggctagtttgttccctccataggtggtcttcacaggaatgaatcgagctaccttggttaatcgatccaccactacccatatagaatcatatccaccttgggtctttggaagtccggtgatgaaatccatcccaatttcatcccatttccattcatgtacttggagaggttggagaagtccgaccggtcgttggtgctctgccttgacacgctggcacacatcacaaagggccacgaactctgcaatttcccgcttcatactaacccaccagtatttctccttcaagtctaagtacatcttcgtactgccagggtggatggaataaggactttcgtgggcttcctgaagtatcagctgtttaagttctctgttatctggaacgcatactcgatttccgttccatagggttccgtgttcatcctctgtgaaaccagcggttttaccctgtttcatattcttgaggagtccatgtatgtccggatcgttcttctgagcctcgcggatt

SEQ ID NO: 29607 - DNA, 3303 bp, Oryza sativa
cctgatctgaatgtagactactacaatgtgtatgttttaatttgaacatcctttttccagagaaatagtttctgatgcataggtgatttaggatttgtacaaaaaacggaaattgaaaggtaataactatagctagtcagatactctattttgtagtttgatgtagttattctttgcaaaataatatatgataccatttctgaacttttcaaccttgaaaaatagtaactatagctagtcagatactctagttttagtttgctgtagttattatttgcaaaataatacaggagatcatttctgaacctttttcaacctgacaacctcgaaatgcagatctcctagtactcctgttgttggttggcctccggttcgaacattcagaagaaatctggctacatccagcaaagcatctcttgaactgcagaatggaaagaaggctgcaaaagcagaagagatcaagagagctccattcataaagataaacatggatggtgtccctattggtagaaagatcgatctgaatgcttttgatagctatgagaagctttctttagcggttgacaagctattccgaggccttcttgcaggtatatgaacctcaactctgttgttttgtaacacaattaaatcattcaattgcgactgcagtttatgatagagtatctgaagagttttccactgatactgaaccatggcactgcataaattatttccttattgttctttcgaaagttcgcaaattatttctttgttattttcagtattttgaaatttgaatggctgagttatcggattagtatctgatccaatgtgttcaatttccgtcgttgtatttaagcccaaagagaccccctcactgctggagcaaaggactgccagcaggaagatgtggcaatatctggcttgctagatggaactggggagtacactttggtttatgaggattatgaaggcgacaaggtgcttgttggaaatgtgccatgggggtgagtttttcgttttaccgttgcattttcagagagtagtaaacaaagttactacttttattggatgctgattatgcaaacagcaatgcttgaaaatgatatgcagtctattccctgtgttttttttaaaaaatttattgattatcaacctgggagaaaataattttaccatcaaactggaccatatgcctcctaactgatagtctgatactgcaattcatgcagaatgtttgtttcttcagttaaaagactgagagtactaaagacatctgacctctcttcatctgtcagtacctctttccaccttagttctattacatcaaactctgttatctccgcattattttgaaatttgttcacgccatgtaatccatgcagctaataacctctggacggaaaagaacagctgctgagtgttgaccttcttttttggagctgctttgacacattcagtgacctgctgtgaagaagaatatgatcttctgagcttgtatcatcgtctctttctctcaatgtcttgctgtgctgatcttttggggttttcctgttcctacttaaccaacttgcttccttctgtttaagacacttgtgtgaagtgagtacaatttgacatggccatcatgtaaatgttcagctaaatgctctacatttatgcagtttattctctggcagatgatatttggaatgttgctttgttgcatgagacccatttaatagttttgttctctgttactggacatgaaattgttgttgctaggaatcaatctatctatctattatatactaaaagtccattaaactttctataaacgttcctaagccgtcacgtggcactcctacaaatgttcctacgtcaccacatggcacagtctaatcttagcgtcgattttcacttaaattggtggacccattattttacactattagatcaaatctattattaaaaaataataacttccgcatgtttataatgtaccagcgctactactgtccgtacgtatgagtttgtacgttacaaatcctactgctgttctctccgtacgtatacaaacgtacatgattgtgaaaacaaaacgataaagtttcctgatcttcgctggaagaaaacaaatacatatacgtatacataagaaagacagaaaaaaacatacatacataataatcaacggtctttttaaaatatgattttctactatataaggataaaatatattacttcacaaatatcaatatgtttagttaaattaagatctataataaatattcaatcaatgttcttttaaaccatcttctaaacctatctatcaaaaaaattattagatctatttttttaaataaaatcttaagttaccttggggcacgtcctataaaaaaggggataatccttggaaattcttagaaaaaataaagcaccttgtcatcagctttcacttaaatcatttagaaaaattagaaaaataaaatctctacctcctcactctcacatctacacaacagtgttgtcccatccctattgttttatctatttttctaaataatgtttgatgtgtttttaaaaataaagtacaaacgcgggtgttcacaacgcacacactcagctctatgaactcacgcatgcacatacccctatgagtacttccgagagactaggctgacatattttgatattgatgaagtcactgtgtacttttcgctgtcgacgggtatgtcacctactactgaaagaatttgtcctagtcctttcgagagactaggctgacatattttgagattgataaagtcactatgcacttctcgctgtcaacgggtacgtcacctactacttaaaagaatttgtccaagtctaggacatgaacccaagtgggcaaattccatcacaatgaacctaaccagttgagctacgtttacttcgcaataatgttggatattaaaacaaccataatttttaagctacatttctggaatactcctatgccttttaaactggtggaatcactatttagaatagttagatctatcttatataagaaaaaacatatgtgtatacatggtacatcacatttcaaaaatattattattcaattatatttcgctttcatgttagcttgcgtagaacttctgacccactccacataaaatgttcataaatggatctcaaattacataaatcatattaggctatataaatcatatatttagtggagcttcatgtcccacccaattaatcctcgaataaaccatgataatatatatgtaattaaaaaaagtaaaataccttagttttattttacacttactttttattgacatgttt

SEQ ID NO: 29608 - DNA, 572 bp, Oryza sativa
ccgtattcgccgttgcaggtatttcagctcaagcaaggaggatatgctgatcagctcggtggcaaatattcagacttgctgaaatccactagcttggatgtaagtgcatctaattatccctactagtaatgagataccatgttttactttagaaaagtttttacattgtcacccaatgctggcttgttgcagaatgcacctacgcagtcacttctgggtgttttcaacagcatccttgatgagagcattgagaggaagaatggacaaataccttatgtaggcttctcagaaaagaaatgcagttagtttgttctttccaaatttaagtgatttcatgtttttaacaccttcccttgtacaaatgaatgtaaatgtttcattgtagcgcattgcttgcttgctgaggaaggtcatactagagattgagaggcgcatttccacccaggctgggcatatacggaacgtaagataaatattttctatatgtgttcttataccagattagtcctttgtgatttcttacttgtctgcagcaaaataacctgattaaagctcgcgaagagaagtatcag

SEQ ID NO: 29609 - DNA, 2511 bp, Oryza sativa
gagtcgtggcccttaagaaaagagaattccgagagttgaagcaaggcaaccgctccgtgacggagtatttgcatgagttcaacaacctggcccgttacgccccggaggatgtgcgggaagatgaggagaagcaagagaagttcttggcaggaatggaccctgagctgtccgtccgtctagtctctggggactatccggatttccaacgtctggtggacaagagcatccgcttggaagccaagcacaaggaactggagtcgcacaagcgccgcttggcgaatttccgcaatcaacagggtgctaaccaaagggtccgctacaccaatccctatcagggggatcctcctcgcagcagcaacaacagcagcagcaacctcgctccgcgcctcgacctcaattcgtggtgcgcgtcccacagccgcagcagcagcagaatcaacaagggactcgtgcgccccgtcctcctacaccaactgtgcagcctggtcaaggccgcaaggacgctcaaggtccgcagcgtctgtgcttcaactgcttcgagcccgggcactttgcggataaatgcccaaagccgaggcgtcagcaaggccaagcgcctccccgctccaacaacggtgggaaggatgtcattcggggtcgggtgaaccacgtgacggccgaggacgtgctgacaactccagacgtcatcgttggtacgttcctcattcattccatccctgccaccattctgttcgactctggagcttcccactcgtttatatctgtgccattcgtggggagaaatcagttgggggtagaaaggcttaggaaccctctgctcatcaccacccctggaggggttatgacagcaaagtattatagccctgccgtccccatagaaattcaggggattccttttccctcggatctgattctgctagacaccaagaacttggatgtgatccttgggatgaattggttggctcaattccaaggagtagtggattgtgcgagacgcactgtcactctgtaccgagggccggaacaaccggttgttttctttgcacccccaacctctgtcagtagttcagaactccatcagataggactgttagaaatccccatcgtcagagagttcggagacgtgtttccgaaagaactacccggcatgccgcccaaacgagagattgagttccggatagatcttgctccaggaaccactcctctgtacaagcgaccctaccgtatggcagcaaatgaactggccgaagtcaagaaacagttggaagagttgaaagaaaaggggtatatacgtccgagtacttccccctggggtgctcctgtgatttttgtggagaagaaagacaagacgaagaggatgtgcgttgactacagagctctcaatgaagtcaccatcaaaaacaagtaccctcttccccggatcgatgatctgttcgatcagcttaaaggtgccactgtattctccaagatcgatcttcgttccggatatcaccaattacgtattcgtgatgaagatattccgaagaccgcattcaccacgcgatacggactgtatgaattcacggtgatgtcattcggtttaaccaatgctcctgccttcttcatgaacttaatgaacaaagtgttcatggaatacttggataagtttgttgtggttttcattgatgacattctgatatactcacaatccgaggaagaccatcagcaccatctccgtctggtattgggaaagttgcgggaacatcaattgtatgccaaacttagcaagtgtgagttctggttgtccgaagtcaaattcttagggcacgtgatatctgctaaaggagttgctgtggaccccgaaacagtgaccgccgtcactgattggaagcaacccaagacagtcactcaagtccgcagtttcttaggtttggcaggatactgccggaggttcatcgagaacttctccaaaatcgctcgacccatgacacagttgttgaagaaagaagagaaatttgtgtggagcccgcaatgcgagaaggcgttcaaacttctcaaagaaaagctggttgtctcgccagtgttaatcttgccggatactcgcaaggatttcatggtgtattgtgacgcttcgcgccaaggattggggtgcgtgctcatgcaggatggtcatgtggtggtgtatgcctcacgccagctacggcctcatgaaggcaactaccctacccatgatttggagttagctgcggtggttcatgctctaaaaatctggcggcactatctcattgggaatcgctgtgaaatatatactgatcataagagtttgaaatacatcttcactcagtcggacctgaatcttcggcaaaggagatggttagaactcatcaaggattatgatgtgggaattcactgtcatcctggtaaggccaacgtggtcgccgacgctctaagtcgaaaaagccattgcaacactcttaacgtccgtggcattccacccgaacttagtcaacagatggaagccctgaacctaag

SEQ ID NO: 29610 - DNA, 1810 bp, Oryza sativa
  unsure (1)..(1810): unsure at all n locations
atgttgcagaaaaattgtgagaaacatcaatcatatgatttttcctttgtttcaaatgggttctaaaatctatatttttgaacatgttaatttattcgaaattttcaagcactcatctctacaagtaaacataacttaaaacaatcacgttctgaaacaaaatttatttttacttctatgccttcggcaattggacacaaatatggtggacacacttttacccttacacaacccgtttgttccctgcacactctacagtagaagtacataatttacagcgaggtgtcacatcggttttaaaccggatgcgctatggcagcagcgacttgtgttggttccccttgccctaccccttctcttccctaaggccttatttggtttggagggaattaaagaggattgaaagagattgagggagaataatttcacaccacaataggtgtgaaataaatcccctctaattcctcccttatggagattatccgaacaaagcctaaagcagcggcggcaagtacccccgtcttgccgtctattccatctccagcggctctccaccaccaggtccacaaccgatcacggtgtcctaatcataagctctaatcatggccatgactccaaactcattgatcttcctttttccccttcccctcaacctcctcccataaccccctttttcactacgctgtacagtagaagtagaaaacgttacatccaactacataatttacagcgactcgtgtagttgccacgtcagcttaaactggatgcgccacgaaactgccgctttcctcgtcgccggggccggcgccccacattttcccggccgtcgttcccgccgacgagctcttccccttcccgtctttcttccccttcgataacgacggtgcgccgccggagtcatcgcggcaggcggccgccacgctggacgtacggtcgtactggaccagctgctcgagcacctccttcatcgtcggccgcgacgccgggtcgtcgccggtgcaaatcatgccgagcaggaacaccggcacggcgtcctccaggaacgccggcctgtcctggatggcctcgtcgacgacgtcgggcagcttcggcggccgggccctttggggttaaccccccgggggcccccgggcacgcccacttggcaggcaccagtccgggccggcggtgttcgccacccagccccgtcgtcagctccagcagcacgacgccgaacgcgtacacgtccaccttctcgttcaccttcgctctgcacccgtactctgcgaccgcgagacagacatatcgtcgaacacttgactctcatgagctagctcgatcgatggcgagcaaatcaaatcaaattaacgaacaacaatcttgtgatgaacctcacctggagccatgtagccgaaggtgccaccgatggcggagatggaattcggctcgccggacttggcgaggatcctggcgaggccgaagtcggcgatcttggcgcggaaggccgggtcgagcangatgttgctggacttgacgtcgcggtgcatgatcggctgcgcgcactcgtggtgcatgtagctgagccccctcgccgcgtcgatggcgatgcagagccgcgtcggccactggagcggcgccgtcggcgcgccgccgtcgtcgcggcggtgcagccaccggtcgaggctgccgttctccatgtactcgtagacgagcagctttgtgtcgtcgccggagatgcagcagaggaggtcgatgatgttgatgtggcttaccctccccgaggatcctcaccttcggcgcgaaactcttggtngctcttcgcgtccgactt

SEQ ID NO: 29611 - DNA, 944 bp, Oryza sativa
ccatggttgccgaggaagctacgatcgtaggcgccgttttgcagcgtctccgggacctcgccggagagctggttagaagaaaggttgagaaagttgagatggagattgctgaaatcttgaggtatgtcgccggtgagcccgttgtcggaaagaggtcaagaatgtagaggcccatccacccgactgcggcagggatctcaccggaaatctggtttctgctaaggttgagggaggtcagacttgtcaatgatttgatagacggcggaatcgagccggataactggttgccggcgaggttcaactcggtgaggttggcaagcctagacatgtcagctggcagttcaccggagaactggttgttctccgccgtgaaactcttcagaccgacggcggtcgacgggagggcaccggagaagcgattgttctccatctcaatcctcgagatgttaaatgatatctcactgggtagagtgccggtgaagttgttgttgtaaatcatgacattggtgagcaactcgaatgaccatatcttcttgggaaagtccccaacaaagtggttgttgtatgccatgatgttgttgatggttttgcaatccccaaggttcgtcgggaacacgccggagaagctattgttgaacaccacaatgtcaaagagcttcttattgaagcaaagtgtatccggtagctcaccagagaggttgttgttggacacctcaaaattccccaattctgaatgttttccaagctccgcgggtaggggcccagagagcttgttattgaagagacggatgtcggtgaggtccggcatcataccaacaccagccgggatgggtccagtgagattgttgtagtacaaatatagtaatctcaacttcttcaagtttgcaatgtcctctggtattgatccagagaacttgttcatggacaggtcaagctcctgcagg

SEQ ID NO: 29612 - DNA, 11031 bp, Oryza sativa
tgcattcatgttagcagtagaagaaacagcctgaatcaaagcggtagcagaagttctcctagaaaatgcaccagcaccaagtccagatcctgcactggcaccagcatcaccaagtccagaacctggactggcactagcaccaaatccagagacctggactggcaccagcaccaaatccagaacttggactggcactagcaccagcattaccagcaccaagtccagcaccaagactggaaccacaagcagcagcaccaaaaattttcccccaagctgtctttttcttaccagaagaagagcttggggttgccctttgtaatgtcacagcaccaaatttactttcatacttagcatacatgtcagacaatgcagccctaacctcatttaaatatgcagagtaatcaccactaataagttgtcccataatttggagaacattgctaaaacccctgatcttggccctaggatccaagataaaagcaaatgaatacagaaatggaatctcagaccagtatgacaagaacttatttttcatgggaacaacaacatttctaaggttccaatcattctcataagtatttagatgtccagcaatctcaagaatgtgatgcataattaatggagatgttggataataaacaccagacaaaataacagttgaatcataaaattgttcaaggaataaaagaacagtttcagcaattgtccagtgtaaatcagtcagtaatggctgaccatcagccattggatggtgagatgcaataaacactgaaaaaatgaccctatgtggcaagagatgcttaagcattagataagttgcattccatctaacatccatgtccaaaccaaatttacgaggacgaatacctttagcaatgcagaagtttttgtataaagcaatgcgctgattagatgcatttataaatgaaatagcagttctaaaatcttgaagcatgggtttgaagatttctagaccagccttaacaattaaattgatgatatgacatgcacaacgctgatgcaaatataaatcaccaatataaccagacagagcaggtttaagactatccattgcttttgaattagcagaggcattgtccagggtaatagagaagatcttattagtcaaaccatattcttgaacaacagaaagcacacgttcagaaatattttcagcattgtgtgacacatcaattagcaccagtcccaaaatcctcttctctaattgccaattagaattaacaaaatgggcaacaacactcaaataatcctccttagcattaccagaccatatatcagatgtcaaagcaacagagctaacagacttcaaagtatcaataagcatagcacgtctcttgtcgaagaccttaaaaacgtccctactgatagtttgcctagagacaacactaaatctagggttgtgagcattctgaatatactcctcaaaagcagcagattgaccaaaagtaagtggaagatcctctctagcaatcaacctaaccaactcagttctagccacatccggtttatattcccattgactaacagaaccatcagcattaaacctaagcatggactgagacaaagcaccaacatttctaggtttgcacgatttaatatgcctaagcaaatgtccagtaccaccagttgaacgagcagacaatgttttatgacagtaattgcatttagcagaaacgcgaacctgagcgccattgcgctcttcaaagagttcttcaaagtcgtcccatacctcagacctggacctcttgttgctagcacttgagccagacggagcaccgttgccatcggcaccggtaccatcatcgtgtggctccggctgcgacagatctctcagaggtgaagcagtgttgccaaacacctcgatgcgttcctcctccaagtcatcttcgtcatcaccctgcgtccccatcaccctcgcctcgtagttgcatgaggttggatcaccatccatcgcaggcactccggttcctcaacggtggctgccgcctgccgctcagcgacctgcaagaacaaatgaaacaacgacgagagcagagagtagttacggatctgatcgaatagagaaaataaactaaaaaaaaagcttgtacctgcgcatccggagcaccggagttgccgttgatgatagagatccacagatctacgagaagacaagaggagagactagatttggggggtggatgagtggatctgagtatctgacgaagagaaacgatgagggttgcaaaaaaaagtacagaatggagaggaaatcgacaatgcgaccgtcgatccggtgaccggagaggcggagacgaagagctcacggtcacagatcagccaaagagatgaaagaaaaggatagagaagagacgacccttaaagcccccagcgggagcccgctgacccttggtgctagatccggcgaggcattcataggagacgcctacaaagagggatggaggcgtggagggctgaggggtcggagcctgtaggtggaggcggagcggccgagcggctgatcggtcgagactccagactgatgtggctagggttagggtttgtcggtttgatgcggtttggggtatttatacccacccggcataacaggcctcggtcgggccgtgcctgccgttggaccgtgccgggccgtgccggcccaccgtgccgacctctttcgtgccgggccgtgccggcccaccgtgccgagggagcggcccaagcacggcccggctgttgggccgggccggcacgggcacgaccccagtcgggccgtgccgtgcctgggccgggccaatttgttgtgccttgggccgggccgtcgggccccgggccttatggccatctataagttcgaccacagaaccagattattcatgcatgacttgggaatgaaacaacgtgtataagtggtctagctggcttaattgttgagcatgtaatgaagcaagtagggagcctagtaaaacttacacttgcatgacttgggagcctagtgggcctttctagcctggcccatgtgcttgccaaaaccgccggttttgaggtgtccggttcgccggtttgaaaaccgcccggtttatctgatttttactggttcaattgtatatctagtccttgcagcaaaccgaaccggttgaggagctggtttcggtttttcttggtccaaccgccgggtcaggcccctttttttttactaggatggtcagtgtatttgctacatgataaaatttttaaacacgtggaggctgctgcaattttttgtggcacatggacacgatatgccgtgccacgaaaggacgcagttcacgcaagcatgaaaagattcctaccagtaagaagcaatatgtttctagtactgttggacggtggcaccagttgtatatgtacaacaaccaaacccagtgtgtatgtacagctattgccgccgtccaacagtacttccaaacatgaggttcgaaacttgtacaggcatccaggatgtttctgtgaggtgaatgtcgaattgtcgatggtgctttctctagtaggatgtaccgctgcaataattagggatgaaaatgggagcttctagcttgcaacggtagtctcgcatactaaaattccatgatgaagtgtcctgcaatggtgatgatgatagtagaaaatagggaggcatatgtgtagcacaaatagcaacaattaatgaaccaaataaatagtcaagcagaggtgacgacaatagagatctgaaacgaacctgaatcttgtacgttaacaccggccaccacagaaactataaccataatgaatgaacctgactttagcatcatgtgccttgacgctagagagaatccactcagtacaactgagttttccctacttctacaatctactactgattttatcaagttgaataatatgctatcgtgttttcttgaacctatactacatgccatcgtcatctacaagccgttagttgaacatctgttagagctttagttgaacatctgttagagctgaaaaaaggcctatttaccctaactcatgttttattgtgtgtcagatactacttccttttacttctccgcgctcgctacctttgttttcaaacttacaactgcgttgaaattccactgcctttttctttcgaacttactgctgcgctgaaattccactgctattttatttcaaacttgctactgcgctgaaaacctgaaattcaccacattttgaccccccataatacgcttaacaattccggcattattactacctgcatttttttttcgcagcagcatttcgttcaactgcatcaaaatgtacatggacggatatttgtataacactcagaaaaaaaaaatccattcccatgccactttactcgcgcctcgtgagatgactaatacagattacaaaatgagagatgactaacaaacgttgattaccattcactagcaaagcaggagcaacggcataagtcccatacagccaggttcagagtcaaaaaaaaaaatcacaagaacagtagtacagtcggccggccagccagcggcgcgtcgatgggatcccggcgaccggccgccgccacgcttcgatggggagcccagcgcccggccgcgcgtcgatggggagccgggcgcttggcagcgcgtcggggactggggtagtcagcggcgcgtcggggacttgggcggccggccttccatcgatgggagtcggcaccgcctcacactgggcagatcaatttggggcaggagcacggctacggttttcagccaactagtgctatagtgaaaggatattttagtcattaagaaaaaattcaatacatcaaacgggtgccaactaacggcttgtggacggcgatggcacacagtagaggttcaagaaaacacgatggcatattattcaaattgacaaagttagtggtagattatagaagtggggaaaactcagtggtactgagtggattctctcacgctagagacccaacatctcaatgtcatggttcttagcactaaatactggttataagccaatatctctgacgcttagccactactagaaaaactatttttttcagatgatagcactgtcgacgggggatacccgtagaccggatatagagagtattggggtccgttagtacgaggatctacatagtacgacaacaggcaaacaaaagaaaagaattatactggtttaggccccttgataggtaatagccctaatccagttgatatgggattatatgatggaaaccacaggttacaaagggaatagcggaactcaatgataccgatgagaccgtagtcgagttggttcaactagatctcctggcgacttggctcctgcacgctccggctccgtaggctgtggtggatgttttggcagtaatattcgatgccttaggtcctgccagggggtcccttatataccgcgggttagttgatcctcaagtaggactcggagatatcggacccctcacgatacagtaaagactcaatctcgaccgagtaggactcctcccatccgtagattatgtttctatcacgtgatagatttgcttaacgtatacggaaactatccgtatacgcgtgggtataccgtattagtatacagcgtacatccaagggtagagggtatatcttatccgtaacactgatagtagccccccgacttctgcttaaatgaactcatgttatcgatcgcaacttttgatgtcgaaattgttatcgttctcatctgatcgatctcggtgtaaaaaaccgtagagacaaagagccatcgacaacaccgcgtgaagttcaatggtcatgagtgaatttaaattgatgtctgaaaactaccgcgcgtaacagacctagaattttccggcggcaatctctctcctttccttgggatacgcaccatcgatagtgcgcttatttatagggatttcgggaatccattcgaagtccgtttgccagaaaactctcttgccttgtagcgctcttcgtcttctccgctccccgcaaagaaaaccctagcttatttccttcatcttattctccagcgatcctttggcggcgatggatcttgagtagtctaccttgaacaccgcattcctgaagaagctgtaggacgacggtgccctccctagtcgcgggactttgcaaagggaggctggaggtacagaacctgaactcatcttgggccccatgtttgtggtcgaggattatatttcttgcggttttctcccttcgccttccgaatttcttcttctagtcttgaatttctacggcctttctttgtttcacttgaaccccaattccttcgcatttcttagcatcttctctcatcttttagaggcctacattggggtagtgccctttcttgacctcttttgcttctattacgaattgcgtttgatggaatccaacagggtgtctggatgcatcggattccgacttcggaatggcctgaagtcgcgttatatccccttccagtgcccttcttattgtagcaagtggcggacgagatggttctatctctagatagaaaactcggaacccgtccttgttgtccctaaggatcagccagaagaaatcccagagtggaccgcaaaaccagccctgactccctccctccaatctttcatcgacatcattgatgatctccgaaaacggcggttgtcgggatacgaagtcgctgtcgacttcgtaggtcggtggattgagccgctgcaggcccgtgcccatccggcctttgaatactctgggccagaggacacgacccgggtctctcctcagggtattttttctcgcatttctaattttgttccgagtgcatctgtttctcctgacttatcgagttctcgttctcgatttataggtctggacagcgacactgtgggacgtcacgttggtcagataatgatcagcgcatcctcgaaggcggacgatatccccatcgcactctgcaacaaggacgcgaccgaacgcgccgccgcgattaatgtaagtgtattcgatgattcctttacatctctcttctcggggtcgcatcgtgacttcacgttgtgcaggctctccctctgacgtacgccatcggacctctcgtggatcaccaggcggcaacatcgttgaaggagggcgttgccaaggaggcatctgacgctgttgctggtggcagtgttccgaagaaagggaggatattctcgtccgtggtcaggacccgctggaaagcgacaagctccgcggtaagcctctctctcgttctttagtgcgtagtcggaatgacttgacctcacaccatttcatcttactcatgactcggacgcatctcctccacctcagcaaagccagaggttggtgacgatcagcaagaagtaagtaaacgttcttgaggtcttttcattctcgaagttttgattgtctaccgtcatgaagtaaaggaaaatcttcgcagaatggcgcaggcgaaggtggcgcaaggggggactgatgctgcttccagcgtgtaccctgtggcgacttcgactggagtcgtggtcgctactaaggaccaagaagcagcaccgagtagccctgccgtagcctcgtgcctacccggggtttgtccaccgatgccctcaccttggggggagctccaagcggagatggagcgcatcctctaggtcggtgctcgcggcgtaggccgcgagatcaaagaggtgaggccggcggcgtcctccgcgaatcagcgtaccgatcagctggcgcgcgatctggcggaggcccgcgaggacctcttaaagatgagggagttggtagccggaaatgagatgcagcggcacggacacgagcaccggatgtcggagctcgagggcgacatgatcgacatccgaggttcgctgtgaatgtcgttcactagcctgcaccaacttgccagggagtgcggcgccatgactaccatcccggcgaacctgatgagttctcactgacgtcatcactcacggaactggctacgacgatgggggaggtttgtaaggagctccgagttccccgtggagaacccgaggagtcagcgactggttacatctcgtggttgaatagggcctgcacacagctcgaagggattggcaagcgcatcgatgaggccctgaagcaggagtgccgtcgagcgagccgctatgccggaggacatgtgatggcctgtatccgagatcaccacccgcagctgcacctcgagttcctttgtgaagggttctcgcattctcggaggacgcccgcggagatcgacggtcttgtgtagtcgatggcgccgcttgccgagaaggttttctgctccatgcattggcgttggccgtcctggtagcttttgtatcctatagaaaaatatctcaaggaagcatgtaatatactttgaagtatttgtgacttgtaagaaatacttgtaaaatataaatggaatctatctaagttttcttactctgggtacgctgtgaacgagtgttttctcactttccgacttcagccagtcacttgagccatacactctccctagctttgtgaattgtcgcgaccgagaaaattgccttttcccgaacgctagtgtattaatccccatcccaggaaaagccggggtacaccacacaaacatgatacaaaaggccaacctttattatatcgataatatttacattattacaaagacacttcaggcctgacaaacaaaaataaacagcagcggactagcgggcctatggctccatcttcataggcgctcaactggggtataagccaggactccacctaggatttcttctccaaagcttctctttctgaaggggggagagatagagcaagaatgagtacaaccaccgtactcagcaagtcacaccgggagatgcatgattaatgcaagggagtacaaggggtaataatataggggttaagttttgcagtaaacaacatttaaaagtcacttagttgcccaaagctattttataaagacgattctagagctacacaatattattaatcaaggccgtggatctacacgaacctgccttaatccaaggcctacgatgattcagaccgaactggcaacccgccctgggtcccagctcgtcccaagccaacccaggccaaccttttcacattttagttgttaagcaaattttaagaattaaaccactaacttgggtacattgctaggattgcccatatccgagggcacggctattcgaatagatttactctgatcagaggtgtacatctttacccacaagacacatctttactccgcattccatggccttggaacccgtcgtaaacatgtgacataacccttcacccatcctagccgtgaacaaaagtaccgacccaaccctgcctacagccggtatcccgggacaggcaggccaggattgagccattagcaataggatatagaccgggtgcgccacacgcataggggtgagaccacccgcatactagtcaagtgccatggcatctcgactaacgggcatcgacccgtgtagtcttcatttgcctagacatctcgattaccgagtcatagctcgtgtagccttcatttgcctcagagatatccatcgtcgcaacgacttcatccatctctatccgtgtccttttgtttaggactagactgagcaccgagttaagccttacccattagacatgtggttagtacggtagtgctttgtaacagaggcccgaagaccggtccttatagtggccgaggtgttactggcaaaaccctgcacctcgagcccagcctaaaactattttgggagttttgaatagagggggaaggtgtgtgttcaattccaacataagccagccattccacagtgtccaaatgatatgagcattcccaaagtctaaagttataaaaccacctaatgttgcctaattaatcagcgaagcatctacctaaattcatactagtggaaccgttaatagagtacccactagttggggttttgtttatcctagggtgaacaaggtaataataaacaatagcaatgataaagctataacaaggattaataggaagtgctaaataaaatagtgataacgcaggaatttaaataaagcggtaatgcaataatttaaatcaaaataatttttaaactgggattcaatatgcttaagggtgatgtgacttgccttgctcagagagaacagccttccgaaccttcggcgacgaccgcaaaccacgcttcgagaacctccggaacgacagaagctacgcgaagcaaacaagcaaagctacaagcctataaagaagtaataacaatacataagaagaaagcacacggttctttaggttataacaaacattaggagacttgaacgggtcgattcgggattcgtatgataaagatatgatcatacgaagtttaatgctgttatatggagatttacggattattatgattaggttttgcaattataaaacatgtgcaagcgctagcctggaaaagacaggaaggctgcgctgctgacatgcggaccccacatgtcaacctaatggacgacggtagaccaagtacacagagacgatccacgggacgatggaagcagacgccgtgtgccaaccgaggcgagtggcagacaaacggactccactagacaccacgcgggctgcacacgtgcaaaccacgtggctaccgagtggacacacaaacacggtcaccacacgcacccacgaatgactaccgacaccggtacatgggtaccggggtcgacaaacacacaatgggcatggggagacaacgaaaggacgaggacggggcagtgagaggacggatccttactaccacgcgacgaggcgtgggaacgacgacgacaaacggcgcggcagagatggacaggaacgacggagacgaacggacgacacttctccggcgatccttggacgaaggcaggacgaggccaactcagggcttgacgatgtggagccgaggacgaagacaacgacgaggctgcagcagacttgacgaaacgcgggcgacgaacgaacgcggcttgacggagggacgaacgccacgacgatcgagaa

SEQ ID NO: 29613 - DNA, 1761 bp, Oryza sativa
cgagcgcgacgaagacggctcagggacgacgaaggcgaccgcgaagggaacgacttcggcggcgatccttgcacgaagccgagacgcggccagcacaaggcttgacgacacggagccgaggacgaagacaacgacggggctgcagcggcacacttgacggacgtggacgacagacgagaacggcttgatggagggacgaacgccacgacgaccgggaacgacgagaggacgacgactggaaccagcgaggaggcgatgagggcagccggcagcagctgcacggagacgaggacggcgcggaacacgccactgcgatgccgaaggtggttgaggtgcggccgaccggtgcacgggcgaggagggacgggcggctgaacaacttcgacgaggcggatggagaggttcgtggcgatgtgcggcggcttccgggcgaaaccgaggggtggacgaggtggagggctacgtcaccgtgccgagggaggggacggcagcgccggctgacgcacgggcatggcagaaggggctgccggaggagacgtcgacgaggaggaaggagaggccggtgcgggcaacggcgttctggcgaaattcgggcgacgccgtggcctggccaggaaagaggacggcgtttcggtgccgggagaggtggtggcgacgtcggccggcgcacaggggacgtggcagaagcggccggaggcggaacagtggcggcaacgccactgttgccggcagggatgcacttctggaggtctccgcgtgaaacagagggcaggccggcgaagaggaggcggctgcgacgctagaggaggccacggcacggccggccggcgtgctaacgcggcggcaggggcggctgaagatggccggcggcacgggagagaggggacgacggcgggaaggtggctagggacctcgggaagactcgggaggaggcaaaaacgagagaacgcaaggagggggttccaatttataggcgcgggtcgggagctggccacaagagagggtggaacggcggcggaaaaggcggccggcggccatggaaggtggccggggttggcgcgggcgttcccgacgattgggggcacgaatcaagggggaaattagggggaattgaagaggaaggaaaggggattaattccccctaatcaattttggaattcccggtttgaatcgcgtggattttggggaggaatggcgctagggttcacgggagagagaggaggaggccggcggctggaggtcggggacgcgcctgacaggcgggacccacgcgggaggcgtcatcagcgcacgcacgtgcgcggcacgggcgggagggcgccgctcggcttgggtggggcggcttgggctaggacgtggcccaggcgggaggggaggaaaagggagctgggccgagggggaaggggaggcccaagagaaggagggagagaaggagagggagtgaaagagagggaggaagagaggactttggccgcgggccgagagagagagaggactttgggccagacttggcccaaaggaggaaggaggattatttttaggcttttctttttaataaactttgatcatagttggtgttgcttaataaatatttccggtgctctgaaaatttaagtaaaatttgagggctctttttagaccaaggagaatttaacaaaaattctccgggccacattcgaatttttcttgaacgtattttagtggttgccaatttcttttcgaaatttaaataattcgattattctttttagaaaatgattt

SEQ ID NO: 29614 - DNA, 9096 bp, Oryza sativa
gtttggaattttggataaaaattccgggcgtgacaaagaatcatccaatttggagttcatatgattgagataaactagtttatttttgcagacggctccttaaaatgctcgtatggaaaaattgattttttcatgtgggctcttaagtaagccgcatgcaaaaatgagctcatttttgcatgcggacctcttaagaggcccctatggaaatattaattttcccatacaggtgtcttaaagagtcgtatgtgaaaataaagatcaatttttgcagacgctgtcacttacggtccgtctgcaacctaaaggggtccttgtacagaaaattctttttttagtagtgagattattcaaaataacaacgaggataaactgtgttggaagcatacttctaatggcacatgcaacacaaaaagtgcatacaaggagatcattaaaaaggggagaaactgtgttggaagcatacttctaatggcatatgcaacacaaaaagtgcatacaaggtgcatacaaggagatcattaaaaagggggagaatcaaaatctgcagcaggtaagtgctcaaactacttacgtaatcaagaaaatttagaaggatgaactcacccttccaaaggtcaacgtctttgcttggagacttatcagagaggcccttccaacagctcaatggctaaatctcttagaatttctgatattttggctgctgcttgttgtagacgtggtcaacctgaaactgatttccaccttctctttggttgtccctgtagtaaattaacctggagaatttctgaagctaatctatctgttggcaactttttgtgacaagtcgaagcacgatcgcagcaccaaaacgccttgtggtgatatggagtcgccaactacctcgatctagccaaacggccaaatcaagatgggttttgtagaaaaatagctaaaccggcaagcggagccgatttagatatcaaaatcagcctctaggccgatttagatctatatgatgagaactatccgtctcgtgggcaaaacagaaggttttcaggacaaacctacaaataggtgtcgcactctcgcagcggcagcggacgatttacggcgcaaatcgacaaaaatggactacaactagagtaaagtagaaaacgtgattcaagtagattgtgtgttcggggtattacaattgaaccggccttgtcccttaaataggggttggtcttgccctctataggcccttctccacgtccaactcgggatagaaaccaaaggaatcccgaaacatgctttcccgagcaaggaaacccgagacccgacgaaaacagactcagactcggaccctgacagtctgaccggccatatacctacagtcagaccggagttcaggccgcggtcagaccgcctacatacttgcggtctgaccggctctgtgaaggaaacccggcactttccaaactttggcaattttcccctattttgtcgatagatgccaaatttggatgtaaacactatctactgacatctttactgataatttccctctggctcatattattgcttatattgcctctaatagctcacatcagttgggtttaaatagaactctcatcttaatgtggcagatgtggaaagccaggaatgacttgaaatttcagggaaagctgaaagagccaactaaagtttgttttgtatctgaagctatggcaaatacatacaccattttctctgctcataagtctttgcaggatgatcatcaggatatggagcaagaaagaagaataaaaaacattcccaatggaaacagatgctatgtggatgctgcatgggaaaatggcttcaccggcacaggaatcttgtttcacatgttgtcttcacataatgctcttttcatgctttgtggctcattcatctttgcaagccgaactggtgggtttgcaactgacaatgcactactacaatagctatttttccgtgcggttgttttgattttggcgtgcggttgttttgcccgtctggaacattgcgtctgggaaaatcgtgattttcttgtgcaggtggcgcaaccgcacgtgaaaaatccgattttcgcgtgcggctgcttatgcgaaaataaaaatccaaaaaaaaataaattttcaaaaaaacaaaccctaaccctagatctagatccggcaccccaccgccgtgccggccaccaccgccgccggatccgggcgggggactgccgccgccgccagatccgggcggggggcagtcgccgccaccggatctgggcgcggggagggcggcgctgctcccagccctgccgggcaccgcctcctcccgctcccggacacgtcgtcggcccgctcccggccgccgccttgccgccggtgtcgtcgcgcgcacgccaattcaggccaccacctcgtcgtcgtcgtcggccgcgtgcacgctgctccgagccgccgcctcgccgtcgtcgtcatcgtcgtcggccgtgtgcacgctgctcccggccgctacctcgccattgtcgtcgtcgtcggccgcgcgcacgctgctcccagccgcctccccacgtccgcccgccgctgccgtgagcccgccgcgagccctctgcgcccgctagccaccgtcgacccctccgccgagagccgcccggaggagaggaggagaaggtgagagagagagaggaaaatgagagaagaggaaactgagaagataagggggagggagagaggagagaggtgggcggggggagagagaagaaaagtccaattttttttgaataggatgggagggaagtgctattttcctatgcggttagattagaaggcccgcatgtgaaaatagagctttttttgtgtgcggccgtgttaagtgacccacacacgaaaatcaatgtgggcgacgctccccctatttttccgtacggtccaacgaccgtatggaaacaaaatagggtggcgtccagaaaagtcaatcatgtagtagtgatggaggtggccaattttctaaactttacagggattacctttctcacaaacgatgcaacaattactgacagtgccaaggatgattttgatacaggtcattggagtcttaggggctgtttggatgcttgcttcagtttaccaaagttctatagctaaggtgtggcatgccacaatttatgtggctaagaaattcttgaccacaagttaggtaaatgttggcaaaggtatgtgcctatgacaagtagggtcacaaaattaaaaagtgtggcatgataaagatgtggcaatcaagcaaacactaggctaaattggtcaaagtagcttgccaaagttgtggcaaagtatggtcaccatccaatcaaccccttagacttctttgaagccaaattaagagtgtgatcccagaaaatcctatgcatgtggtttggatctcaagaaaaatcaacagtgtagctgataaaatggcctaataagctacttcctccgtttcatatcataagactttctagcatcgccaatatttatatatatgttaatgaatctagatatatgtgtgtctaaattcattaacatctatatgaatgtaggcaatgctagaaagtcttataatatgaattggagggagtagaactcagcataacactgatccttctcaactgtaacatctcgcacattgcatctcgcacattgcttatcctaatagagattgtcatgctagaaatcttcaaaatgatttcgtttcggtgaactatactattaactatgtactacctctgaaattactattaactatgtactacctccatttcaggttataagattttctagcattgcccatattcatatatatgttaatgaatctagaaatatatatatgtgcctagattcattaacatttatatgaatgtgggcaatactagaaaatcttataatatgaaacggaggaagtactatgtttcttaaaaaaaaaggggagagacgtgagaggtggttgaacatagcttatagctatgttcccaacccctctcccgcattttccgcgcgcacgcttttcaaactgctaaacggtgtgttttttgtagcaaaaaaaagtttctatacgaaatttgcttaaaaaatcaaattaatctatttttgaaaaataatttagctaatatcgctccgttttccgtgtgggagggtaaggttcccaaccatgcccagcaaacacaggcatagacctctagagcgcggcggacgaccccatccacgtggtaggttccatatattgccttaacaccctcagaatgttgggattcaaaagattaaaaagaggtgccgccacacatgattttttatctaacaaggagaacttttacctctaagaacttttatctaataccggcctaattacggtgtaaaagcacaagagaacttttgaagaccgcattttcgccattgtagatatatcacctctatatttttaccacgtgtcatttaaccattgggagccatttaaactgcctgcaaacaacttttgcctcttgtatacaatgatatgggaccatactgcaaacagcaaccgtctactatgtacatgccacccctaacaacttatccctaaaccgaacagaatcctatcatataactacaagaatttatttaatctatgacgaaaaaattcgtcatggatcactgaaaattcgtcacaggaattttcccatgacaattatacttatcgtcatctattgagcgtcaaagattaaatttgctgacgttttctccgaaatcgtcacagatcagcacaatctatgatgttttttaaccgtcataaaatgcttatgggctcgtgtagtccagcccaggcccaacctttgtgacgaaattaaacgtcatggatggttgccatgtggcggctaacatggcagttgacgtggtcgtttggacacgtgtgcgatgacatgtcactgatgacgtggcagctgacgtggttgttttgacacatgtgcgataacgtgtcactgatgacgtggcagctgacatcagcaattgttttatacggcccgttatttttttgacggcccattaatttttaaacagcccattaatttttttaactggcctattttaaaataggcccatttcagaactagcctattttgtcaaccaactatcagatcaaagcccactaaacagacccattaaatttgagcccaccaaattcaatccaatttatcatacaatctcagattcaaaccaacacatctcaacaaacatccaatacaacacaaaatttacaacacagttaacagccaaatctagtcacaatccaaatacaatcacagtaaccaaaatttcaccggatgtcgcatgaccaagatcttccaagtgagcttagcagcactgcatatgcacaagataaaacatcaataactgccatatcatcctagtttcttctactgttcaagcacttaatagatgaataaaaaatattcatgcagttactgatgtcacggacatgctgcaatgtcaggatcgggaggagctgtctccctctgtatgttatctccacctgcacttcgcacatttctgaaattttcagttcatctcagttcagcattttgtaacaaagaaactaagcatgctcagagatcaggcaaaacaatatatatatatttaccccttttcactgtggaaataatggttttcacgcatgagggagaggcaccctcaaatttccttactaaagtaacagttataggtgaaaaaaacaaccctacttccgatcctgctaccaaataaatagcccagttctttcgtgaactctgaaaagatattgaaatgcttttgcacttgtacagtggaaaaattggtaaacaaaaagaactgccagccctggtttcttcctattatcccttaatttaaaaggaaaagactgacatcatgctcacaaatttccaaaaattgggtataaactgaggcatcttaaactgcaatgcaactgcttagcatagtataacatgagaaagcccagccaaaagtttgctagatagccaaaaaaaccacttcacatgttaggaagaaacatgccactacagttttgacattcctgagcaccacatatggtggcaaccaatcctttttacatgaataagataaaaggagtcatcagatttgacattcataataggatttcacttattactttctaaaaaaaggtgaccataggactcataggaactcaccaaaagtgaccatgggaaggatgaaagttgaagcaaactcagcaattcgcacaggaaaaacagcctcatttcaatttggagcacatccaaaacctctacacagcacaccaatacatctctagttgcatctgtagcccatctaccgcagcaagaacagcaacaatcacgagggggaaggaagattagggaagcgagtagggtggatataccttgatgtagatgttctctgtttactgatagtttgctattactgtttgttaaaaggaaaaggaaagatggctagtcctgtttttgtagaatatttttgcagcatgcacatgtttaattgctaattgcaaattgcagtacataaaaaagtggtaatcttttatttcaggtggatatgatccagatatatatggactattggagattagtacttttgatttcatcttactgttaacatttatatatttcatattttctgaaagtacgttgaagtagagtttaccattcgatatataggaattgtgaaaactgctcaagtgatggataaataaaacactacataatgcaagtctcttgttcaaaagatcatgtcttacagctatatgatattatattggtttctcattctgcttgcaggtcagatgataattcattgaggttgattgccatagattgataattctacaggttaggagtagtacttataacgtatagatgcaattcagtttcaacagtcatgaagtgttgatgaattatgaagagctcaagcaatacatctctagttgcatctgtagcccatctatcgcagcaagaacagcaacaatcacgagggggaaggaagattagggaagcgagtagggtggatataccttgatgtagatgttctcggcagccttttcctcctcgccgagcaccttgccgccggaggagaggagccgccacagtgtgagccacgccggcagcctcgcctgaaccccctcgcattgactcccttgcctgaaccccctcgcattgactcccttccgccgccgtaccaggtcaccgtcacctccaccgaccccattcacgccggcccgcctccgcggctccgccaccgcctcgctgccggcctgcccgacgggccctccgtctctggcgcgccgctgtcctccgcctctgcgacggcgccaccagatccgccggagcaggctgtcactgtgcccgccgcccgccgccgagagccgagctccttcctagggcggcggatccggccttccctaggacggcgccgccaaatccaccgccgcaggtcgttgccgccgcgcctccttgctgccaccgccgctcccgctagagttgggacgccggcgagattgccgaagaggggggggacggaggagcggcgagaggagcggagggggaggcggaaggggcggcgagatccgagggggctgtggatggtgggcgaagggaggaggacgatgacgacggcgtggtagccggcggtgtgagggtggggaaagagaaggtgaagaatggatggctagggtttggatatatgtataagaagctatgttgatgcgattttaccagaataaccctggtatctggaaacctattatacaagttacttggacaaaatggtcatttaacgtggaaatttcaaaattttgaaacttcaaatcgaattttatcataataaatgaacttatgtgaaaaagttgtttgaaacaaagttgtataacttactgagatctaccaattttattttggttatttctccatctgagtttcattggcctatataaaatttgaatttcaaattatgacaacttcaaacaatattttcaaaaactaaatgatctcaaatgaaaagttcatcaacaacaaaattgtataactcatcaatatctataacttttattttggtcatttttctatatgactttgtttcaacggtttgaatttgaatttcaaattatgacaacttcaaacaaaatttacaaatactaaatgatttcaactcaaaaagtcatcaataacaaagttgtataactcatcaatatatataacttttattttgatcatttcttcatccgacgaagtaatttgtaacattgttcacaaaatctacatatctctcttattttttataaacgtataagagatatgtacattttgtgaacaatgttacaaatcacttcgacgaatgaagaaatgacccaaataaaagttatagatcctgatgagttatacaacattgttgttgatgactttttcagttaaaatcatctagtacttgtaaatgttgtttgaagctgtcataatttgaaattcaaatttaaactgtttaaacaaagtcgtatagaaaaatagccaaaacaaaagttatagatattgatgagtactacaactttgttgttgatgactttttcagttgaaatcatctagtacttgtaaatattgtttgaagctgtcataatttgaaattcaaattcaaactatttaaacaaagtcatatagaaaaatggccaaaacaaaagttgtatatattggtgagttatacaactttgttgatgacctttttagttaaaatcatttagtatttaaaaatgttatttaaagttgtcataatttaaaattcaaattttatataggtcaatcaaactcagatggagaaataaccaaaataaaataggaagatctcaataagttatacaactttgtttttgacaacttttttacataagttcatttagtatgataaaattcgattcgaaggtttaatgttttgaaattaattgaaggacggagacaaaatagacttattggcgagggaggagcaaaaggcctgttacgggccagcccttttgctcatcccttgccgagaagtccattttaccttcctcctttcatttaaattcaaaatattaaacctt

SEQ ID NO: 29615 - DNA, 7621 bp, Oryza sativa
aagtgaactgaaatcatttgtcaactagtatttattaacaatcaagatatctcttgtcaggtgctccctccatccacaaaagttacacctatttcacatttgagttttttccaaataagttgtttctatttgtagtctttatgcattcaagacttaaatgaagagataaattaaatgttttattagaacccaaggagtcatctaaatactcattggttgcatgtttacattcactctttgatcttgtaacatccaaggtgatttaatttcttcttggtcttggtgagggagtacttgcaggatgctttcaaggtgccgcaggtgatacagctaactgacgatgaaaagtttatgtggaagaacttgactattgccgaatgtaaaaggcttgcccatgaaaatgccaaagacattatcacctgtggatttgacattgaaaaaactttcatttttacagatttcagttatgttggagggtaagattactagtactccctccgtttcacgatgtaagtcattctaccatttttcacattcatattgttaatgaatatatatatatatatatatgtatatatatatatatatgtgaacatatatatatatatatatatatacacatatatatatatatatatatgtatagaatcgttaatatcgatatgaatatggggaatgctggaatgactttattgtgaaatggaggaagtacttcctaactgtcgattaaaatataaatgtctggctggtcttttttttttcactcagctagcttctattctatgataaagtagtaaccctctatctttttttacagggcattttatgaaaggggcaattgtgtttttgcccttgctttacgattcaattgtgattttacccctgttttttagggtttgtgattttgcccctgtttttttaaatgaaggagccgtctgccccagttttgacagaagtttggtgggtccggaatttcagaattaaacaaagatagaaaatgttattatcatttatgaatgaccattctacccttggttcaataaaagagccaaatccccaatcccttactgtcccgattttcactccaaaaccctagctgggttgcaagcggcggcggcgacgcgcggccagcgggcggcatggaggagtggcggtggggccagctgccgcggaacagcgcgcggcggagtcggggcgcgggcagggaggcgctgcggcagcgcatggaggcgcggcgtggcggcctcgcgggtgcacgcgcagggaggcgcggcggccggcggccccgtggccagcgcggcggcggagaggagcggcggctccgtcggccagcgagccagcgagcagcgagcaggtagcttggcggcgggatggcgctgttaaaggatgtaggcaggcacggcggcgtcctcggtctggagcgcaggctggggaatcagggaggcgcgacttgccgccggcgggctggcgctcctaacctcttgccggcgcagggacggaggcctaacgctattgcaaatacaggattaggagacataatggagtaaatcttgtgcatggtggaaatctgctgcaaatcccctgttttctttcccattttcatgtcttgtatctgcgacagatttgtttggtgaatggtgatttcttcctggtaaatgtgatgaatctttttggtgaatttttgcacccgatgcaagttctttgaaaatgctgcagaaatgatgttaaattcttccaaaatttgtcaaagtttggtcaaattcgaaatatatgcacattatatcaagaaaggagaggcaaatgtgtaaagggtatacaagtccttctactgctaagttgacgctgttaagtgatgctaacagaataggggcaaaacagggacagaacagagcttcgtttcaaaaaagtgagggaaaaatcacaaaccctaaaaagttagggtaaaatcacaattgcaactcaaagtgaggacaagaacataattgcccctactaaatatgcttgaagtttccaaccgtgtgacatataacaatgtgagaactattctattaagattgttctctgctcttggtgttcttgcttaaatatttgtgaacaccatggagattcattacttatctttaagcgtcatgttttctaatactcttactcttggatgacagcttaaagggatatttggaattagtccggaagatcaaattggcaaggtcagctttcctcctgtgcaggctgctcaatcattctcatcatcgtttccacatctctttcatgacaatgatgaccatctgccgtgccttatcccatgtgctatagaccaggtatgatatctctggtctgattatctcgacagtacaacataattgcttttgtatctacttgctagtatactgataatatatagatttttcagcacaaaatttggacttagtttgtttcttcttgttcttttccatctctaaatttgaatttgacccactcccatacgcaaaagccaagtttagagccttgacttgtaaacatttgcatttaaagataccaaaatgttctacatgtttgtatatagccgtatcatccatgcatcgaatatgactgtcaacattcggaaatatcaatcattaatgttggaaataacccaactagcgttataccacatgtaataaaccagtaaaaagaacttccacgcaaggtggtgtctgagaaagggaatttctaggcagcctgcccttatctgacataattggttgtatatcttcttattggcattaaaatatgtagagagatttatctggcagctctaaatttgtactgagtgcttgtcaagtaaatatttttccaatacttgatttagtgatctactatcatgaaagcatatccgatatttctcattaaaggtactggagtgttggtacatatatgtatttagtttggcatattttgagttgcctatttaatcttaatttatatttatgcaggatccttattttaggatgacttgtgatgttgctcccaaacttggttttcagaaaccttcactgattgagtcaagatttttccctgcacttcaggtatttcttttagggagagcttggatgtaggactgaacattagagctggtgcaatttgacgacttgtaattaacttgctcagaattttttttggttttacttcgaataatcataatttcacgtgcattactttatgtcgattgcttgatttccttttaacagggggagagcactaaaatgtcggccagtgacccaaactctgcaatatatgtgacagataattctaaacaaataaaggcaaaggtttcatctggaatatttactcaatcacacgctttagttcggccatttaaattatggtatcttgtagttctattatttcataggcttataaaagctatttccattattttccaggtgaataaatatgctttctcaggtggccaggacaccgtggagctccatagggaacttggtgctaatcttgatgtaagctctttcccaagtattgaccactactgaacaccaaactactatgctagaattatgcactgtattctgagttttgcttagaaaacagaagttagatttaagaatcaacacgatactcgaatttgaatgatcagcagaagctaccaattctaatgcatgtagttagaagccctttgtgtttcttgaagaagccttctatgtccacatttcagtgctaatatgctgaatattgtgatcttcatttctataatctgcctgtaatattccagttaattcctgtatttctaaagaaacaccaaagtgatctgtgaattcttgtgttgttcaggtggatgtctcaatcaagtacctaaacttcttcctacaagacgatgatgagcttgagcacataaagaaggtgcatttcttattgtggaaaactaagttgcactaccattatatatgaaactcattatccattataaaatttatttcccaataccaggagtacaaggcaggaaggatgttaactggcgaagtgaagcaacgactcatcgaagttctatctgagctggttgctagacatcagagggctagagctcaagtgactgaggaggtaatgaaaataattcatgttttgtttgatcttgtcatgctttacaattgggttggttgcaagttctaattcttgtttctattgtacacacacatacatccgtatgcaaagattataaccaagtattctgaacgggacacatacaaatttccttgtttgtgtagatggttgatgctttcatggcaataaggcctcttcccaacatgtttggctgagcatcaagacaagaagagcatgacattttcgttgatcagcacatgtgtgtccccctggtttacttgttgctggactcttgtgaacataatgacaaaaagacaagaagtccttaggtttagttttggaggtatcactacaagaatctatttaatcagtgacgaaatttgacgaaattttcgtgatgttttcagagatcgtcacggatatgcaactatggatacaaggcccataatccgtgacagtttatcgatttcgtcataaaccggcccaaaacctgtaacgttatagcaatttcgtcgcgatttaaatacttcaaaaccatataagagatatgcaaattttgcaaattttgtgaagaatgttactatcactttatcggatgaagaaatgaccaaaataaaagttatagatattgatgagttatacaactttgatgttgatgactttttcaggtgaaataatttagtatttgaaaatgttgtttgcagttgtcataatttgaaattcaaattcaaattattgaaacagagtcatataccaaaatgaccaaaacaaaagttgtagatattgatgatttatataactttgttgttgatgacttttacttgtaaatgttatttgaaattgttataatttgaaattcaaattcaaattattgaaccagagtcatatagcaaaatgaaaaaaacaaaagttgtagatattgatgatttatataactttgttgttgatgactttttcagttgaaattatttagtatttaaaaatattatttgaagttgtcataatttgaaattcaaattttatatagttcaatcaaactcggatggagaaatgaccaaacgaaaaatggtagactaaatgatttctacaactttgttttttataattttttcatacgagttcatttagtatgacttttgtgtgttacttcacaatggtataataaaaaaaagaaaaaaaatgttaaacagagaaggaatgaaaaaaaggcctgttatgggccagtccttttgctcctcccaagccgagaagtccattttgcctccctcctttccattaattttaaaatattaaacctttgaatcgaattttatcatactaaatgaacatatgtgaaaaagttgtcaaaaacaaagttgtataacttattgagatctaccaattttattttgggtatttctccatctgagtttaattgacctatataaaatttgaatttcaaattatgacaaatttcaaacaacattttcaaatactaaataattttaactaaaaaagtcatcaacaacaaagttgtatgaataataaatatatacaacttttgttttggtcattttgctatatgactctgtttcaataatttgaattgaaccttgctatacacacgaagaaatctatacgaaattcgcacgaaaactacctgcttacgtgatttccatggctagaacactagaagcccacacaagatcacaggcctacaacactctagattattcaataagaaaagcccatatcaaattgacaggttcaatatcatgctactcattcagacttcagagcttcgtttgagtggagatgcagaaagcaaggatagaataaattcaatcagttctaaaaaaaatcaattcaatcaagcatatgagctaggtggcggctatatgtctaggccttaccgcctcagctgccgccacaatcagggtttacgattccgacaggcccttctatttcgggcactggcggaatttggaatttcgcgaaatccggtggaaaaccggtaaattccgaacaaatttcataaaccaaaatttgaatgcaaattccctgagtttgttgacaagttctcgaaaacctgtcggttttagcgaaattctgatcaaaatttcgatctgtaacctgtaatttggaccaactactaactgggcctagtacatgcaattcgggccatgtaagtgttttcttttttttaattctttattcttttctttcctggtgtaagttttagtaaatacacacaatacatcattttttttagaatatttatatcccaatatgttctatgaatatcatagtatttataagattttatttgtttttttcttttttttatcaattcaaatttgaatttggatgaaactcctcgaaatctcatacggtttctactttcgagcctcgtcggaatgtcgaaatttcgcgaaatccgaccggactttgttggaatcgtaaaccctggccacaatacgagcagtattgctttgcttcctgcataataggtacgatctaccatgcccacactaataataaaggcaaattttgtctacaggacactgtaatttcgtggttttagccgtaggacactgcccgaactcacttttggaggaaaacactctataaacatggtaatttggcaatagacatcgtgctgattaaaataataatttttggttgaagaggagagagaaatggcatgaaagttctaaaatacccttgggcccatatgtcatatcttccatctcttatctctatccccgctgcgccgccgcctcgatcgaggacctcagcgctgacgtcttccaggaacagcttgggcatcaccgcgctgcccaccctgaacgacgacgacccatcctccttcctgacgtcggcaaagctcaccatgaccatgagcttggtcgcccggccatggccgagcaggagcagcacggggtagaggctgtacagcagcagcagcagaagtccgcggaagagtcccccgacctccagcgcgacgagtatgaagtacgggaaggtcgacggcaacatgagctgaccgccctccaccttgcacaccgtcacgtccgccgccgccgccggcagctcgtaaacgacgacggccgcctgacgacgcgtggcggcggagacggaagatgagcatggaggcccgctgctcgccgacgacacacggctgccgctgctcgcagactacgcgctgctgcagggcgccgtcatcgactatgcggcagcgccggcgacgatggcctcctgactacgtgttgtgcggtggagaagaatgtgcatgcaggaccgctgctcgccgacgacacgtggctgccgctactcgccaactacgcgctgctgcagggcgccgtcatcaacgccgccgcggcgccggcgatgacgacagcctgacaacgtgtggtggtggcctgccgacggagaagtatgggcatggaggaccgctgctcgccgacgacacacggatgccgctgctcgtcgcgctgctgcagggcgccgtagtggacgctgctgcagcgctagtgtccgcggagtggag

SEQ ID NO: 29616 - DNA, 2061 bp, Oryza sativa
gcccggcacgactattggaccgtgcctggacctatgcctgggcacggtggcccggcccggcacggcacggaccgaggtcggcacgatgggccggcccggcacggcacggcccaacggtcggcacgaccacggcccgtaccaacggtaggcacgagcacggcccagcccaacagacagccaggccgcaccgcgtgcgcccgcatatataagccagcgaacgccgcgtcgccgcccctcccctccccagtcccctctcgcctctcgctctccgcctctccgcctaaccctaaccctagccgccaccgctcaaccgcctccgccgatccgcctccgacgctccaccgcccaccagatctcgtcctccaccgtccgccgctcactcgctcagggcctcaggcgcgcaccggtgagactcaccgagtcgcctcccttccactcttccagatccagccttcctcttcgtctccgatcgatgcctcgcctgactcgcatgaggggcgcatgaggatgggggccaccggccacgcatggtcgcctgagtcatcgtccttccactcttccaaatccagccttcctcttcgtctctttcccgtttgttcttcttcgccagatcccttggtcttctcgtagatccgtgagcctatcgtcttcaacggcaactccggtgctccggctgcgcaggtacaagcatggaaccattgtttttattttttttttctccatttccgaccctaaccttgagtgttgttggctgcttgcaggtcacaagcccgttgcttagcggcagccgccgttgagggaccagagtgcctgcgatggatgacgatcctacctctgtcaactacgagttgaggactatggggatgcgcggtgatgacgatgatgatgtggaggaggatcgtgtggaggtgttcggcaatacctccgacatcccgatccatgtgaatgtcgatgacgacgacccgccggtcgacgacagtggcaatgggacgtcgactggctctagtgcgacttgtaccaacaagaagaccaaaacctccaaggtatgggatgactttgaggaactttatgaaacgaccaatggtaatagggttcgagtctctactaaatgcaattactgtcataaaactttgagtgctcgttcttctgctggcactggacatttgcttaggcatattaagtcatgcaaacctagaaagcttgggtctaatgctttgcctcagtccatgcttagatttagtgcaaatggttctgttattccatgggaatatagtcctgaagatgctaggtttgaattgtgtagattgattgctagagaggatcttccaatcagttttggtcaatctcctgcttttgtgaactatattaaggctgctcataaccctagatttgttcctgtctctagacaaactactaccagagatttttataagttgtttaaggatcgtcgttctgttattattgatcgtctcaattctgctagctctattgctttgacatctgatatatggggtggtcatgctaagcaagattatttgagtgttgtagctcactttgttaattctgattggcaattagaaaagagggtcttgggtcttaggcttattgatgagtcacatcctggtgctaatattgctgagcgtgtaattgctgttgctaagaatatggtattactgataaggttttctctattacattaggcaatgcttctgctaattctaaagctatgatcaccctagctcgtgctctgtctggttatattggtgatttatttgtgcatcaacgctgggcatgtcatatcatcaatttaattgttaaggctgaacttgtcaagttctagcccatgctaaatgacattagagctgccatttcattcttgaatgcatctaatcagcgcattgcttcatataaaaatgtttgcattgctgcgggttatcgtcctcgtatgtttggtttggacatggatgttatatggaattcaacttatctaatgcttaagcatctcataccacatagggaaccattcacagtatttattagtacacaacatccttttgttaa

SEQ ID NO: 29617 - DNA, 6372 bp, Oryza sativa
cttggccatttgaactcggaattggaccgttcaagtctctaatttttccttaagaagtcaagcccccatttttgtgctttgtttctgcttgttatatggagtttagtagagtaaaagccttttcttttccgttggtcgtgtagacgctgcagcttcggaagatccgctcttcgtggaagttgaagccggcgtttgggaaagcgagcaaggcaagtcacatcatccttgagcatattgaatcccagtttataaaattattttgatttaaattaatgcattaccgctttatttaaattcccgcgttatcactgttttatttagccatgcctatttacctttgttaagacattattattgctattgttattattaccttgttcaccctaggataaataaaaccccaactagtgggtactctattcatggttccactagtatgaatttaggtagatgcttcgctgattaattaggcaacattaggtggttttataactttagactttgggaatattcatatcacttggatactttggaatggttggcttttgttggaattggacacacacctccccctctattcaaaaaccccaaaatggttttaggctgggctcgaggtgcgtggttgggttttgctagtcgtacctcgggtactataaggattaagctcgggcctctgttgcaaagcactaccgtacttccacatgtctagtgggtaaggcttagtttgtggctcagtctggttataaacaaaagtacacggattggagatggatgaagtcgggggtcgatggacattctccagggcaaatgaaggctacacgagctgcggcccggtagtcgagatgtcatggcacagggctggtgtcctgctgctagggggctcaatcctgcctgcctgtcccgggggttccggccgtaggtggggttgggtcggtactcttgtttatggctaggatgggttgggaactatgtcacgtcttccgtccgtataccgtggtggtatgtggcacgtggttacacgtgagggagatgtgtcttgtgggtaaagatgtacacctctgatcagagtataatctattcgaatagccgcgccctcggttatgggcaagctgagcaatgtacccaagtcagtgttttaattcttaaaatttgctcaacaactaaaatgtcgaatggttggcctgggttggcttgggacgagctgggacccagggtcgggttgccagtttggtctgaatcatcgtaggccttgggttaaggcaggttcgtgagggttcacggccttgtttaataacattgtgtagctctaggatcgtccttataaaatggctttgggcaactaagtgacttttaaatgctgtttactgcaaaacttaaccccaatattattatccccttgtacccccttgcattaatcatgcatccgccggtgtggcttgctgagtactgtggttgtactcattcttgctcaatctttcccctcttcagtaagagaagctttggagaagatgtcttaggtggagtcctggcttataccccagttgagcgcctgtgaagatggagccgtaggcccgctagtccgctgctgtttatttttgattgccaggcctgaagcgcctttgtaataatgtaaatattatcgatataataaagatgtgtcttttatatcatgtttgtgtggtgtaccccggcttttcctgggacggggattaatacactagcgttcgggaaaaggcaattttctcggtcgcgacaagctggtatcagagccatctcaactgtaggataagccaagtggataaaacctaaggacatattttataaataaaactatttccgaaagtccctttttcctcctttcccctgtgctatttgcaaaaggtttactcccttcttccttcttcagatttcaactagtactagttggttagttttgcgaagaagaagatgtcgccaattgttcgccgaaggtccggaagaccgcagggtccgctagcgaagtggaggaagcagtgaagccagctgtgaaggagtgaggatcttgggaacccgtcgcagaacctaagccaccctctagtgtttcgtttgttgtgtgtttccttgcttgtgtgtgtagtgtgtggtttgcatcggtgggttgtgatgtgaccatgctaggttgtttgcttaatcaacttgcagaataagtgaaacaaataacacatcagcaagaagagttagttcctttaaggtcctgtctctagttctggtctattctttcctggcttgtttcctctctcacctcaatccctgtaacagatgtttaacagagaaaaaggaaagaatgtcagcgggtatgcctcaagtaacccaagttttcaactcaatccaccactggcctcaagagagttaaccagggcatacccttggtccattccaagcatgctgcttagttcacagctaccattagttggaagtcaagaccaaaatcagtatgtgtttgatcgagcatttgccacccaggtcaatgagcttccaatgctagaagaggatgtccccttttgtcacgattgtagagagcaaggacactatgccctgaattgtccatgggtatatgccaaagaagccccttcctttggtttagcagggcagacatcgctaaaccagcctcctcgcaccaagtcaagcttgcagcctagtgtacaaaggagagagcctaatggagagaatccattgaatcccgggaattgctttcctcctagcccttcgtaccacgtggggtcacgtgctaagcaagccaaaggcaagaagagtaagaatcagaagagaaaagcaccgatgcgaactgaagaagaagtacgtaagatgactattaccagcaccgaatggcctccagcagggataactattcctagacgtcaaagaggaaataccttccgaggtgcacgacagttgacccagcacctcctaagccatggtggcagagtatctgatagtgaagggtcagatcaagtctcctcggattatgaagatgagtctctccgacatctcggcgaggaagagatggaatcaaaagcatgcccccgttgtggagaaattggacacgttgctagcctgtgtttcacactctgcccttattgtgaggaagaccatccaccaggtaaatgtcccacccgcaaggtcacatgttttctgtgcgaaggtaccaaccatgtgcccaaggattgccaactcagtgtgttgttgaccaagaccgcagaaatccaacgaacaaccctacgattgtctcatcagctagtcagctccaacatcaacatcgacgatatcatccccagcaccaatgctcctcctgctgcacctgactctgcagtaaatcatagcaataataccttcaacaccaaccattctctgcaccgacggcctcagcaaagaattgtcgtcgatggaagaagttgtgtctctccccgacctactccaggccgagcgaagggcaatcaatctcaggagtgcgataccaagcagaagaccgttattcgcctcaatcagcaatcagaaggaaacttctcttgtgaatgatagcaatatgcagtcctatcacatcatcacagaaccaatcaaggatgcagtcactagaacaatgccagctatgtatccatgtttgtgattttcagttcgctacttatcactgtaatcgggagtttgcagcaatcatgtaataaataaatatattcatgattataaacaatgagtttgttatgtttatggaagattcatgttgaggatgcaaggtaccgatgttaagcaccttccctttttgtttaaggcagtgccttgtattcatgtaataagggagaaatgtgtaataaaaacaagttctatgagggttattttggaagatgctgatatggaattatgtgtataattgtttactgtcaaaggagacctagggtctcatttcagaggaactatgttctaacctcgagttaaaaaccaacctgatgatagaaaagaaaatgccgagtccgggaagatatctgttgcttcaattgtcaaggaatgggtcatttcgccgacaagtgcccaaaaccgagaaacatagctgccagcacgtcagtccacgcaactccttgcaatcagaagcttgctcctcagcgaattgtcatccatgcatcccgaagcagtcctatagcccgcattgcaacagctccaactccagcgagtgcattaccacaaggtgtcaatgctcaatttcagccccagccatcagttgacaagacagaggccagtatcggcattgtacctttggatgttccagcacagcagccaagaaatcaagtacaagatgaagaacccgaacgtaagaaagttattgtctgttacaactgtagtaccggttaaggaagcagacatgccaatcgccaagtggtcactggagcaaatgcagtacctgataagcctaacgttagtcagaagcaaccataatactcttatatcagtgttcaaatacttttgttttatagttgttccccgtcaatcatgtaataacagagaaacatgagataatgaatgagcttgataagcttatgaaggacccatgttaagattgcaagtgctgtgagttgtgcacgttttgttgttgattagggagacctagggtctcattttcgtaaacccatgatctattaggaatcaaatagcctagcgattgatggcgaagaaaatcaagtgatcaaccaaagagacatttgtttggactaagagtttcagatgtgtctcttcggatcaaaggcaacaatcgtcagtctagcttttgacgaactacttcaaggtttctctgagagacagcacgcccaaggacctcattgccccagaagcatcctcaacacccggagcgaagagtacctggttgagaaaggtcgaaaggtgattaatggaagagatcggaaaagatgtttggttactgggaaaagaagtaggtcgaaaggtgattgataaaggataacgagaaccatgatttgtgtcactcgaggaagactcccgatagcaaaacaaccctacaacagttgcccggtcattaaagtaggtgaattcacgagtaagagagatgaccacaggtagaagtacttctatggggacaaggatggaaacttttgtgacatgaccaagaagtcaagaagtaaaacctgaacagtggaatctaaagctcggttcaaccttgggctttgtatcagatgctactagaataaaagcacttgcactagcatcgttcaacgcactttcctagcaatcgatccatcgagaaagaacacatcaaggctgaaggtgcaaaggaatacgttgaatgctaaatgatgacaacatgaagagaatagtggaaagtaaactgaacataaagaaagtgaatccgagttgcttgttcgtgagagctattcccagttatgaatcaagtgatatgttcgaagataatctacagaggtcagattaaaatcacatctaacaacgaagcctcagatttggcaggataatgattagacaataacaaatccagcagtaaagccatttgggaagacgtcaaagtatgtcaagtgggataagttggttctctggtgaagcataattcaaaggcaaagttatcgacccttgcatcaaatagcagaagtagctatcacccggagaccaggaaagctaatatgaggcagttggtggcaagttagaagtaaatgacaagcatgatattcttatgatgacaaacatggtatcctagtaatgacaaagctgatgtcgacgcatgtcacgaaggtggtaacttgtatgaggttgacgccaaagatatgaatgataagaagttctagaactgaagccccatcctcaaccaccgcagcctagtctgagtcagttaaaggtgcaaccagggacaagtcgggtgaagagaagattccatctgcaacaggagatcgagccaagcagtccagagtggagaagtttagttagacaagtttgttatagaagacagagcggaagaagtcagacaagaagagaagaccgcccaacctatcttcttgctagcctcctcgaatctcggggacgagattcttgtaaggggggtggatttgtcacgtcctgataaattcatcccgaattaaaaatcattcgctaaaaggaataatagaattaattaaaattcgaaaagaaattggcgaacactaaaatacgtacaagaaaaattcaaatgtggcccggagaatttttgtaaattctccttggtctaaaaggagccctcaaattttagtggattttcagagcacaaatattattaagaagaaataaataaagttaaaaaggttttgttaaaagaaaaaccctaaaagtcttctttccccccctttccttctt

SEQ ID NO: 29618 - DNA, 3812 bp, Oryza sativa
aagaagtcctgggtgaagtcatggcttataccccagttgagcgcctgtgaagatgaagccgtaggcccgctagtccgctgctgcttatttttgtttgtcaggcctgaagtgcctttgtaataatgtaaatattatcgatataataaagatgtgccttttgtatcctgtttgtgtggtgtaccccggcttttcctgggatggggattaatacacttgtgttttggaaaaggtatttttccgggcacgacaagctaatatcagagacatctcgactgtaggataagccaagtggataaaacctaaggacatattttataaacaagactatttgcaaaagttcctttttcctcctttccctaatgctatttgcaaaatgtttactctcttcttcctccttcggattttcaactagtactagatggtcagctttgcgaagaagaagatgtcgctagtggtctgccgaagttctagaaggctgcaggatccactagcgaagcaaaggaagcagtgaagccagatgtgaagcaggagtgaagatcttggagaacccgtcgcagaacctataccaccctttagggttttgttagtcgtgtgtttccttgattgtgtgtgtagcacatggtttgcatcagtggggtgtgatgtaaccatgctaggttgtttgcgttatcaacctgcagaataagcctaacatatatcataacaggaaaagattagatctgttaaggtcctatccttagtttctgatctctttctttcctccaattttctctttccccctctctaaaccttgtaacagatggctgacaatgagaaaggaagtaggtcagaaatcaaaacaagggtgccccaagctccgagtgaatgaagcaccagacaccagttgtgtgacagtggtctaacacctgattaactagaacgaattgcttatagagctaccacagcagcatcagatgccaattctagacccgagtcagatgcaacctcaagtgcaggtggaggcagtccaatcactcacaccacaagttagcgcaccgccagcatcccaacaagcccatcgtgccatgccacatgtggactcaaaagaagcaagaatcatttgttttatctatgttgaacaagggcactatgcaaggaactgtccttagcagaaaaaaaaagcaccaatgcgaaccgaagatgaggtccgtaagatgaccattaccggcacagaatggcctccaccaggaatgacaaaacgtcaaagaagaaatttcttccgaggtgcaccatagttgacggaacatcttttagctaatggaggtagagtgtctgatagcgaagattcagatcaagtctcctcacgggttgaagatgagaagtctctccaaggtttcaaccagaataaaaaggaacatatggcatgctctcgttgtggagaaatcggtcactttgccagctcatgtgtcaccacttgcgttcattgtgaggaagaccatccacccgacgagtgtccaacaagcaggattacttatttcttgtgcgaatgagctgatcatgtacgaaaagattgtcaattcagttttctgctgatgaagaagatggccaaccaacccgccagttacaacagacagaagcatcaaggcaacccaaatcctcgacaagactacagtttcagcctaactccaatgccaggacagaggaatcaaaatgggaaaagaaaatgccgagtctggaaagatatctgttgtttcaattgtcaagaagtgggtcatttcgccgacaagtgctcgaaaccgagaaacatatttaccaacacgtcagtccatgcaactccgcgcaatcagaagcttgctccttagcaaattggcatccatgcatcctgaagcagccctatagcccaagttgcaatagctcccactccaatgagtgcactaccacaaggtgtcaatgctcaatttcagccccagccaccagttgacaagacagaggccagtatagggttggacctttggatggtccaggacaacagccaagaaatcaagtcaagatgaagaacctgagagtaagaaagttattggtttgttacaactggaaagaaccagggcataactccaggacttgtccctaaccaaggaaaaaaaatcggcctccacattttcgccaatttacaagaaacagacatgccaatcgccaagtggtcactgagaaaaaaaattttttttgggccccccccaaaaaagggggtttttaaaaaccccccccctttgggggtttccccaaaaaagggccccctagtgcttagtcagaagcaaccataacactcttgtatcgatgttcaagtacttttgttttatagttgttctctaccacccgtgtaataagaaagaaacgggaaataatcaatgagtttggcaaatgtatgaaggatccatattgagactgcaagtgttgtgagttgtgtacattttgttgatgattaaggagacctagggtcttatttccgtaagctcataatctgttatgaatcaaataacctagcgattgatggcgaagaaaatcaagtgatcaaccaaagagacatttgtttggactaagagtttccgatgtgtcctttttcggatcaaaggcaacgacagtcagtatagcttttgacgaactacttcaaggtttctctgaaaggcagcaggcccaaggactgcattgccccagaagcacccacaacacccggagtgaagagtacctggttgagaaaggtcaaaaggtgattgatggaagagatcggaaaagatgtttggttgctaggaaaatgtcacgtcccaaaacgactctaaaatatatcctttaaattatgcctagaataattaaaatccgtgtgaaagcctctaacaattaaaatgtgcaaagttaaaagtcaaataaggcttagaagatttttgtatatttcctaaaagcctaaaatgtgtaaataaattttagtggaattttcatagcacaaataataattgttaagaaataaacaaagttgaaaaagttttataaaaagaaaaacccttaaagtcccccttcccttccttgggccggcccggcccatctctccttccccccctctctctctcctctccccgcggcccactcgggctctccccgcgcgcgcgccgctgacgggccggcccgcccaccaccctcgctgacgggtagggcccacccgtcatccccgacctcccgccgctcccgccgctccgcccgcgccctagcgccgccgccgccgcgaatcccgccgcctcccgtcgtccccacgtgcaataaagtgggaggaatcactcaacgtgatcccctctccctttccccccattttttccctctctctcttgcgttcaaacgggcggatttgcccccgcaaatctcgccggcgccattgatggcggccgacctcccgcgccggtttccttcctccccagtcgctctctcccccttccaaccctatttaaaccctccccgcacctcctccgtccatttccgccgtcgccgcccttcctcctcgccggattcgagctcgcgacgtcgctctctctctccgccatcgccgccgagctccggtccgccgccgtcgtcgccccggaccgcctcccacctcggcgccgcctccttcggcttcgccgcatcctcgccgacctcgtccacccctccgtttcggtcgccgaccgccggagcgccgccgtccccgtcgacccgagccacgccaccgcctccttccgctccggccgcctactccgtcaccgccgtcgcctcggggtgagccgtggaccgtcgcctcctttcccccttccctc

SEQ ID NO: 29619 - DNA, 5701 bp, Oryza sativa
tgagttcaggctaaaagagttaaatacttacattagggccaggtaggccaacaactatcagagaacaacagcggaagacaaaatattataagggcccggttaacatgccacaggcagtcgacaaggacttaaaacaaaaccgcaatccgatcatcttcttggatacgcaagcgtaccgacaagggcttctcttcaacactctcctaaaagatatataaatagcaagggtgagtaccaaccgtactcagcaagccaccacaacaacaatgcatatgatagaggtatttcaaggaatggcttcaggttcctttgcgcaaagcaagttttgcaaatcttttcacaagcctaagacctagcatagactgattaagttttaataccagtgtttacattaaacaacgatggttctgtccaccatccattgtgatcccaaggatagcttcccgccattgagtcgtcatggttttctgaggacgtccaccttccctcctctcaggaagtggctccatcagcataaaattcatcatgcaatatcccatcccacacatgttaagaatttagagtctagccaagtgtaatacacgtcccggtgctcaataaccgcgagcacggctattcgaatagatttggtttactcacactgcagtggatgtacactttacccgcactccgtgtcacgtcctgataaattcatcccgaattaaaaatcattcgctaaaaggaataatagaattaattaaaattcgaaaagaaattggcaaacactaaaatatgtacaagaaaaattcaaatgtggcccggagaatttttgttaaattctccttggtctaaaaggagccctcaaattttagtggaattttcagagcacaaataataattaagaagaaataaacaaagttaaaagggttttgtaaaaagaaaaaccctaaaagtcttctttcccccccttcccttcttgggccggctcggcccaactccctccctctctctcctctcccccgcggtccatcgggccctccccgcgcgcgcgccgatgacaggcgggcccgcccgccaccctcgctgacaggtggggcccacctgtcataccctacctcgcgccgagcccgccgtccgcccgtgccctagcgccagccgcgccgacgaatccgtcgcatgccgccgtacgcgcgcgccataaagagggggaaatcactgcccgcgattccctctccctttaccccacgttttgcctctatctctcccttggattcgctcggatttactcccgcaatcctcgccggcgcaatcaatggcggccgagatttccgcggccgattccttcctctccggccgccctctctccctcccgacgctatataaacgttccccgtgcttccctcctccgtttccgacactcgccgctcactctccccgtcggattcgtgcccgcgccgtcttcctctctctccgccgtcgccgccgagctccggttcgccgccgtcgtcgccccggacctcctcccgactcggcatcgcttgcttcggcatcgccgtgtcctcgtcgatctcgtccactcctccgtttcggccgccgactgccggagcgccgccgtcctcgtcgacccgaaccgcgccgccacctctttccactccggtcgccgttttcgtcgtcatcgtcgacccggggtgagccgaggaccgttgtttcacttcccccttccctcccctctctcggccgccgctccgtcgcgccggaggtcgccgccggcgaccatcggggcgcgggcgcgccgcctcccgtcgaccgtgccggcgaggccgccttcgggcgcgccccgcggctgccaggtggggcccggccgtcagccgcccgcgccctcgggtgcggctgacacgtgggacccacggcgccggccggcgtcaggccgcgtgcgcccggtccaccgtggaccgtgaggctgccgcgtgggccccggtccgcgcgccccctccccctcggctgacgcaataaatcctttttaaattaaaatttaaatgaagaaattcgcaaatattcatttaaagagcatataaacttcaaatggccataacttggccatttcaactcggaattggaccgttcaagtctctaatttttccttaagaagtcaagaacccatttttgtgctttgttcctgcttgttatatggagtttattagagtaaaagccttttcttttccgttggtcgtggagacgctgcagcttcggaagatccgctcttcgtggaggttaaagccgacgtttgggaaagcgagcaaggcaagtcacatcatccttgaacatattggatcccattttacaaaattcttttgatttaaattattgcattatcgctttacttaaattcccgcgttatcactgttttatttagccatgcctatttacctttgttatgaccttattattattgtcattgatattattaccttgttcaccctagattaaacaaaaccccaactagtggacactctactcatggtaccactagtatgaatttaggtagatgcttcactgattaattaggcaacattagggggttttataactctagactttgggatattcatatcacctggacactatggaatggttggattattgtggaattggattcacacctccccctctattcaaaatcctcaaaatggttttcggacgggctcggggtgcattgttttgatagtagcacctcggccatataaggaccggtcttcgggcctctgttgcaaagcactaccgtacttccacatgtctagtgggtaaggcttagtttgtggctcagtctggtcataaacaaaagtacacggattggagatggatgaagtcgggggtcgatggacattctccagggcaaatgaaggctacacgagctgcggcccggtagtcgagatgtcatggcacagggctggtgtcctgctgctaggggctcagtcctgcctgcctgtcccggtggttccggccgtaggcggggttgggtcggtactcttgtctaaggctaggatgggttggaaactatgtcacgtcttccgtctgtataccgtggtggtatgtggcacgtggttacacgtgagaaagatgtgtcttgtgggtaaagatgtacacctctgatcagagtataatctattcgaatagccgcgccctcggttatgggcaagccgagcaatgtacccaagttagtgttttaaattcttaaaacctgcttaacaactaaaatgtggaatggttggcctgggttggcttaggacgagctgggacccagggtcgggttgccagttcggtctgaatcatcgtaggccttgggttaaggcaggttcgtgtgggttcacggccttgattaataatattgtatagttctaggatcgcgtttacaaaatagctttgagcaactaaatgtctttaaatgctgtttactgcaaccctaacccttatattataacccccttgtactcccttgcatttattctgcatttatgggtgtgtcttgttgagtacggtggttgtactcagtcttgctcaattttttcccaagcccagaagaggagttccttgaagatgaaggctttggtgtctagctcgtgcctgccgtcaagcgcctgtggtcgtcgccctagtcttccgctgtttctcgtttgtctttgtgtgtgctgggccttcgctgcccatgtaataaattaactatttacgcttccgcttgttaaactctgaattgtatcaacttttggtgtaccttgcctcctgggacaaggaataatacacgcacgtaaggaacgcccgttgggttatttctggtcgtgacagaaaagaattaggtcgaaaggtgattgataaaggataacgaggaacatgatttgtgtcactcgaggaagactcccgatagcaattaaccctacaactgtcaccatgtcatttaagcagaagaattcgcgagtaagcaagatgaccataggtagaagtgattctatgaggacaaggatggaaacttttgtgacatgaccaagaagtcaagaagttaacctgaacagctagaaactaaagctcggttcaaccttgggctgtgtatcagatgctaccagagtaaaagcaattgcactagtatcgttcaacgcactttcctagcgattgatccatctggaaagaacacatcaaggatgaaggtgtaaaggaatatgttgaatgctaaatgacgacaatatgaagagaatagtggaaagtaacccgattgtaaagaaagtgaatccgagatgtctgttcgtgggagctattcccagttatgaaccaagtgatatgttcaaggataatctacagaggtcagattaaaatcacatccaataaagaagcttcagatttggcaggataacgatcagacaataacaagtctagcagtaaagttatttgggaagacgtcaaagcatgtcaagtgggataagttggttctcgtgggaagcataattcaaagttagagtgatcgaccctcgcattgaatagcgttagtatctagcacccggagactaggaaagctaatatgaggcagttagtggcaagttgtcaatcatggtatccttggtaagcgggatatcatagtctaaagcatttggtggtaagttggaaggaaacgccaagcatggtattctcatgatgacaagctggtaatgacaagcatggtatcccagtaatgacaagttggtatcgacgcataacgtgaagttggtaacttgtatgagattgacaccaagggtatgaattatgagaagtcccggaactgaagccccgtcttcaagtgccgcatcccagtcgaagtcagctcaaggtgcaaccagggacaagccaggtgaaacgaagattccatctgcaacaggagatcaagccaagcagttcagagtggggaagttttgctgggcaagtttgttaaagaaaacgcaatggaagaagtcggaccagaagagaagaccgcccaacctatcttcttgctagccttctcgaatctcgggggcgagattcctgtaagggggtggatttgtcacgtcctgataaattcatcccgaaataaaaatcattttctaaaaggaataatataattaattaaaattcgaatagaaattggcaaacattaaaatgcgtacaagaaaaattcgaatgtggcccggagaatttttgttaaattccccttggtctaaaatgatccctcaaattttacttgaatttccagagcaccggatataattattacgcaacaacaacaattaagaaagtttattaaaaaggaaactaaaaataatcctccttttcctttgggccaagtccagcccaaagttcctttcctctctccctcggcccgcggccgaagtatcacttccctccctctctttttcctcccctctctctccctggcctcccctcctcctcccgggccacctcttccctcctcttccgcttgggccgcccctgccctatcccggcctagccgaccagccgcctccctcctttccctcgcgcccctctgcacgcgcggcgcatgtgcgcgcctcacgcctgaccggtgggtccacccaccctgtcgtcttcaacctccagccggccgctcctctctatcactctcccgaaccctagcgccaccatccttcgatcccgctccactgcgcaagttccggccaaataaattgcaaaaacggaatccccatcc

SEQ ID NO: 29620 - DNA, 6601 bp, Oryza sativa
tccggccaaataaattgcaaaaacggaatccccatcccttcctcattatttcccccaactttccccctttaatcccgcccccaatcaccgggatttaatccctcttctttgaccgccattgatgccgccggccacgttctccggcgtcgttcctgtcccctcctgtggtcggcactcccctccattgcctaaaaaacggagccctagtccccctctccttcggttttcccccttcccgagctccctagccacaccgtcgctgacctcctctctctcctacgctgccggccaactccagccgccctgccgccgcgtcagcacgccggccggccgtgccgtcgcctcccccggtgtcgcagtcgcctccccttccccggcatgctctccgtttcccgcggagacctccagaagtgcatccccgccggcaacaatggcgttgccgccactgttccgccttcggccgcctctgtcgcgtctcttgtgcgccggccgacgtcgccaccacctctcccagcaccgaaacgccgtcctcttccccgtccaggccatggcgtcgcccgtatttcgccggaacaccgccgtgccgcgccggcctctccatccgccttgccggaatttccccggtcggcccttcctcctcccatgcgctgtcggccacgccaccaccacctccagcatcgcagcggcgaaccggcgacgtcatcctcggcatcgcctcccctccatccgaaccccaccgctggtgtccgtcatcgtcttcaccgttcatcctcgccggctcgtcgtcccgcggtgccgcctccatcgtcatcatcacagcggcgtgttccgcaccgtcctcgcattcgtgcagctgctgccgactgccctcatcgcctcctcgccggttccggttgtcgtcctcccgtcgttctcggtcgtcgtggcgttcgtccctctgtcaagccgcgttcgttcgtcgcccgtgtttcgtcaagtctgttgcagcctcgtcgttgtcttcgtcctcggctccgcatcgtcaagcccttgagtcagcctcgtcctgccttcgtccaaggatcgccgctgaagtgtcgtccgttcgtctccgtcgttctcgtccgtctccaccgcgccgttcgtcgtcgccgttcccacgcctcgtcgcgtggtggtaaggatccgtcctctcactgccccgtcctcgtcctttcggagtcgccccatgcccgttgtgtgtttgtcgaccccggtacccgtgtaccagtgtcggtagtcgttcgtgggtgcgtgtggtgaccgtgtttgtgtgtccgctcggtagctgtcacgcccagaaattcacaagtaatttctgaactaatttgtgcattaaaaaccctcatccaggaattagccgagatacagaaactgacaatttaatatacagattcatcaaaataactaaagcgataaatacttacataagaggcacttagtcctcaccatgaagaaaattgcagcggaaaataaaatctagagaagcttcagctcccacaggcagctcaactgggatataagccaaaggtcttctccttctggatcatttttcttcaactgaagtttgatgattattgcaaggtgagtacatgcaatactccgcaagccacacaggaattatgcaagtgcacaaggataccaaaggatggcataatatagggtttatttgtgaaagcaacatttagcaaagatttaagagtagtaaaatagtagagtaattaatcatcaatattaatcaacactgaacaacacacccatgctgcacaggcccaaccaaacctgaacaaccaaccctggttgtacagatcaaacctccaaaccaggaattatccattccaaactgggagtcaaattaattatcacattgttatcattaatgagtagtgtggaactaatcacgaaaaatattgttagacccgcccataaccgtgggcatggctattcgaatagttttactctggccagaggtgtaccactatacccacaagacacgattccacacatgttgccatgccccgaagtaccaccacggcactgcaaagggggaaatcgtgacaatacccttcgcacaacacaactcaccacagtgcaccattcctggatcataatcaccccctcaaaaacaagaggcatggactccccagtgacccccacagacttctcgccgcttctcagtctggcaccctgtaatgaaccatgctatacaaaagataaagtcgttgcccacgttggcttgtggttagcacggttaatgtttcacaacagtagctcacgaaccggtccttaattgtcatgagcacgaccttcaaaaccatgtactcacaaccaaccattaatcatattttaattatcaattaattatcataacacgattgaccatcgtgagctaccattaactataaccataagtaatagtgaagcatgatttatcccattaatgagctaatgtttctaagcatgactaagcaactgtcataagcatctagctgaaccaaaccaatatataaggttcaagctaatcaatttattacccataggaaaataaagtcatattcggccataattaattgggaaaggctcactacccgatgacattcgaaaacaatgcataagttaaaataaaacaatagctttaaacaggttcaacatgctcaaagggttgtgtgggatctgtgtgacttgccttgcgaacaagcgtcttcgattcgtcttcaggaacttctccaacgaacgaacgatcctccgaaacaacggaaaactaaatctagaacgcaaaacgagaaaaaacactaataagaccaaatgaacagtacaattaaagttcataaaaaggtagagcttgaatttacatgaattatgagacttgaacgaccttattccgagttcgtatgaattagttatgaattttacaagacttaatataatttagccttatacagaaaaggaattacgatttatttggaaaggaataacagccgctgacgtcagcgatgacatcatcgccggcaacacactggaccacaaggttgcaggcactaggaagctcggccgggctatccgagaacaccaacgcggagaggacgacgagacgccctcaccgaggtcggcacgaccacggacgacgatgggagatggccggcgacgagattgaggcggcggcgtggctgtgtccacggtgactgtggcgtttcggcgaggggaggcagcaaccgaggggcggacggtcttcacctcgctcctgcgatcccgagggtagcgaccgcgagcgaaggcggcgatggacggcgacgagcggcacggctgaaaacgagtcgacggaagattgcctcgggttgacagcgacgacgaagctccgatggtttgcaccggtggcgaaggggtggacaggcttcggcttggcgttgcaatgccgacgacagcctcggggaggtccggctaccacgggagaagcggaaagcttcgccggagatcaaaacatggcgatggttcggccttcacagtgacggcgaattccggcggggttcggcgcaaaagaacgggtggccggggtagctctcacccttgcgaagccgatggaagtggcggcgcaagtcggcgacgaccagagaagcggaagacggcggctggaattggtggcggcggtggagagagaaggtaagcgtggcggcggctctagggctagggaaaaaaatcgggaaaaaggaggaaacggaagaggaggccgaggggctgctatttatagccaaaggaggaggagatcggctcggatacaggaagaatcggcgacggattagttagggttcgccggaaaaatggagctcgaaaccgcgtcgaattcacgcgatatacaacggtattcaaaggggtttcttagggataaggtagaggagatcgaggggactccgtttttacaaccaattttggaaacttgctctgtccggaggtagaagatggtactgtagcgaggggacgtaaaacagacttcttgccgggcttttttttctcggcttgattagaagagggaccaaaactggacttccgctaaataagagaaagaggaagagagggctgctgcgggctaaggaagagagagaggagaggagtgggctgaattcggcccagactgaggaagagaatttaattaactttttataatttaaataattgctgaaatgatgtttcatttattaaaaatacttccaatgctcaaataaatccaagaaaaatcccgaaaatacttgggcacataaagtatttaatgaaattttatctagctcaagtttaagttcaaatttcttatagattttattcccacacttactttgattattaagtaatttctaaaaattcctttttcacaacgatttataatttagcgattttcagggtgtgacagtagccgcgtggtttccacgtgtgcagcccgcgtggtgtccagtggagtccgtttgtcggctactcggctcggttggcacacggggtctgcttccgtcgacccgtggaccgtctctgtatacttggtctaccgtggtccattaggttgacatgcggggtccgcatgtcaacagcgcagccttcctgtattttccaggctagcgcttgcacatgttttataattgcaaaacctaatcataataatccgtaaatctccatataacagcattaaacttcggatgatcatatcttgatcatacgaaccccgaatcgacccgttcaagtctcctaatgtttgttataacctaaagaaccgtgttctttctttttatgtattattattgcttctttatagggttgtagctttgcttgtgtgtttcgcgtagcttctgtcgttccggaggtttcggaagcgtagttcgtggtcgtcgccgaaggttcggaaggccgttctctctgagcaaggcaagtcacatcatccttgagcatattgaatcccagtttttaaaattattttaatttaaattattgcattaccgttttatttaaattaccgcgttatcactgttttatttagcacttcctactaatccttgttacagccttatcattgcaattgttattatcacctcgttcaccctaggaaaacaaaaccccaactggtgggtactctattcatggttccactagtatgaatttaggtagatgcttcgctgattaattaggcaacattaggtggttttataactttagactttgggagttctcatgtcatttagacattatggaatggttggcttgtgatggaattgaacacacacctcccccactattcaaaactcccaaaatggttttaggttgggctcgaggtgcatggttctgctagcagcaccttggccactataaggaccggtcttcgggcctctattgcaaagcactaccatctaaccacatgtctaatgggtaaggcttaactcggtgctcagtctagtcctggcaagagtacacggatggagatggacaaagtcggggctcaatggacatctctagggcaaatgaaggctacacgggctacggcgtggtagtcgagatgtcatggcacagggccagtgttctgctgctaggggctcaatcctgcctacctgtctcgggggttccggccgtagtcggggttgggtcggtgcttttgtcatggctaggataggtaaaggggttaagtcacatcctttatgacgggttccacggccgtggaatacggagtaaagatgtgtcttgtaggtaaagatgtacacctctgatcagagtataatctattgaatagccgcgccctcggatatgggtaagcctagcaatgtacccaagttggtggtttaatttttaaaacttgcttaacaactaaaatgtggaatggttggcatgggttggcttgggacgagttgggacctgggtctggttgccagttcggtctgaatcatcgtaggccttgggttaaggcatgttcgcgtgggttcacggccttgattaataatattgtgtagctctaggatcgtgtttacaaaatagctttgggcaactatgtgacttttaaatgctgtttactgcaaaacctaacccctattattatccccttgtacccccttgcattaatcatgcatctcccggtgtggcttgctgagtactatggttgtactcattcttgctatatctttcccccccttcagtaatagaagctttggagaagaagtcctaggtggagtcctggcttataccccagttgagcacctgtgaagatggagccgtaggcccgcttgtccgctgctgcttatttttgtttgtcaggcctgaagtgcctttgtaataatgtaaatattatcgatataataaagatgtgccttttgtatcctgtttgtgtggtgtaccccggcttttcatgggacggggattaatacacttgcgttttggaaaaggtatttttccgggcgcgatagtcacttctctccccgagcaaaaccctagccgtgcgcgggtgctagcacatctgcgcgtggcgttccgtccatgtacgtgtggataccggtagaggcggcgctggtttgcggtgctgattggcttgggagtacggcgaggagaacgcacgaggaggaga

SEQ ID NO: 29621 - DNA, 723 bp, Oryza sativa
ccttgcctcctgggacaaggattaatgcacgcacgtaaggaatgcccgttgggttatttccggtcgtgacacaacccaagacggtttcagagattcgtagtttccttggtcttgtggggtactaccgcaggtttattgagaacttctccaagatcgctagaccaatgactcgactgcttcagaaggatgtgaagtataagtggacggaagagtgtgagtagagttttcaagaattgaagaaaaggctagtgactgcgccagtgttagtcttgcctgatccaaggaaaggttttcaggtgtattgtgatgcgtctagacttggtttgggttgtgttttgatgtaagatgggaaggtggttgcctatgcatctaggcagttgcgccctcatgagaataactatccaacacatgatctagagttggcagctgtggttcatgcattgaagatttggcgccattgcctttttggtaaccgtacggagatgtatacggatcataaaagtttaaagtacattttcactcaacctgatctgaacatgcgtcagcgaagatggttagagttgatcaaggattatgatatggaaattcattatcatccaggtaaagcaaatgttgtagcagatgctctcagcaggaaaagccactgtaatatgtcagaaggtcaacatctaccttgggagttatgccaggaattggaaaagttcaacttgggcatagtcatca

SEQ ID NO: 29622 - DNA, 5694 bp, Oryza sativa
cccaagaaggaaggggggggaaaagaagacttttagggtttttctttttataaacctttttaactttgtttatttcttcccaattattatttgtgctctgaaaattccactaaaatttatttacgcattttaggcttttaggaaatatacaaaaatcctccaagccttatttgacttttaaatttgcacattttaattgttggaggctttcacatgaattttaattattctcggcacaatttcgaggatgtattttagggtcgttttgggacgtgacaaacctaccccccttaaacggaatctcgaccccgagattcgaaagaactgtcgaaaagaccgggatgggctgccttcagctcgtcttcacgctcccaggtagcttcttattcggcatggttgctccactggaccttgcaaaaacggattacccggttcctggtcctgcgctccatggtgtccaggattttcactggcctctccacgtaggtcaaatcttcgcgaacttcaatttgctctgagtcggcctgctcggatggcactcgaagacatttcttgagttgtgacacatgaaacacatcatgcacgttgcccaaggaggcgggcagctccaactggtaagcgacttctccgcgtcgggcaatgatacggaaaggacccacataccgaggtgcgagcttcccttttgtctgaaacctgtgtacacctcgcaatggcgtgacccgaagatatacaaaatcgtccactgcgaattccaggtcacggcgacggttatctgcataacttttctgccgggactgtgccacctttagattatcccgaatggttctgactttaccttcagcttctctcaggatatcagtcccgaacacttggcttttccccaacttgatcccacattagcggtgtccggcatttgcgcccatacaacgcttcgtaaggtgccatttgtatgctggtttgatagctgttgttgtaggagaactcggcataggggagactcttatcccaggtcttcccgaaatctaatacaatgcgcggagcatatcttctaggatctgatttagacgctcggtctgtccatctgtctgcgggtgataggcggtgctgaaattcaatcgagtacccagctcttcttggagcttcttccaaaagtgagaggtgaattggcttcccctatcagatatgattttcttgggaacgccatggagactcacgatcctagcgaagtagagctcggctagcttgttccctccataggtggtcttcacaggaataaatcgagctaccttggttaatcgatccacaactacccatatagaatcatatccaccttgggtttttggaagtccggtgatgaaatccatcccaatttcatcccatttccattctggtacttggagaggttggagaagtccggccggtcgttggtgctctgccttgacacgctggcacacatcacaaagggccacgaactctgcaatttcccgcttcatactgacccaccagtatttctccttcaagtctaagtacatcttcgtactgccagggtggatggaataaggactttcgtgagcttcctgaagtatcagctgtttaagttctcggttatctggaacgcatacccgatttccgttccatagggttccgtgttcatcctctgtgaaaccagcggctttaccctgtttcatattcttgaggagtccatgcatgtccgggtcgttcttctgagccttgcggatttgatcgagcaaggtgggcttggcttccaacgcagtcaagaatccacgactaactatgcttaggttcagggcttccatctgttgattaagttcgagtggaatgccacggacgttaagagtgttgcagtggcttttccgacttagagcgtcggcaaccacgttggccttaccaggatgatagtgaatccccacatcataatccttgatgagttctaaccatctcctttgccgaagattcaggtccgactgagtgaagatgtatttcaaactcttatgatcagtatatatttcacagcgattcccaatgagatagtgccgccagatttttagagcatgaaccactgcggctaactccaagtcatgggtagggtagctgccttcatgaggccgtagctgacgtgaggcataggccaccacatgaccgtcctgcatgagcacgcaccccaatccttggcgcgaagcgtcacaatacaccatgaagtccttgcgagtatccggcaagattaacactggcgaggaaaccagcttttctttgagagtttgaaacgccttctcgcattgtgggctccacacaaatttctcttctttcttcaataactgggtcatgggtcgagcgattttggagaagttctcgataaacctccggtagtatcctgccaaacctaagaaactgcggacttgagtaactgtcttgggttgcttccaatcggggacggcggtcactgttttagggtccacagcaactcctttagcagaaatcacgtgccctaagaatttgacttcggacaaccagaactcacacttgctaagtttggcatacaattgatgttcccgcaactttcccaataccagacggagatggtgctgatggtcttcctctgattgtgagtatattagaatgtcatcaatgaaaaccacaacaaacttatccaagtattccatgaacactttgttcattaagttcatgaagaaggcaggtgcattggtcaaaccgaacgacatcaccgtgaattcatacaatccgtatcgcgtggtgaatgcggtcttaggaatatcttcttcacggatacgtaattggtgatatccggaacgaagatcgatcttggagaatacagtggcacctttaagctgatcgaacagatcatcgatccggggaagagggtacttgtttttgatggtgacttcattgagagctctgtagtcaacgcatatcctcttcgtcttgtctttcttctctacaaaaatcacaggagcgccccatggggaagtactcggacgtatgtaccccttttctttcaactcttccaactgtttcttgacttcggccagttcatttgctgccatacggtagggtcgcttgtacagaggagtggttcctggagcaagatctatccggaactcaatctctcgcttaggcggcataccgggtagctcttccggaaacacgtctccgaactctctgactatggggatttcggatagtcctatctgatgaagttctgaacttctgacagaggttgggggtgcaaagaaaacaaccggttgttccggcccttggtacagagtgacagtgcgtctcgcgcaatccactactccttggaattgagccaaccaattcattccaaggatcacatccaagttcttggtgtctagcagaatcagatccgagggaaagggaatcccttgaatttctatagggacggcagggctataatactttgctgtcataacccctccaggggtggtgatgagtagagggtttctaagcctttctactcccaactgatttctccccacgaatagcacagatataaacgagtgggaggctccagagtcgaacaaaatggtagcagggatggaatgaatgaggaacgtaccaacgatgacgtctggagttgtcagcacgtcctcggccatcacgtggttcacacgaccccgaatgacatccttcccaccgttgttggggcggggaggcgcttggccttgctgacgccttggcttcgggcatttatccgcaaagtgcccgggctcgaagcagttgaagcacagacgctgctgaccttgagcgtccctgcggccttgaccaggctgcacagtttgcgtaggaggacggggcgcacgagtcccttgttgattctgctgttgctgcggctgtgggacgcgcaccacgaattgaggtcgaggcgcggagcgaggttgctgctgctgctgttgctgctgcgaggaggatccccctggatagggattggtgtagcggaccctttggttagcaccctgttggttgcggaaattcgccaagcggcgcttgtgcgactccagttccttgtgcttggcttccaagcggatgctcttgtccaccagacgttggaaatccggataatccccagagactagacggacggacagctcggggtccattcctgccaggaacttctcttgcttctcctcatcttcccgcacatcctccggagcgtaacgggccaggttgttgaactcatgcaaatactccatcacggagcggttgccttgcttcaactctcggaattcccttttcttaagggccacgactccagcgggcacatgggtcctccgaaaagcggcggtgaagcgagcccaagtaataggctgtccctctggctgcgtagcctggaaatggtcccaccatagagatgcgggtccctgcagctgatgggcggcgaagatgactttctcctcatcgctgcactgcacagtgtctagctttttccccacggcatgcaaccaatccaacgcatccacggggttgttggagctagagaaggtaggtgggcggatgcggaggaactcggcgagtttagagtgttggggaggtggtggtggggcattctgttgtggcggattttggaggtggtggaggaaagcagtcatcatgttggcctgctgggcgaggatttgggtgagaatggcgttggtgtctggtggtggtggtggaggaggaggagaaggtgaaggtgggttgccttggtggttgtggttgctgccttcgggttggttgccatcaccggtaaccgcatttctcctggtcgtcaccatctgaaaaccccacacggaaccagcaaacagagaaagagctaacaattaaaactaaccacccacgactaccataatttttgaatttattactgctattaaattggttcattaatgttcaagttgcttaggcgaataaaataagacaggctccgacacagttatgccacacaccggcataaccatgccccacacgactcaaaaagacaaacgagaaagaacacacgcgcaagcctactaactgctcgtctactgctgcgacgggccaggacggaaggtgagcaacagcgcatcctccgtgctaccgacgccggaggcttccccctcctggggaaccacgggcgcgggctcggcacgaggggtctcgatgaagcaagtccacgccagggactgacgaacaagctcgggcctggaggtgctcttgcgggcggtgatcttctggctgcggcagacgcggcgacgcttggggcgacagacctttccctgggcgatcttgagctgatgcagctgcgcctccaccgcgtctaggtccttcttgagctgcaggttctcctggcgcagttccaggatcttcatgttgttctcgaccatcccgcgacgtaccatctggtggaagtcgatacgagccgcgttgtacgcctccaccatccgcgccaggtgcacgatggtagcgtcatcctctgagctagcatcccggaaggtggcgtagtcgcgggctcctccgcgacgagggtggtagcggtagggcgagtgttgcaactcgtacgggtagcgctggtgaagagtgcccatggcgaggagagcggggttctggcaagcggtggggaaggaatttccacccgcggtgactgccagtgaagtccgattgggagagccagagaggatc

SEQ ID NO: 29623 - DNA, 1319 bp, Oryza sativa
attcagaccgaactggcaacccgaccctgggtcccagctcgtcccaagccaacccaggccaaccattccacattttagttgttgagcaaattttaagaattaaaacactgacttgggtacattgctcagcttgcccataaccgagggcgcggctattcgaatagattatactctgatcagaggtgtacatctttacccacaagacacatctttctcacgtgtaaccacgtgccacataccaccacggtatacggacggaagacgtgacatagttcccaacccatcctagccataaacaagagtaccgacccaatcccacctacggccggaacccccgggacaggcaggcaggactgagccccctagcagcaggacaccaaccctgtgccatgacatctcgactaccgggccgcagctcgtgtagccttcatttgccctggagaatgtccatcgacccccgacttcatccatctccaatccgtgtacttttgtttatgactagactaagccacaaactaagccttacccactagacatgtggaagtacggtagtgctttgcaacagaggcccgaagaccggtccttatatggccgaggtgctaccatcaaaaccatgcaccccgagcccagcctaaaaccatttttggggattttgaatagagggggaggtgtgaatccaattccacaatagaccaacaattccaaagtgtccaggtgatgagaatatcccaaagtcttgagttgtaaaaccacctaatgttacctaattaaaagcgaagcatctacctaaaatcatactagtggtaccatgagtagagtgtccactagttggggttttgtttattctagggtgaacaaggtaataataacaataacaataataatatggtcataacaaaggtaaataggcatggctaaataaaacagtgataacgcggggatttaaataaagcgataatgcaataatttaaatcaacataattttataaactgggattcaatatgctcaaagatgatgtgacttgccttgctcgctttcccaaacgtcggcttcaacttccacgaagagtggatcttccgaagctgtagcgtctacacgaccaacggaaaagaaaaggcttttactctaataaactccacataacagcagaaacaaagcacaaaaatgggttcttgacttcttaaggaaaagttagagacttgaacggtccaattccgagttcaaatggccaagttatggccatttgaagtttatatgctctttaaatggatatttgcgaattgcttcatttaaattttaattaaaaactcatttattg

SEQ ID NO: 29624 - DNA, 2109 bp, Oryza sativa
aaggaagggggggaaaagaagactttagggtttttctttttataaacctttttaactttgtttatttcttctcaataattatttgtgctctgaaaattccactaaaatttatttacgcattttaggcttttaggaaatatacaaaaatcttccaagccttatttgacttttaaatttgcacattttaattgttggaggctttcacatgaattttaattattctcggcacaatttcgaggatgtattttagggtcgttttgggacgtgacaggttgcttccaatttagcactgactcgacattgcttggatccacagcaactcctccagctgagatgacatgaccaaggaacttcacttcgggcaaccaaaattcacaattactaaacttggcatagagctgatgctcacgtagtttctctaaagcaagacgaagatgctcttcatgcttttcttttgtcttggagtagatatggatgtcatcaataaacaccatgacaaacttatccagatattccataaacactttattcatcaagttcatgaaaaaggacggggcattagtgagtccgaacgacataacggtacactcgaacaaaccatactgtgtggtaaaagcggtcttaggtatatcctcctcacggatttgaagttggtgatatccggaacgaagatctatcttggagaaaactgtagcaccggaatcaaaaagcacagttgcgggtatagagttaacaggaaacgtacccaaaaccacatcaggtgcattctgggcttctgcagctacaacatgattaacacgagccttcggtgctggagcattggagtcattctggacaggagcattcttcacacgtcgaggatttggacacttatcagcataatgtcctggatcaccacaattgatgcacacccctggcttgcttccttgttccttcctgacagactgattctgtgttggagctgctacaggacgagtgaccacattacgattgttgttgctgcgattaccagtgttgttgttgtagaactggcgttgagggcgaacaactgaagaggatcctccctgtgggtatggtgcagcttgaggtcccataccaatgtgcggcctctggctactaccctgttgagccttgaattgagcagccctacgcttcttctgttccatcctattgtacttgtcttcttggcgactcgccttgtccaccaactgctggaaatcccggtactccatagccatcaatgcataagacaactcatcattcaatccctctaaaaacttctcctgacgctcttcatcagtgcgaacatcttctggggcataacgagctaagcgattaaagtcatgaaggtactctgtgacagaacgggatccccgattgaatgctctgaactctctcttcttaagtgccacaacacctgatggtatgtgtgtcttcttgaaagcagcagtaaactcccgccaagtgataggctctcccgcggctctgtttagacgaaagtgatcccaccactcagcaacaggaccatgcaactgatgcgaagcaaaggaaaccttctcctgctcggtgcactgaatcaaatctaacttcttttccacagcatgcagccaatcacctgcctctactgggttagtggtgcttgagaaggtaggtggtctcacacgtagaaaatctgccaacttgttttgtggaggtggtggttgattgttgttatttgcctgctggttctgcgcttgctgcactaatagattaatcaactaagtttgttgagccaagacttgggcaagtgtgggatctccttcattgtgaccacttccacttccacttccagtgcgggtgttcaccatctgaagaaaagcatgggcaaaaggaaagaacgacagagagataccattagaacggagaactttaattaatttcaattctatattgctcttaactgtgtatgattacatttaaattgaattaacactatctcaccagctaacttactctctgacaagcaaaagaagtaaactcatgtagttacataccaccaatgatgtaagcaacacgctaaacccacacacacacaagcaaacttaagcaagcaaactaacacagggaact

SEQ ID NO: 29625 - DNA, 5326 bp, Oryza sativa
ttcctcatcacttaagacatggatgacaggttcagcatgatcaggcacagcatctcccaccacatgagtctttgaagctaactggagacgaggtggtggacgggttctcttccttgcggtgaggcgaagcttgggtgctggcggtggtgcttctcccttaagctcagctagttccttctgcagacggtacaccttgctctccaacttgcaaatcctggcacagttccagttttccctatcatgagctgctttctcccgctccacgcctactgcatccatggcgctaagcatatacacagcatgtatcagagtggcactaccttcgccttcaggacagttgtaagttccatagtcttgaccatgaggcttgtgtggatgatactggaaagctaatgactctaactcctcatcaaagcgatgacatagctctccaatggccaccaaggctgcttcctgataagcatggctgtactttcttcccccagcttcaaactttatcgacggaaggtcttcatgatcactagccaacgtcacgcgaacacgacacttctccttgttggggtcatggggaatctggcgatactcgggggcaacctcatagcctacttcaaatgccatcaatctcagctccctgacgaatcctagcacatcgatcaagcttttcggtggatggggcggcatctaaaggaacatagaaaggaggaatttatgcatatatttaagttagctgcacatactagacttaattaatttgacccaaaaagaaaaagaaaagaaaaggaggaaacagaactaattaaatttcgaatttttcttttctgaccgaaacataaattttcagaaaccaatttgtttttctgaattttttttcgaaaatttttatttatacaggagcacagacttcggaagtaaacaaaaagaagcaaatatattttcttcctgtacagtactcgtggaaacggaactaaacaaagtttttgtttggaaaatgaaatcaactttggacagagacaaattgctttagacaaatgaataaaacaaaactaaaatacttaggatctaccataagcacggtatagtgtcaccattaacagggatgagtagtgctggtgctatcttgattgaatcgataccataatagatgtacagtgccgactaaccaatgaaattcagaaaattaaactatttaataccctgaacagtaaagtttttttttaaataaaagaacatgtttctgttttggtaaagtaggatttagtaaatttggtacataaccttgcatgtgctgccaacttaattaatttgtaagagaatagagaagagcagtcctatttttcaaaatattttgaaggctacttaaggtttaccatttggcttatcgtaaggtcaaggtagctctgataccaacttgtcgcgcccggaatttctatccaaaattccaaatgcttacacgtgcgttaaatcctcgtctaggaatcagccgaggcacacaataacaaattgataatagagtactatcaaacatctaattaatactcgcgaaataaataattattacagaggtggatagttcctctcaaaagaataaaattctacgcagcggaaataaaaacaaaagatggaacagctatggcgactccactccacaagcaacttgaccagaacaaagcctaatcctccagatcatcaccttcaccgaagtactcctctgatgaatgaatattgcaagattgagcatatgacatactcaacaagccacacagcaaatatgcaagtgcacaggataacaaaggatggcataatacagctcaattgcataaacaagatttaataaacatttgagagaatagtaaaacagttaagtaattaagcaatattaaataaacactatacaacacccccgtgttgcataggcccaaccccatctgaacaaccaaccctggttgtacaaattaaacctccataccaggaatatatcattccaaaccaggagtcaatttaattatcacagtattatcattaataatgagtagtgtgagactaatcatgaaaaacattgttagacccacccataaccgcggacacggctattcggatagttttactctgatcagagatgtaccactgttcccacaagacacagctccacaagatgtcaccatgcgcctcgataccaccacggtaccttggaaaggagctgtgacaatacctctcacacaacacaactcaccacagtgcaccgttcctggatcgtactctccccttcaaaaccagaggtaatggactccccagcgacccccacggacttctcgccgcttctcagtctggcaccccataatgaatcacgctatacaaaaggtaaagtcgttgcccacgctggcttgtggttggcacggtaaatgtttcacaacagtagctcgtgaaccggtccttaattgtcatgagcacgaccatcaaaaccatatgctcgcaacccacctttatgcaggttttaattatcaattaattatcataacacgattaaccatcatgagctagcactaaatataaccataattaataatgtagtatgattcatcccattaatgagctaatgtttctaagcatggctaagcaattatacctatatagcacttagctaaaccaaaccgatatataaggtccaagctaaacaatttattacccataggaaaataaagtcatcttcggccattaattaattgggaaaggctgaccacccaatgacattcaaaaataatgcataagttgaaataaaacattaggtctaaacgggtttaacatgctcaaagggttgtttgggatctgtgtgacttgccttgagcttcttcaaccactcctgaaccttcctcgacgtaaacgctctcctctggaatgtcagaaactaaagcaaataaacaaaatcaacaaaacagtacaaaaacaagcataaaaagtacatgtggatatttttaacatgtagatcttgattttagatgaatttagcagcttgaaccactcgaatccgagttacgatgatttagttatgaatttccgaagtttaatcaattttcatctaatacagaaaattattacgaattaaataaaagatttatgatgtcacgatgacatcatcgccggccatggcacgggacgacgcgaccaccggcgatagagggctcggttgggctatccgagaacacccacgcgaagaggacgacgacgtgaactcaccggcgcaagaaactacgacggacgacgacgaacgacggccggcgacgaggtccgacggcggctcggctcgggtcaacgtcgacgacagcgctctgacggtcttcagcggctgcgaaggggcggacggggtgctcctcttcctcacgaacccggtggtggcgacggaaggcggcggtgacggctatagcggcggcgcggcgcggctggaacggcgtcggcggcggcggcgctagggcaacgtggcggcggcgctacgagcaacggtggagcttgggacttgaggagaaacgtagaggacgactaggggatgctttatataggcttggattagagagatcggactccaaacgagaggatttgagccggaaaaatctagggttagtttggagagataaactcaaaacgaattcgattcggtttatccgggcaaaattgatctccgaaacattaggggaaagggagaggataaggatgagatgatttcccctcaagcaatcgaactcggagatggctggctagggcggaatcgaaggggaggcggcggcgcttgggctcggctcggccggccagaggtggaagatgaccccgacatgtgggccccacatgtcggcggcttgagaggagagggtggggcggcggctcggcttgggccgcacggccgcgcgcgaagagaagagttgggccggaaacggcccaacggcctaggggatggttttaaagactttttcaattaaaataatttgtgaaatgatgtttcatttatgccttattaaaaatactttccttgctcaaataattaccagaaaaatctagaaaatagataaacaagcaaagtatttaatggaattttatctagctcaattttatgttgaaatttttcctagattattagagtttaacttgtaggcttttaaaaataatttctaaaaatgcattaaaaattgaattattaaattaggcgattttcagggcgtgacaaacctaccccccttaaatggaatctcgtcctcgagattcagaagaactggcaaaaagatgaggatgagctgacttcaattcatcctctcgctcccaagtggtttcttcttctgaatgattgctccactgaaccttacagaacagtatgactcgattccgggtgtttctctcactcacctcacaaattctgactggcttctcaacataagttaaatcttcttgaatctctatacgctcaggatctgcttcctccgtaggaacacgcaaacatttcttcaactgcgacacatggaacacgtcatgtattcccgccattgacggaggcaactctagttgataagctacttcacctctccgactcacaatcttaaaaggtcccacaaaacgtggtgccaatttccctttggtctggaaacgatgaactccccgcagcggcgtaacctgtaggtatacataatccccttcttcgaaagtcaaatccctatgacgattgtctgcatagctcttctgacgcgactgggcaatacacgacctttcttggataatcttcactttttcttctgcctctcgcaatacatctatcccaaaaacttgacgctcaccagtttgatcccaaaggagcggtgtacgacacttccgaccatacaatgcttcgtatggagccatttgaagactagcttgataactgttgttataagagaattcagcgtacggcagattcttatcccaacttccaccgaaatctagaacacaggctctcaacatgtcttctaaaatttgatttactctttctgtctgaccatcagtttgagggtgataggcagtactgaaattcaaatgagtacccatctcttcttgtaacttctgccaaaacttcgaagtaaactgactacctctgtctgacactattttcttgggaacgccatgtaaacatacaactcttgccatatatagctctgcgagcttatttcccgtgtaggttgttttgacaggtatgaaatgagcaactttagtaagcctgtcaaccactacccaaatagaatcatgcccttctgatgttctgggtagatcggtgataaaatccattcctatttcctcccatttccactctggtatc

SEQ ID NO: 29626 - DNA, 4838 bp, Oryza sativa
cccatgtacatcgcctcttcacgggtttctaggcaatcgttcccagaatgacccgtgcctccgtagacttcgcacgtaacgtgggagtccaaggccttgacggtgccttggggttttttctcgtggtcgttcaaacgattcatgaggaggtccagttttgcagcgagcaactccatctccttgacggtgtgcattcctcgctgatgggtctatagtcgttcctcgctccagcccatgttggagaccatcttttctaaaagatcgacgactcctctgaccgtcttagaaatgaaggctcctctagctaccgcgtcaaggtgatcatgtgacgtgggagtgagtccattatagaagttttgcaggattaactagtcgtccattccatgatgaggacaggcggccacgtactcctgcagtcgttcccacgcctcgggaatagactcgtctctcgtctgctggaaacttgaaattttgccgcgtagggcgttggttttgcccatcggaaagaactttgataggaatgttgttcagcatttgtcccaggtgttgatcgtagcgcggttggcatagaaccactgcttcgctttcccaatgagagaaaatggaaacaatcagagcctgacgccgtcaggactgatgcccttcatcgtgtacgtgctacagatctccaagaactgttgcaaatgtgagttggcatccttgtttggcttgccacagaacgggctagcctgtgcttggtctagcaatgctagcaggctaggaaattgaagtttcaatttgatcaggatgagaggttgatgctccaatttcaacaggctgggaactggaagctacaatgttgttagctcctcccttcatcaatgttgctagccggctctaagcaatggttgttcaataaattagtaaatgccccatatccaaagtatagtgagggttttttagatgatcaccttcttgtgattcttcttgggctttattcaagtattgtctgcatagctagtcttttgggactaggaatatctgaagtagttggcagtgttcctccttggcttcctcttcctgcaaaatactagacaaaataatgcattaaggtcatcaaactgtattattgagaacagtattatggaggtcaagcagacttgcctttttttggttccattaagggaacacttgtagcttgtttgaatgtggcaaaatttccacaacccttacaccttctcttgcctcttaccagcaccctcttccctgaatcattgtcaattgaagcagttttggatttggacttcctaccaccttcaaggcaagttttggtcctaagctttccgtatcttccatttgtcttcttaggtaaaggtgcacctaacacccttggcaattcaacctatggccagtatgggttgtcacccaatggctttataatcccactataggccttcttgaacaaaatcctcaatgttcacatccatattttgttgggaggttatcaaagccaatgcatgctaacatggttttccagtgtgctgccagtactggttgtaagctttcaccacatgcttaccattactgttgttattgttaacaacttctgcacaaaagctatcagatttcactactgagaggtgacccaaacccggagttcttgccttcagctgctgtgttacagcaggcaagatcttcctactcaccttctctacaattcttctcctcttattccatagaaccataaccaacgctctgtaaatttccgcatggtcacaaattagcaatgccttgtaatccttaatccagttgttaaaactctctgcaagattgttagtaatgtaatcacactttattgttggattgaaaccactcctcatccacttcaatggatgataggtttcaagccaaggaagcacatcactgcaagcttcaataacttctttcatgtgctttttccaaatctccttcctataagccgtttgctgctaagtgcacacatcaccaccaaacctcttcacaaagttcttcattagatggcagaagcattccgtctactcagcatgctcaaacacagtatgtgcaaccttttctaatccttacatgcataggtacaaacagctagtgggttaacatctcctatagctttatgaagttgtctcataaaccactctcaattatcctcagtttcagcatttatgaacccaaaagcttagtggatacatccaatgatgcccatctacggaagtggcagtagcaaagtgaccattccatttgacattcaaagtagttgaatttatactaatgtatggcctacattcctctaagaaaccatctatacagagcctcagagcacaaaaaacctatgaaaatatactttcccacaaacctccacggtatctatctctatcacactccctggtgaagttctcggtacctaagccctccacctataaagcatatgcaaactttcttcccaggtccaatagagctcaaccatagccttttgtctacccctaaatattgtgtcatagttaattgtgcacttctgatcttcttgtagttggctccgcaaggctttagggcccatacctatattcttcctaaggtttggaattgcctttgcagctacccaactgatgtgtggtaattattctcctactgctagaacggcatgtatggaagtctattaacactttcacattcaaaataaatgcaacaatccatcaatttccaaccattatgaaaatatcaaaatgaaattactgaaattcaataccatcactatcttctaattaattaggttgcttatgtccaaccatatgccaagggtaaccatcaaatttacaaccacctatattttcagggtcagttttcaccaacttcaactcaaactccttgattatagcacattgtctcatggctagactaaactccttcatgttaggatacatagtgccaaccttcatgcaaggattattagggtcataagccatgaccatctcccctggtacttcatcatgtacaggtattgatgccccattaatatcttcaacattagtagtaggagctgcagctgctactgcagtaacaccagcacccgtagttccagcaccatcagcagctccaacttcagcagcagcatgtctagccatctcagcctcatcctcagcactcaaaccctatagctggtagaattgctcatcccaatcattttgacaatatctagcctaccttcatcatcattttgagcaagaatctctagcctattccaatcgacaacatcggtactagctgggtcaaaagcaccgtagactggaacttgttcgactactcattcaggcacaatgaggaaaacgaaatcgacggcatgatcagattcgggttcgaccacagctaaaataaccttaggctcttctagcctgaagaaaaataatttggaacacttgttagagtattctctaacaagcaaaaaaaaaagacaaatcaagcttcacaaactaaggagaaaaacatattcttaccccatgactagctcatacctggtacacccaatcaattccaccttattcctagcaccagcattccgtcgggaagtaattaagatgggaacaacggcttcgagaggctgcccttggcgtcggcggcgaggaggggaagggggagggtggcagcagtgagtaggcagaggcggcggcgggaatggcgatggtgacagctaaatctggggcgccgccacgagctataacggagtacgataggggaggagcgactgcatctcgatcccttttcattcactgacctaaagaatgagccaagggcaatttggtcagaacacaactcatttactggcttaatcgagtgaaattggaaaaacgacgaagtagcatgttgcgcgaaggtggcgatggcattttaacaaaacaagttcgcggtgtggcattacaatgaaacccagccttgaatgtggcacaatgtcaattttcttgggcaggcccacactgcagaggcgaggcaacactaacgacgcggcctctacaagcaaactcgagttccaccactggctcacctccgctcttgatgtcaagctgcagccatggatctagagcacgtcccccgggggggctagagcacgtgaccggggagtcctcacctccggagagactggatgctcattctcaactcgtcaccggctgggtcaccagccccaactagcttctctgagaccaactcctccagatccactgcgtgtgatgccacaatgatggggtagccggcgttgccactcttgcctgtgtcgctcggataggctaggtccttcgctgccgccatggaccaaagaatgggagaaaacaaagaaagtggcatggtggatgacatgtgggcctagttagttttttttcgattggattgccacatgtgctggctcggatcaaaaccgctcaaaacagtgcttaggtggttatttgtcaggattgaaatgttcgggctgtaaaatatccagttttgttgtttagaaaagtaattcgtaatgttgcgttcagtggcggaggactcagtaggataaggttttgcttgagccatacctcgctttgaccacaagtaaccccatccactcctcgccttgctccagcactgcagcacgaccaccacggcggcatcgccgatgccgagatatgtaagcgcgaaaggaggaaacaatgctctagcagtaagagcttctgtatttcattccatatgctgtaattttgggatttttggtcaaaaaccgtatccaatcgattccctactagcgctcccaatagatcgagttcccttattcggattattcgttccccacttctagccactcggtttca

SEQ ID NO: 29627 - DNA, 3124 bp, Oryza sativa
aagccttgtgctgcccgcgtctcgccttcgtgcaaggatcgccgccgaagtcgttccctcgccgttcgcctccgtcgtccttaagccgtctccgtcgcgctcgttcgtctttgtcgttcccacgcctcatcgcatggtggtaaggatccgtcctctcactgccccgtcctcgtcctttcggtgtcgccccgtacccgttgtgcggttgtcgaccccggtacccgtttactggtgtcggtagtcgttcgcttatgcgtgtggtgaccgtgttagtgtgcccgctcggtagccgcgtggtttccacgtgtgcagcccgtgtggtgtctataggagtccgtttgtcggccattcgcctcggttgacacatgggatccgcttccgtcgacccatggaccgtctctgtgtactcggtctactgtggtcccttaggttgacatgtggggtccacatgtcaacggcacagccttcctgtcttttccaggctagcgcttatacatgttttatatttgcaaaacctaatcacaataatccgtaaatctccatgtaacagcaataaacttcggatgatcatatcttggtcatacgaaccccgaatcgacccgttcaagtctcttaatgtttgttataacctaaagaaccgtgtgctttctttttatgtattgttattgcttctttataggcttgtagctttgcttgtgtgcttcgtgtagcttctgtcattccggaggtttcggaagcgtgattcgcggtcgtcaccgaaggttcggaaggctgttctctctgagcaaggcaagtctcatcatccttgagcatattgaatcccagtttttaaaattattttaatttaaattattgcattaccattttatttaaattcccgcgttatcactgttttatttagcacttcctattatcacctcgttcaccctaggaaaacaaaaccccaactagtgggtactctattcatggttccactagtatgaacttacgtagatgcttcgctgattaattaggcaacattaggtggttttataactttagactttgggagttctcatgtcatttggacattatggaatggttggcttgtgatggaactgatacacacacctcccctgtcacgcccggaaattcactagtaatttccgaacttatttgtgcataaaaccctcgtccaggaatcagccgaggtacacaaactgacaatttaatatacaaatccatcataataataactttacataattacaaaagaaaagaaaacagcagcggaattacggtctagcgaagctccagctccactcccacaggcagctcaactggggtataaaccatacgtcttctcctttgcaacttgtcttcaactgaggtttgattgattattgcaaggtgagcatatgacatactcagcaagccacacaacaaatatgcaagtgcacaaggataccaaaaggatggcataatatagggctcatttgcaaaagcagcatttagcaaacatttgagagttgtaaaacagtagagtaattaatcatcaatattaatcaacactgaacagcacacccatgctgctcaggcccaaccatcctgaacaaccatacccggctgcacagatctatctccaaaccaggaatgtaccattccaaaccaggagctaaattaattaccatcaattaccacattattattaatgagtagtgtgggactaatcaagaaagacattgttcgacccgcccataaccacgggcacggctattcgaatagttttactctggccaggggtgtaccactgtacccacaagacacaactccacaatatgtcaccatatcatcatgtgcccatgctgaacatgtcaccattagtgtagttgtgacaagacccctcgcataactcaaccaaaagcagtgcaccgttcctggatcgtagtcaccccctcaaaaaccagaggcatggactccccagcgacccttgtgggcttatctccgccacttctcagtctggtgctccgtaatgagccttgttatacaaagtgtccagccgttgcccattctggcttgtggttggcacgggtaatgtttcacaaccgaaactcgtgaaccggtccttaattgtcataagtacgaccatcaaaaccatgtgctcacaacccaccattatcaagttttagttggcacattaattaaccaatcacgattgaccaacgattgaccatcgtgagctatcattaaatatccatcattaagtaatagtgaaacattagttatcccaattgtgtgctaatgtttaacatctagctgaaccaatatataaagctcaactagtcaaattataataacccaaggtatgaaggaatagagtaattaatgcaaattggccatacaaaggaataattcacaccacacggtgacattcgaaaataaatgcacagttgaaataaatagagaatttaattataggatcaacatgctcaaaggaattgtgtttgggatctgtgtgacatgtcttgcaataacatgtcttcaattaatcttcttgaacacttctggcgcactcgcgaaccttcgaaacgacggaaacgacaagctaacacgcaaaacaaagaaaaagactaataaaaaccaaataaacaatacatataaagtaagcaaacatgtaggtcataattttagatgaattatgagacttgaacggcctcattctgacttcatatgaattaattatgaattttacaagatttaatctaattaaagcctatttaaaaaggattaaataaaattaattcaatttatggataatttaatatgtagatgtttattttatacaacttttgcaacttgaaccacattaaaccaagttacaatgattatgaatttataaagattaaactggattaaagcatttatatggattttaattgaattatgacgcaataaagaattatttttgaaaggaaaaagggatttattgcgtcatcaaaagcggtccacggtaaaccgggttcaaagagacggtctacgaaacccacggccgagatctaatctaagccgaacggacagtcgagatcgatccggtccaccacgggctatggatgacgtcagcaatgacatcagcgatgatgtcatc

SEQ ID NO: 29628 - DNA, 1875 bp, Oryza sativa
ctgcaacagcggccggaggttgaagacgactgacaggtggaccccacctgtccgtggctgagagagaggagggagggcgcggcggattgggccagctgagccggacgcaagcaggccgaggagagggagggagaaacttgggccgactttcggcccaaagccaaaaggggacttttaaaacctttttcaatttaaattattcatgaaatgatattccattgattaaaaatacttccttggctcaaatagatcccagaaaaatctaggaactatagaaacaagagaagtatttaacaaaattttatctagcccacttttatgttgagatttaacaaattaaaattagatcttctcttttaggcttttaagatcatttctaataattccttttaaacaacaatttataatttaaggatttttaaacaagaaaagcacttaacataattataattagatcattaattgattaactaattactgaattgttctttgtattattaaaattagaaattgagctccgaaaaatccgagaaaattccagagagtataattaaccttggagaatttaataaaaattaaatccatccatgctttatatttaggaaattttatttcccacatttaacttcacttgtaaattaatgaacatttaatataaattctattaataatttattaaataaattataaatcctaaaacaaaaaatcaggctgtgacatccccctctattcaaaactcccaaaatggtttgaggctgggctcgaggtgcatggttctgctagtagcacctcggccactgtaaggaccggtcttcgggcctctgttgcaaagcactaccgtactaaccacatgtctaatgggtaaggcttaactcggtgctcagtctagtcctggcaagagtacacggatggagatggacgaagtcagggctcgatcctgcctacctgtctcgggggttccggccataggcggggttgggtcggtgcttttgtccggctaggatgggtaaaagggttatgccacatcctttatgatgggttccccggccgtggaatgcggagtaaagatgtgtcttgtgggtaaagatgtacacctctgatcagagtataatctattgaatagccgcgccctcggatatgggtaagcctagcaatgtacccacgttagtggtttaatttttaaaacttgcttaacaactaaaatgtggaatggttggcatgggttggcttgggacgagttgggacctgggtctggttgccagttcggtctgaatcatcgtaggccttgggttaaggcaggttcgtgtggattcacggccttgattaataatattgtgtagctataggatcgtgtttacaaaatagctttggacaactaagtgacttttaaatgctgtttactgcaaaacctaacccctattattatccccttgtacccccttacattaatcatgcatctcccgatgtggcttgctgagtactgaggttgtactcattcttgctatatctttcccccccttcagtaatagaagctttggagaagaagtcctaggtggagtcctggcttataccccagttgagcacctgtgaagatggagccgcaggcccccttgtccgctgctgtttatttttgtttgtcaagcctgaagtgcctttgtaataatgtaaatattatcgatataataaagatgtgccttttgtatcctgtttatgtggtgtaccccggcttttcatgggacggggattaatacactagcgttttggaaaaagtatttttccgggcgcgatagtcacttctcttcccgagcaaaaccctagccgtgcgcgggtgctagcacatcttggcgtggcgttccgtccatgtacgtgtggata

SEQ ID NO: 29629 - DNA, 912 bp, Oryza sativa
tcgctggcaagtccattgcctctggttttgacgggcagatcatgatccaggaatgatgcactgtggtaagttgtgctgtgttacaggtattgtcaaagttcctttccaaggtcccgtggtggtatagaggtgcatggtgacatgttgtggagctgtgtcttgtgggaacaatggtacatctctcatcagagtaaaaatattcgaatagccatgtccgcggttatgggtgggtctaacaatgtttttcatgattagtctcacactactcattattaatgataatactgtgataattaaattgactcctggtttggaatgatatattcctggtatggaggtttaatttgtacaaccagggttggttgttcagatggggttgggcctatgcaacacgggggtgttgtatagtgtttatttaatattgcttaattacttaactgttttactattctctcaaatgtttattaaatcttgtttatgcaattgagctgtattatgccatcctttgttatcctgtgcacttgcatatttgctgtgtggcttgttgagtatgtcatatgctcaatcttgcaatattcattcatcagaaggagtacttcagtgaaggtgatgatatggaggattaggttttgttcgggtcaagttgcttgtggagtggagtcgccatacctgttccgtctattgtttttatttccgctgcgtagaattttattcttttgagaggaactatctacctctgtaataattatttatttcgcgagtattaattagatatttgatagtactctattatcaatttgttattgtgtgcctcggctgattcctggacgaggatttaacgcacgtgtaagcgtttggaattttggataaaaattccgggagagtcgacctgcaggcatgcaagcttagtat

SEQ ID NO: 29630 - DNA, 1049 bp, Oryza sativa
ggcgaaatagtgggcgcgagaaacgaggagccgggcatagcgttggcaagggtataaaggcactgaggaagggacttgtttccttcctttcgccattattccccttgtctttgctgcttgcgccctaactcctcctttcctgcgccctaccctcgccacacgcgctcgctcttaatcttctcttcctccggcgccatggcacggggctccgctctgctcgatggtagcgtgctgccgccctcccgcatcgtgagcgagaggcaggctgggctgccgcgccgcttcatgccggaatcggccaccggccgggagatagtcacgctgggcgagggacgcccggcgccagactgtcacgtactgataaattcatcccgaattaaaaatcattcgctaaaaggaataatagaattaattaaaattcgaaaagaaattggcaaacactaaaatacgtacaagaaaaattcaaatgtggcccggagaatttttgttaaattctccttggtctaaaaagagccctcaaattttagtggaattttcagagcacaaataataattattaagaaataaacaaagttaaaaaggtttataaaaagaaaaaccctaaaagaagtcttctttcccccccttcctctcttgggccggctcggcccacctcgctctttccctctctctcctccccgcgggccactcggtccctcccccgcgcgcgcgccgctgacaggcgggcccgcccgccaccctcgctgacgggtggggcccacctgtcatcgcctttctcgcgccgctcccgccgaccggccgtgccctagcgccgccgccgccgcggattccgccggattccgccgtccccgcgcgcattaaagagggggaaatcactccccgtgattccctctccgtttccccccgcttttacctgtctctctccctgggattagctcggaatctttcccctaaacctagccggcatcaatggcgcccgagatcgacgcggccgtttccttcccctccggcctctatatctccctcccggcgctatataattggtcccc

SEQ ID NO: 29631 - DNA, 1151 bp, Oryza sativa
gtgacttagccacccgcctcgcagctaccgaactcaccatcgccgacatgcagcgcgcgctagactcatccgccggggaagccgaggccctccgcttggcgggcgagatagggcccggcatgctttgggatgcagtctcccatctggatcgcgccggtcggcaggcgggcctctggaaaggccagacaatgaagtactccaccaaccagggaggcctcgctcagcacctctcgaagatggccggggctctccagcagctccccgaggagctcgagaagaccgtcaagtcatcctcgagggacctcgcccaaggagcggtggagctcgtcctggcgagctaccaggccagggaccccaacttctctccgtggatggcgctggatgagttccctcctgggactgaagacagcgcgcgcgcgcaggtccgggatgccgccgaccacatcgtccacagcttcgagggctcggcccctcggctcgcgttcgcccccaactccgacgaggagggcgacgccagcggtgcagacgacagtgacgacgaggccggcgacccgggcgcatcggattgagcccccaggcccccgctaatctctagttttttctttttctttcttctaaggccttcaggcctcttttttgtatagatcaacttaatctgcaatcaaaaatgatgaaaatttttgtgttaattttactttgctatacaaatgagatgaggatgatctgtgccgtggtccttttgtgtcttagcttgatttaaggactcgtgcccaagtcccagtcctcgaaaggcgcgggtcggggctagtgcctggggagatccacatgtcgaggctggccaggccgggaacgtggtgaccgagggttatgggtgacccgattgtgggtttttgccgattcccccccccggagttcaccacgccccagggcacggctcggttctgggccccgtttggcgattttagctgaccgaaccgagcccccgagggcaaggttgagcacgagtgatcttatttcaagtcaaaattcttcaaaaaggaaaaaacggcacagatacagcccttaggaaattgaaactgcttttattgaaatactgaaataagagaaaagagaatgtgcatgtgtggtagcccccggccaaccatgcacac

SEQ ID NO: 29632 - DNA, 3031 bp, Oryza sativa
tcggtggaccaggtcgaccgcatcattgagagctgtcggccaatagaaaccttggcgaaaagctttaccaaccaaggtgcgcgaggcggagtgtgctccgcattcgccttcatggatatcggcaagaagcacaacgccttgttcccgaggagtgcacttcaggaggattccattagccccgcgccgatagagggtcccttctaccagcacgtagcgtttggagatgcgatggacgccttcactcccttcgcggtcctcgggtagagtcttatctgtgaggtatgcttggatctcggcgattcaagcaatcaatctaagggagctgggagcactcccctcgggtcccgaggcctggactccgacgggcctcgggggccggttaggcgcatccgtctcccctaaggggtcgggtcgcgcccaccgctgggcaagcctttcttcaaaggcgcccggtggggtctgggctcgcgaggacgcgagccgtgagagctcgtcggccatcatgttatcccgtctgggaacgtgccgaagctcaatcccgtcaaaatggcgctccatacgccgtacttggcgcacgtaggcgtccatctgcgagtcagagcaccggtactccttacagacttggttaacgaccagctgggaatcgcctaacaccaggaggcggcggatccccagtccagctgccactctgagtccggcaaggagtccctcgtactctgccatattattggtcgctcgaaagtcgaggcggaccaagtatttgaggacgtctccactcggagaggtcaacgtgacccccgcaccggcgccctgaagagacagggagccgtcgaactgcatcacccagtgggcggtgtgaggcagctgcgagggacccgagccggtttcggggaccgagacgagctcgggagccggggtccattctgccacaaagtcggcgagggcctggctcttgatagcgtggcgtggttcaaagtgcaaatcaaactcagaaagttcgattgcccatttcaccacccgtccagtaccctctcgattatgcaagatttgaccgagggggtaagacgtaaccacagtgacccgatgcgcctggaaataatggcgcagtttcctcgaggccatcagaacagcgtaaagcattttctgggcctgagggtatcgggtcttggcatcccggagggcctcactaacaaagtagacgggccgctgcacctttcggtggggccgatccttttcgctaggggccgcatccctggggcgctcttcacccgagcggcctcgcggggcgcactcgtcttctgtgccgacgacctcggggtcggaggacgacgggggcggccttcccacagtggcttcggggccgtcctgggggtcgggggcccctggcgtcgtcggacaagcgggcagagggccatctccggtcgtcgggagccttgggccaccgttctgctcgggggcctctcctccctgctctctcccgggccaaatcggcacagggttagcctcggggtcagagggcgataggtgcggccttcccgcagtggcctcggggccttcctgggggtcgggggctcctagcaccgtctgacaagcgggcagagggccatctccggtcgtcgggggccttgggccaccgttcggctcgggggcctctcctccctgctctctcccgggccaagtcggcacaaggtgggggtgcgcggaatgaggattgtcctcatcgcgttccacgaccaacgccgcactaaccacttgcggggtcgccgctaagtagagtagcaagggttcatttggctctggggcgaccagaactgggggagagctgagatacaccttcaactgagtgagggcacgttcagcctcctccgtccaagtaaacggcccggagcgtttgaggagcttaaataagggtaacgccttctctcccagcctcgatatgaaccgacttagggcgaccatgcaaccggtgacgcattgcacatccctaagcttgctgggggggcgcatccgctctatagctcgtatcttctcggggttggcctcgatgcctcgggcagagaccaagaacccgagaagcttgcccgtaggtacaccgaacacgcacttatcggggttcagttttatgcgggcggagcggaggctctcaaaagtttccgctagatctgaaagtaacgtttcctggttgcgcgtctttacaaccaagtcatcgacataagcctcaacattacgtcctaattggctacccaaagaaattcgagtagtacgttgaaaagtaggacctgcattctttaacccgaagggcattgtcgtataacaataagttcctatgggggtaatgaacgcagttttttcctcatcctccctagccatgcgaatttgatgataaccagagtatgcatctagaaaacacaaaaggtcgcaccccgctgtggagtcgacaatctgatctatgcgaggcagggggtaaggatccttaggacatgccttgttaaggtcggtgtagtcgatgcacattcgaagcttgccgttcgccttgggaacgaccaccgggttcgccagccactccggatggatgacctcgcggatgaatccggcctccagaagtcacgccacctcctcgcggatgaaggcttgacgttccggggcctggcgccgcactttctgccggaccggccttgcgcccggccgtacggcgagacggtgctcaatcacctccctggggaccccgggcatatccgccggtctccatgcgaagacgtcagcgtttgcccgcaggaaagagacgagcgcgtcttcctatttgccatccaagagaccaccgatccgtgtggtcttggacgggccgtcgcccaggacaacctccttgactgggacctcatcgcacgtgactatccgctgcctcggggcggcgggggcggatgtgccaagcctctcgtcgccaccctcgggcttggacacgacggcgaggcggtccgcgcgctgctccatacaagcgagcgcgactttgaggtcgccatggacagagatgggg

SEQ ID NO: 29633 - DNA, 1144 bp, Oryza sativa
gtgtgccccggcgtcacaccgatgattggctgggacggccggagcatcatccccggggccttgatggcatcaaaggctgcgggggaaaggatgttgagggctgctcctccatcaatgaggacacgccccaacttcacgttgcaaacggtgggagaaaccaccatcgcaatctgccctccccgggcaacgcacggtgggtggtcggtctggtcgaaagttagggcaacctccgaccaccgcgcccggcgcgtcgcctcatgagtaggggccgcggccagaagctctcgcttcatggccttgaggctccggcgagaaatgtgagcacacgctcctccatcgacagtggcaatggtggccccaggctcttggaaacctaggtcatcatcgccgtcgtcgatgtcctcggcgggggccttcttcttggcctcacttcgccgattgccggaaggaaccgccggggacttgccctctcggcgctcctgcctcctctcttcctcccacttcctcgtccgctcagccaaacttttgactgcacggcagtccgcgaggtcgtgaagggaagtgttgtggacggtgcaccacttgccggctgggcgctccctgctgggagcgccggcctttttctttttgtcgctcgctggcctccccttttgggtggcccgcgaagcgccctcgacggcgaggacatgaccctcgtcgtcggaatggactgacctcttcttcctcctcctgtcacgccgccctgtctgagcggcggatccgggggcggccgaagctgccactccggaaccggaggggttccaggtccatgcctcctccttacgagccactcggtccgcgagctgaaaaagctccgcggtagtctggggctctttggaggcgatcttttcgagcatgcggttgtgccgcacgccccccctgaacgcgtagattaccgcgtgtgcagggatgcatggtatggtattgcggacttgacagaaccgctgaatgtacgatcgaagtgactcatcgtcccttcgctgtactgcgtgcaagtccgcttcctcaccggggcgcggatatgtgccttggaagttcatggtgaactgttggcacaaatcctcccaagagtggacagatgcaggtggcaagttcattagccaac

SEQ ID NO: 29634 - DNA, 1252 bp, Oryza sativa
ttcctcattatccgaatcttccctctccatttcatcaacaattataccgactctctccccctcatccgccatgcccatggcctgctcctcccttggttgattttcctcattttgcatcgatggtccaacaacatcccctgcattgataggaccctctacatcttcggtttgcattgaaacatttatatctttctcttgtaccgacacaaatataacgaggggccatgaccgttcaaaagccatttccacataccgtctccaagcagcagtgctgtccatcggcattagttcccaaaaataaccttctgttgcacgactcactacaactgatactgacattgtgtagacttcttggtctattctaaatcctctcaacaaccaactataaattgactgaaatgttctctccgcaggcctatcgatgcccttagatgtcattacaaaatctgacagatcaacaccatctggaccaaatctaatatttccttcaccgtgaactatctaaaatgtgaccttatttgacattgtgcctgatgaaaacaataactgcgttaacctcgcatttctgtactacgccctaagttacattctctacaatattgttctccaaaattctaaaagtaggttacattctccagatcaaactaaactacatcttacaattaacactactgtctatgtctcaattcatactattatattctatgctctggatctacacatatgtgctgtgtgctacagatctgctaaaatatatggaactaaaactaaaacgcaacatatatactcaaacataacatattagtacaaatgtaaaagatgtatgggagcatacctgtgatgaagtgagcgaaccagcagggcttcgccgctccccttctgctgccctcccctctctctctttcgttttttttggatttttagtgaatataatgaaatttcagagaggagggactgggctttataggggggaggcaaaaatcgccctcccccagggcggcaagggggccgcctgcaaaattccatgccccctcgccgcccatttgcaggcggccccccgcacagtacaaaatcgccctagcggagggcggcaagggggcccgctacaaatttcgttgacggccgtcgccgagagcgaacggccgtctgacacgtaatttttgccgccctctgggatggcgatttttaaaaatcgcccttccagagggcggtaggcgactactttcgtcaattttcaaaatgaaaaaatatt

SEQ ID NO: 29635 - DNA, 3092 bp, Oryza sativa
aaatccactttttcctaattggggctgatgccgagcaggcaggggcagcccatcgcgcgcgctagaaagctagcaggccgcggtgggccgcgagcccgcgagggaggggatcgggaatgcgcgaccacgcgccgggagtgagcgggaggtcgcatgcgcgatccgttgactgatttctctgcactaatttccaccgttcgccttgtcccacgtagggatggcaatcgggcgcgacgggcacgggtagtgcctacctatacccatgcccgtgagattatttgtgctcgtgggtatacccattactacatgacgggtaaggatggttacctatgcccattgcccgcgggcgtgcccgtttacccgccacaacaaaagcagtggaacaaaaagtctacaagctactaagttcgaatcgaacttaaaacatcaaatattctccacctcggtgtcgtgtctctcctctggcggcgatagagtaagaggagagaaataataagggaaataaaagggaaaccgaagaaatcaaagaactgggcttatgtattctagtggattttgctcctagcctacatataagttagatttcgtgggtaaacgggcaaagcgggcatgggtagtgattacccatacccatgcccatttactcatcgggcatagcttttgacccaataagatacccatgggtataaaatggagaacaaacccaaccctaatagggtttttacccgcgggtaaacgggcaaacgggcacaattgccatccctagtcccacgttgacgaccggcggaggttgatgccaaggatattgtcgttgccggcttgccgcgcatccatcgccccggtgcctggttacgtgcccgtcgcgctcaaaaatctcgtccacgcactgcacaaaagatcaggccggccaccgtgcccaggtgaaacacgaggtggccagtacgtgacagagccaggcagcgtgtgacgtctgtggtttttgcatgctcgcattgcccgcatccgcatgccgtcgtgtagcgtgagcaattgaccgatcgatttgtggccttggccttctcaacctgctcggctgcacctgacagcagcagcagtgtcgcagcaggtagaaacgctgttcagagagttttttttttttcaacgcgtgccagaccacaacattcccattacggattcacatggatccatagtaaagagggcccacatgttagtgactcaaagtcatgtggcttagtccgtgtttagattttttttttttgctaaaaaggtcacatcgaatgtttggacacgtgcatggagtattatttgtggaaaaaaaccaattacacagtttgcatgtaaattatgagacgaattttttgagtctaattacgccatgatttaacaatgtgatgctacagtaaatatttactaatgatggacacattaggcttaataaattcgtctcgcagtttatatgtggaatctgtaatttgttttgttattagtctacgtttaatacttcaaatgtatatccgtatactaaaaaaaatttggccaagaaactaaacacaaccttttttttgtgggagaagtttttaccgggtctccgggaaaccgggaaagtacgttggtattgcaaaaactattagaggatttcagctaatcctttccggagaattagacagcttaccccctaagaggatctcaaattctcaatcctcctcttacatgaacagaacgaagtacagccaaaccgccaaatgtattggaacttggtactagtactactagcaatgtagcaatagaatgctagacacaatagtatttttgaaagcaacacacgtttggtcgtaatcgccaaagcagtggaattacgccgcccatcatcaccatcagttggggatcaaccccagggccttgccgtacgcgacgaggtcgtcgtacatctcgtccaggttcttgtacttgaactcgaacccttcgccgatgagcttcgccgacgagagcgagatggtcggcttctcggggtgatgctcttcgatgctgcgtacatagcaacgcatgatcagattcagataaccaaatgcacgaatgcataaagcttaatttcttaattaccaatcgcatctgacgttgtactgggggtacttggccgccaggaagccggcgatctcggtgaccgtggtgttgaggctgccgcagatgtacctccccgacgccgactcctcctcggcgacgaagatctcggcgcggcacacgtcctcgatgtggaccatcggcatcgaccacccggacgccttctcgatgcccttgaggatgttcatcatctcctcgtcgcctgaaaaaaaaaattcacagatcatcgatgcagcgacccaaaaacgttcagaagtcgagttcttggattgcttcttgtttcattcattcggtgatcgctagatagttcctcaccggttatcaacgagaggcaggccgggacgctggtatcgaccctcaccgccggcgatgctccgacggcgacgaccgggcagagggtcaccaggctgagaccgttctcctccgcgaacttggtcgcctccttctccgaaagaaccttggagatcgagtacgcctgcagtgcatgcagcaacaatggcgccgaactcatgttctacgagacattgctgtggttcagtgacatggaacagctcgtgtgtatatatgtgtacctgcgtcggcgacagcttctccatggatctgaggtactcgatgtcggaccaggacgactcgtcgaggacatggccggcgccttccagcggccgcaggctggagacggcggccgtcgacgacgtcaggatcacgcgcttcaccgtgccggctctcgcgcacgacctcatcacgttcagtgtgccctcgacgccgccttggactatctctttctgccatggccaagttcagaattcagtaactaactaactgactacagatactaatcgagcttgcaggttgcagcagtggtcacctcgagatcgtcggacttgtggctcttgtcgtacaccggagcggcgacgaggaaggcgtagtggcagccggcgacggcctcgtcgaaactgccttcatcctccaagttg

SEQ ID NO: 29636 - DNA, 2791 bp, Oryza sativa
ctgaaattcagagttacaaaagcagtttcagaggccaaaccaaaattgtactgacacaatcaatcccaaaactgaacgtgcaaatactcctctgaaacaaattatgaactgatgacatgttcttcgattttcagtaaaactgaacactggaaaaacatgtacaagaaagaaagggagtagaatctcactgggatctctgacgcttgtctgaacagcgtatcctttctccaggagcatcttgacgagcaatgaagcaacgtacccgttgccgccggtgacgcacaccgtcttcctctcaacctccgacgacatcgtctctctctctctctccggtcagttaatacctctcctgtgacagagaaggtgacttgggtttactcccaggtagaatccgagcagcacactgatgatgaggtttcttttgctgattgcgctgttgtggcacttgccaggacaaatcccggagagcaggaacataatacatttgacttagccaacactattttacaagcgacgacgccagtcgccagacagagaggcagaacaagaaatgcttttcgtgatgcatgcaccatacctgctcttctgattgattttccttccttagataatgacctgcactgatcgattatgtcgatcgatgaacatctcacgcttcacatttttaatgcggtcgatcgtgttttcaaaaggtaaagcttttgctccaagaaaaaaggatcatcttatcttcccagatgacgtgtgtacaggttcattcttagaattgaacttttttttttaggatagaggtagtacatctgacgctgaagcctgtgacgatttaacatcgttgaaaatgataggatccgtttctttctctatgcaaacaaaagcgagagaggaacagcacacgcgccattgaaaagtaacccaacgctgcatgcctgcgaattggacttctcgtttgtgtgtgtgattaatcataccaaaaagtaattcctgcgatgcccgcaaagttgagctgagagagctagcataaaaaaaaaagctagcaagttagttcatgttattagtactccctatgtttacaccattgactttttagcacatacttgatcattcatcttattcaaagaaatttgtgaaatatgtaaaactatatttatacatgaaagtatatttaacaatgaattaaatgatagaaaaaaaataataattacatattttttttgaataagacgaatgatcaaacatgtttaaaaaaatcaaacggcgtcaaatatttagaaaaggaggaagaagttgtcttcgcatctctgtaataactttcccacactaaggttgtgtttagttcacatcaaaattagaagtttggttgaaattgaaatgatgtgatggaaaaattagaagtttgtgtgtgtagaaaagttttgatgtgatggaaaagttgaaagtttgaagaattattttggaactaaacacggcctaacacgacctgatcttcagatgctgaactggggaccttgaaagaccttgtgaggcttcgttgttccaccagaatattttctttgctacttaatgaaatgacagatctcttgcttgtttcaaaaaagaaaatcatagagccacaattaggttgtgttctttagtgagggttgtgaatcctttcctcccgacacataaaacggagtgacggattagcgcatgattaattaaatactatttaactgaaaaacttgaaaaatgaattgatatggttttttaaaacaacttttctatacttttatcttgtaaaaaacatattgtttaatcgtttggtaattgtgcatgtgaaaattgaggggtagaaattgagaaaatgttgaaaggagcacaattttattgaacagtttgacgtgtcaataggcacgtttttcataaaagcggatgggaacaaattcactgctgttttacacatacttatttttgcaagagccgtttggttgcgaagctgggtagtaacagcattgtcgtcggcgtcagtagtgcagaatcccgagtgccatgccgtactccacgaaggcatcatcgtacatctcatccaccgtcttgtacatgaactcgaacccttcactggtcagcttctccgacgagaggaggatcgtcggcttctcagggaggccgccgccgagtctgcatgttccgccgccaccgtcggagtcagctcgcagtggacacgcataatctttgagaccagttcatgattttgtcttacgcatcgatgtcaacgttgtggtgcgggtatttggcggccagggaacgggcgatctgccgcatggtggtgttgagggcgcagcagatgtacctccccgacggcgacggcgacgctttctcggcgaggaatatctcggcgcggcagaggtcgtcgacgtgaaccagcttcagcccgccggagtactggtcaatcattctcagggtgttgatctcctcgttgcctgaaatcgaatcggacacgtgagtccgaaccagatactccctccataccatgaaaactctcgttatactaaattatattacattctaatactaggttgggtttttggaagaaggagtttattctagcacacttaggtcgtgtttgctactgagggttctcaatcttctctctcgtttttctcgcgcatgcttttcaaattgctaaacaatatgtttttgcagcaactttctatatgaaagttgcttaaaaaaattaaattaatctatttttttaaaaaagttaactaatacttaattaatcatgtgttaatgaactgttccgttttccgtgcgg

SEQ ID NO: 29637 - DNA, 657 bp, Oryza sativa
gcgggaaccgcaagggggatcaatctaccccaggagggggtcgtgcttctgggccccgcgtcaggggctcggggagcaaccgccctatcgacgaccgggggaagaggaagctgggacgaacacctcccccatctcctccccgagggggcggggcagtgcgtgccagcagcaggcgcccggagggggccgcgccaacatcacagcccgagggggagcgcaagaagaaacggctccgcaagatgggggagacagaaccatctcggggaaacctcatctcccctccaaagtggtcgttcaaccgaccccctcgcaggttcatctctcactcatcgtggctgtatccattctcttcaacgcgagttttcactcacccgtctttgttcgtcttctggtcttttcttctgttttagcgagatcccgtcgcgtccctcccgtcattccaagtctggccaatctgaggccgaggatccggcggccgcagaggcacggaggcgagaatctgaccggcgagaggccgcagatcgcctacgggaagctgaagagcccgcccgggaggccgcccgggctcgccaggctgaggataccgctcgggaggaggccgcccgagcccaccaggccgaggaagccgatcgggagaaagccggatttcgccaggac

SEQ ID NO: 29638 - DNA, 2443 bp, Oryza sativa
  unsure (1)..(2443): unsure at all n locations
ggaggagggggaggaaaggaggagatgggccgggggcccatccgaaagaaaggaggaaaaagagaaaaaaaagaaaaagaaaaaagaaaaaggatttttttttcctggaattaaaattgcactttggtgatttttaattggttaaaattatttctagggctctgaaaattccactaaaaatcctgttagcatattttgacatgtagaatccaagaaaaattccacatgccgattccgattattatttgcatttattactttagggtttctctctaggttaaattaaacaatttcttcggacgatttattttatgaatttagagcaagggaggggaacttcagggcgtgacaaacctaccccccttaaacagaatctcgaccccgagattcggaagagctggcgaagaggtgcggatgggcggccttcaattcatcttctctttcccaggtggcttcttcttccgagtggtggctccactgaactttgcaaaacttgatcaccttgtttctggtccttctctcactggtctcgaggatacaaatcggcttctccacataagtcagatcttcctggatgtcaatgtgctctgagctagcttgttcctcaggtaccctcaaacacttcttcagttgagacacatgaaacacatcgtggataccaaccatattagatgggagctcaagctggtaagcgacttcacctctgcgttccaagatcctgtatggtcccacaaagcgtggtgccaacttgcctttggtttggaagcggtgtactccccgaagcggagtgacacgaaggtacacataatcccctgcttcgaaagtaagctctcttcggcggttgtcagcataactcttctgtcgagattgcgcaattcttagcctttctctgacagtcctaactttctcctctgcttcggttaacacttctgtcccaaacagttggcgctcacctgtttgatcccagaaaagtggtgtgcggcactttcgtccgtacaatgcttcaaacggtgccatttgcaaactggactgataactattgttgtaagagaattccgcataaggcagacttttattccaggctccgccaaagtcaagcgcacaggctctcaacatatcttccaagatttgatttactcgctcggtctgaccatctgtttgcggatgataagccgtgctgaaattcaaacgagtccccaattcttcttgcagtttctgccagaactttgaagtgaactgactccctcgatcagatactatcttcttaggtaccccatgcagacacatgattctcgagaggtagagctccgccaaccttttgcccgtataggtagggtgtactggaataaaatgagcaactttggtgagtcgatccacgaccacccagattgaatcgtgcccccgacacgttctgggcaaacctgntatgaaatccattccgatttcttcccatttccattccgggatctgaaggggttgtagcagtcctgcgggcctctgatgctctgctttgactcgctgacaaacatcgcagagtgcgacgaattcggctatttctcttctcatgctggcccaccagaatttctctttgaggtcctggtacattttaatactgccgggatgaattgaatactgagtttgatgagcttctgtgagtatgagatccttcagttctttgtcgtcaggcacacacaatctttctcccaaccagattgtgccattctcatcctcatggaaatctcgagcttttccaaccctcatattctttttcagctcagctatttcaagatcatttacttgagctgctctgacttgatccacgagcgtaggcccggcctctagggcagctacgtacccgtgttctacgatgcccaaatttaggtgctcaagatcttgctgcatttgtcacacatgacttcggtatatactgcattgcaatagctctttctgctcagagcatctgctaccacatttgctttgcctggatgatagtgtatccccatgtcataatctttaatcaactccagccatcttcgttgccggagattaagtcgggctgggtgaagatgtacttcaggctcttatgatcagtgtaaacttcacagcggttgccaataagatagtgccgccagattttcagagcatgaaccactgctgccaactcaaggtcatgagtgggataattggtctcgtgtgggcgcaactgtcgcgaagcatatgcgaccactctgccttcttgcatcaacacacatcccaatccttggcgagatgcatcacagtagacctggaagtctttcgtctgatctggcagaattagaactggtgcggagactaacttcttcttgagttcttcaaaactttggttgcactcagctgaccatttgaatttttcatctttctttagcaactgtgtcatgggcctggcaatcttagagaaattttc

SEQ ID NO: 29639 - DNA, 1656 bp, Oryza sativa
ttgcactcagctgaccatttgaatttttcatctttctttagcaactgtgtcatgggcctggcaatcttagagaaattttcgatgaaccgacggtaatagcccgcaagtccaagaaaactccggatctgagaaactgtctttggtggggtccactttgtaactgactccacatttgatggatccactgccacgccttgagcagaaatgatgtgacccagaaatttgacctccgataaccagaagtcacacttgctaaacttggcatatagttggtgctccttcaatatctcgagtaccaggcggagatgctgctcatgttcctcttctgattttgaataaataagtatgtcgtcaatgaataccacgacaaacttgtcaagaaactccataaacactttgttcatcaagttcatgaagaaagccggtgcattggtgagtccaaaggacataaccgtgcactcaaacaacccataccgagtggtgaaggctgtcttgggaatatcctcttcccgaattctcaactgatgatagcctgatcgtaggtctatcttggaaaacaccttagctccttttagctgatcaaacaggtcatcaattcttggcaacggatatttgttcttgattgtgacctcattaagggcgcgataatccacgcacatcctcttggtcttgtctttcttctccacaaagataaccggagcaccccaaggtgaagtactcggtcggatgtaccctttctgcagctgttcgtcaacctgcttcttgacctctgctagctcattagctgccattctgtacggcctcttgtaaattggagcagtcccgggtgccaaatcgatccggaactcgatttctctcttcggtggcattgtagtgaggtcttctgggaacacctcaggatactcttgtactataggaatatcctccaacttcctgggacttttctccactgtttctgtctgaccctcaatagcagcctgattcagactcgctacggacttctgcgacgctggggaacggaaggtgatcttcccccctttgtcgttggttagggtgatggtgcggcttgcgcagtcaatcactcccttgtttctggtcaaccaatccattccaagaatgacatccaggtctttagattcgagaaggatgaggttggatagaaacggtgatcttttgatctctatagtcaccgaggggcagtagtgtgctgtcctcatatcatttccaggggtatgaacctgcatcggtattttaagttccactaccgataatccatgtgtcccagcaaatcttttggaaatgaaagaatgcgaggcacctgaatcaaagagaactgttgctggatatgagttcactggaaacgtgcccaacacgacctctggtgctgcctgtgcttcctctgcagacacatgattggcgcgggcctggatgaacctgggtccagtgcgattcagcttcggacacttgccagcaaagtggccgtgcttgccacagttgaagcagggtcctggctttcctacagcccccttcttgggttgttctgactgaactgacacagttggcggatctgactgagctggtgccattagtgggggtggagtcgagttgtggttgcgctgcttactgttgttgtgactgccaccgttgtaatcgttg

SEQ ID NO: 29640 - DNA, 1065 bp, Oryza sativa
ttccttgctggagcgcacggaactctctcttctgttgtgccataatcccttcaggaatctgtgccttcctgaagctttgacaaaactctgcccaagtaacctccgttgcatctagacgggtcgccacgtagttatcccaccaggcagaagcgggaccttgcaactggtgtgtagcaaaagcaactttctcttggtcgttgcattgcagtaggttcagcttcttctcaatagcacggagccagtcgttggcctccattgggttggtggtgcttgagaaagtgggtggctggatacgaagaaagtctaacagtttggacacgtgtgatggtggaggaccaaactgctggttctgttgcgcctgctgcaacatctgatggtaatgttgctgcatctgttgcatcatcattgtcatcatttgagtgactgttgggttttcgggcggtggagatgatctgctgccagatgcaccactgacatgagctccatcggtctgctcttcgctgcccctggcgtcgctggagtcacggggatcattccttgtcttcaccatctggaggggataggtagaaataagagaaaggaagaaaacggatggctcggaaactaatttttcttatgaaattaagtgccattatcttaatctggattaaaacactgaaaaagaggcacacaattcctaattaaggctgtcataccactcacacatgatatcgaccgccgactaacccacaagcaacaaacctaagcacggaaactagcaagcaaacaaaactaagaagacgataaagctaagggcggcgactctgaagcttggagcggcgcttgcgatcgaagaacaggtctgacatctaaagagtacagagggataggaaccaacacatgctcaaaaccaaattaaataaagcaacaaatgactaagtaactcgccgagcatgatgatttttatgcatagaacatttttcatgaacccggataaagacactaatgcgactgactaaaccatagcttaatgcataaacttgttgcatggaaaatgatgcgcataaaattgccccatcgaacata

SEQ ID NO: 29641 - DNA, 980 bp, Oryza sativa
gcttgcctccttattagtcaaggatgcaacggtacgagcctatagaacagatcctgttcaagtaaggtcgtgcttagcggtcaaaggttttgcattttaagctagattcatttcttgaagacttccgaggtggtactatgtttggcaaatgacgccctcccatgttttgttttgtattgtctcaaactctaggtctgtgcacatggttgtcatgtactgggctgctgggccttccttcctaaaatgaacccaggccttcggctacaccatggagccgtagaaagtggaaacatggttagtggtaaaaacagttacagaaattcttaaccaaccaaaataaactagtaatttgcccatgctaacgctacggcgatatctagcaaattttctacttaaaaattattttactatttcgaggtccaaatttatttaaatattattatcacaaaccggagtagctctcagtatgaaagttcaagtcgcaatcaagagaagtaatctgttcactattatttttctacttctacatgcataaacaaatatcaattaaaggttttctatttttttcatcaataatcaccatttgtatcacaattctctatccagcatttaagaaaggtttaaaaatatgtatggctatttttggaaatatcatatttgatagagaacctccgtccgtcgctcctccgttggcctcttcctgtcccagcgacagtacgccgtcgatcttcttcagcgagccggcatgtctgaatgccaccccaccgccaccccggttgatgctcgggccaagctttccgcctccgacggcgcccccgtcaaggatccgaccgagtacaggagccttgcaggcactctgcagtacctcactctcactcggccagagctcgcctatgctgttcagtaagtctgctcttcatgcatgatccacgggagccccaccttgccttggtcaagtgcattctgcgcttacgtcaaag

SEQ ID NO: 29642 - DNA, 8514 bp, Oryza sativa
cagacatggtcaagcatgtccccaacactgcctcgaaaaacgtttgtactgtatttactacagtagtgcatactactaatggtgtcatttaccccagttaatcttgtttaagctaatgcaggatgaagaatcaataatggcaggttcgaagcagatggaggaaagcgtagcgaagcacagagcacagcctgatgcactcactcacatagaaagcagtgacaactccggcggaatcccccgccacgagcttcaggtcggcggtcgccttgccgtacaggaacttgctcttcgacgcgaacccgccgcctgcatccacaacacaaaacattctggtcatctgtcccccaaatgcagatcgagaacatcttcacccattcaccacaaaaacttcaacggcgaagacgatgaacagttgaacacgtaccggacgagctgtcgaggcggagcttgaggaggtcgccctcgtacacgacgtggtcgttggcccagctcggctccaccacgtcgtcgaacttgcccgccgccgccacaccggcggcgcacaccaccgccaccaccaccaccacgacggccagagacgccattgtcactgctcacttgctgtgctgttcgatcgactcgactgatgggctcaatctcaagctgaagctgggtgcgatgtttatataggcgagacgtttggcttacggtggaagggtggcacgtgacacgagggcgccacgtcggaggccaagctagccgttgggcaacgggggacccacgcgtcaggagatagggaccagtggtcagtctagcgctctactactactacagtctgcgtgcacagctcagctgctgtggatttctccaacttttgcggctttgttcacagcgagctttcagcacgcttgggcctctttagttccccaaatttttttcccaaaaacattatatcgaatctttggatatatgcatgaagcattaaatatagataaaaagaaaaactaattgcacagttatgaaggaaatcgcgagacgaatcttttaagcctaattagtccgtgattagccataagcgctacagtaaccacatgtgctaatgacggcttaattagtctcaaaagattcgtctcgcggtttccaggcgagttctgaaattagttttttcattcgtgtccaaaaaccccttccaacatccggtcaaacgttcaatatgacacccaaaaatttccttttccccatctaaacacaccctttctttctttctttctctcgctgagctacgcggctactggccacagccgctgtgaccagtcggggaaagaattgtttctgcctcgcttgctcttgcttgctcagcacagctagccagctagccgtacgtgaaacagtacactagttggttacagctggcgagtgggcccgtatgtaggactagtacgtgcacggtaaagagaaaaaaaggtgacagtaaaaacagcttggcccaaacagagtcgtgcaggggaagtagaagatcagcgatacataaagtgctgcgccctctgttgctagcctgcttgcacttgcattgcacggctagcacggcttgatggagtctgcaggatggcttgcaacggaaggagcattcaaaaacctgatgcagatctattgacccacttacccgtgtggattatagtcaagtctttgattaagtagaactaacacagcagtacaaagtatcactatacggggtacttggattagaaatgtgaaatgctagatgttcagatcagaaatggaatctcagctgcagcaactatactacaagcagtaaaaaacattcaaggatcaggcggtgacgtcgaagcctaataccagcaccctattttaaggctgtcaatccacgtgattagccaatttagttaatgctaatcactcgattaggaacagttccccaggagggagcagggaggcgtaggctccagctgtgaatgagcagggagccatcaccaccctttatcaaaggcgcccccccggttgtgaaaaaaatgctgcgatgcgatcgatggcatgagttttggtgcagagaacgacgatgatgcctctcctgccccgtcgattttttactgcagagaacgaaactcatgacgcatcattccacgggctctctcctcctcctcctttcgctttcgcgacgccccagccgatgcgcataatcttttgtccttgtcgagttcacacaaaagtcacaaaaccgctcgtgttaacgttacagtttttaccgcgccatcagagtttaatcgtacgctaagcttccattttagtaggactagtgggcagtggcttactggctttcatcccccgcaaatctgcattgttcttcaaggaagatacagtcggaaagaggtgatatatggctcatgctggtatggtacggtatggaggatgcgcataaccaatgcgtgcttgcctggtgtccatttcaatcgtgattagctttcggaaaatgatactctcttcgttttaaaatataagtatttttagctatgtaaaaattattatattttaagacggagatagcatattacagtattccattcgaattcaaacggaattatacatcagagatagcagctgatattaggtatcaagcttttgtccaaacagaatatcaaccgataattattggatacactcatttcgtccgaacggtttaccattctgtagtattttccttataacctttactgtactccagtaaagatatttactgaatgtggggacattcctttacagcggataatagtgacatcacccactgaacctgcaataattatgcttttctcccgtgtacaacgcgagtactctccccgtctcccgtgtcccgtccgtggaaaagcaaaagttttgggagtttggactcatcttttcaatccgcaacttttcgaagtgaaaaccgcaaacctctcctgctgctggaccccctctccagctgtcaggtctcaagtgtttgatttttgttttcaaatttaaaaattgtaccgttgatggtagagacaacgtttagggcgtttaaaggatttctaaatgttttccttttaaaaattgaaacctttggattttttagtattaaaatggatcaaatcttatttaacttattttgagacaaggggagtagtagtaaaattgtgtgtcatactatctcatactcgtatctcattctaaattagtttaatttggaatgtaaggagtactcttgtcaacattagcactgccgcactaaaattgttacgtgctccctctgtcccattttaagcgtagtcataagttcttgtgtgcatctttgatcatatatcttatttaaaatactttttaaaaaattaaagaacataagtcatacataaaagtattatttatattttatcatctaaaaataataaaaatactccctccgtcccaaaatgtagcagcataggatgggatgagacccattatatgactatgaatatggacatactcattacaaaaaaaggttaaataagacagaggatcaaagttgaacacagaaacttatgactgcacttaaaatgtaatgggggaatatcattttgtgtggtactgttactagtgtgctaacagctgtataagactatgtttagttcacactgaaatttggaagttggttgaaattggtacgatgtgattgaaaagttgtgtgtgtataaaatgtttgatgtgatcgaaagttgaaagtttagaaaaaaaactttagaactaaggctgtgtttagttcagcgcaaagtttggattttggttgaaattgaagatgatgtgactgaaaagttgtgtgtgtatgacaggttgatgtgatgaaaaagtttggatccaaactttacatctaaacacagcctaaacagcgcctatgtatacgagaaatgaatgtactcgtacgtacatatacggccaccgtatattatacaattatccgcacagcaccgtgcatttcacagcataaatggccgtccaatcaacgtgacccgaatgctctgctctggacgctgcagtttttgagcccattttttacctcgtcgtcgtcccggtgaaaatttgctcccgccacggtgcgtcgctgttcaccgcggcattggataggttgatatggacttgctcggcttgtcccgttgcactcgtgacgcatccgattcaagtatgcagtataccacacgagctgcaaccgctgctcgacaacgacctgaggctggctgtaaacgtcgttcgtgcacgcttcagcctgcagctcgcactgtgcttctcccatctcttgtactactgataattgtgttcagcggagcacagtaaactgcccccacggtacggagtactacgtacagtaactgctctagtaactttggaagtgtggtttaagactgtcagtacgtgaagctaatggtgctcagaggaggattaattagtcctaaatgagttgtactacatgaaaaaaaaaagaacacgtgatggttatggctagtggctagcccttggccattggcagcatcgtgttggcagtgacttgacagggttggctcggcgtgtgtggtgatgatgtgtgatgagatgatgggcttctgtgtgtcaggcgtgcgaaattattgcgaaccagctcgcgtcacatcgcattgagcacagtaccgagtgactactcccgcggcaatggcgttgttgttggccatggccgggaaatggatgcatggggaagaagctggacatgtcgttgcttccatttctgaattccttcagatggccacttgcgtctcaagcggtcacgcatttcgcatcggcatggaaggtagaagtaggagtatactagggtggtaagcaggtgatagagatcagatgtcccgtaggatttgatcaaactattatgatgcacatttcaggttattcagctaaccgatgtccccagtatataactgagtctaccgttgccgttgcagatccaagatgtgggttaagggctgtgtttagttggatccaaagtttgtattttggttgaaattggagatgtgactgaaaagttgtgtgtgtatgacagattgatatgatagaaaaggactgaagtttgaatccaaactttagatctaaacacagcctaagtgcacagttagtattctgaagtagacggcgctttatagtcttgtaccggtgcagccaacagcggctctgttcctgctcgtttcagtgtttggagttgtttcacgagtaaatacggctagtggctcagttaactacccattcaaacgacaatgaatttcgatcaggtactcacagtagtagttactggtacgaagcaggtttcatgatggaggctgatcggttcagcgttttcattactagctcctgaatgagaaaggaagaaattaagacgggaacagagcaacacagcaagtgtagtcaggattccgaaagaaatttgctgtagctgtactgcttagtagacttgctgtggtagtagccagggcgactcatgagcgtagtcacaaaagcccagcccaaacacggtgtttccagcggaaaacggcccaaaatcaatttgtctccggttgcacgagcgaccaacacgtagaagaatccaccaattcccgccgattccgagcagaatcactcgcatcacatgcatgttttccatgatcattttaggagggtcttctccccttcctccaggccggccatggtgtcgtacatgggcttgttcttcgtctccggcaggcagaacacgaggaacccgccgacgaggcccgacacgccgaacagcgcgaacggcacgcgctccccgagcaccaccaccagcggcgccaggatggcgcccatctgcgacgcctgcgacgtgcaccccagcgccgcgttccgcaccgccgtcgggaacagctccgccgtgtagatgaacagcaggttgtacgtcgccgccatgccgaagatccccaccaccccgcacgccagcctcgccaccctgccctctatcgatcagaaatttgttcgcgtagctgaatttgattggatgattggagattacgtatacctcatggcgccggcgccggcgatgaggctgccggcggagcaggagatgccgctgagaagcatggtgccgatggcgagcggcttccggccgaagcggtcgaggagcagcgcggtgaggaggtaggcgggcatctcggcgagcgagttcaccaggacgctgacgtagaggttggtcttgaggttgacgacgttgaggctgaggccgtagtacaccaccgaggcgagcaggttgatcaccaccgagagcaccagcctgaacctcgtcgtccgcgaccggaacacgtcgatgatggagcccgacgccgacgctgacgagtcgacgaccttgcctgcgccggcgccgttgtcgtcgtctccctcgtcgtcgagcttgagggacacgtcgtcaggaatgctcctgccattgctggacgcgatggcgcgcacgacgcgcatcgcgtcgtcggcgcggcggcgcacaaggtaccaccgcggggactccgagacgaacggcagcacggcgacgacgaacacgagcgacggcagggacgtgaccacgtagagcatcctccaggacgtcgggaacagcgccgcgatgccggcgagggcggcgatcccgccggagaagaagtagaaggtggacatccccccggccccgcgtcggaagggcccgacgggctcggtggcgaggacgaagaagcagaggccgacgctgccggcgctaaacccggtaagaaggcgcagcgcggcgtacgcccagtagttgggcgccatcgcggtgagcatgccgaagacgccattgaggacgccagaccacctgcagcgagcccttccgaccgaggaacgaatccgataggtgtccgaacacgccggcgcctgccaagacaacacagctaaaattatttctacttcttttttttttctttttctttgtggaactcagctacaattacttctgtcaccaaatcaaaaaggaaaggaaaactggcccatcgactgtgtcagctactgggccaaggcccagcctaataactagcctacgttgatgatgaaaattaggcccaaatgggccaccagcgccggcgatcttgactggttaatgccaccgccgaaacagacatggtgaagtagctattagtagttctaaaaaaaaaaggttaggagctattgatcactaccaggattcgacaagcttgattttggtgattatgtagtaaccgatataatgcgattcaaatgatttattgatctcacatcttggcttccagtccccatccaaaattccaaagataccggtgtcaggcagggagatgctagtaccagtcaaaagattcgaaagtatatcttgttctggccaatccaaacaaaaagcttgaaaataacagctatttaaacatgcgctgagaaacaaggaaggaaatttctgcgagacacaatctgcatccggcctattgccacgtgatttagatcagatcagccgaactagacggctagcttttcatcgagcaccgtgagataacgtaatcaattcagtgacctgatcaattatattgacagtaggttaacaacagtgacaggttgggctaaagcaaataacgacagtgagcgcagccacgcatgcaggaacccacggctaacagggtccaggcagcatattgggttcgatcgatcgacagcttttggaattaaagttagcgaaagatgatgttaagacggtacaggagtcaagcaaaagctgaacaccgaactgtccggaacctaattaattaatctcccagccgccagcagccgcggaaagataagggaggcattggcacggcgccgcttgtgcagataatgctcagtaatttacatccattatgtcgacgatgctaatgctgagtggctgatggcataaagttgacctgtcaaatctaatctcatgtgtaatgacaaccaatctaaattgttaacgagtgtgatgcaaatatgcaattgttcagtagtaaatcggaccctttatctgttactagtagaaaaattaaacggatgggacaatgaactacagtagcacacgctgggatgttggctggctggctggctggctggctagctagctccaagatgcggccgtatgcaaccaaactagctggagccacacgtacgattccgggctgcaaaaatgcaccaccacgaaatctcccggaacgtcgcggtctgcaatccatcgtccaatctagtttgaaatgctagcctatttttgtttcacggattagtctcgtatattacgtattgcctctcacgtcgatgccacaattaaggcaagcgcttcatccaatcttagtattttgcattttggcattccgttgcgtaattcgtcaaaaaaaaaaactacttggaaacgaaggttatttggacgagaattggagcactgaccaatcatgcattcggcgaagaagatggcctggacgaggccgaccttgtaccgttcggcgtaaacgaggccccactctgacaccg

SEQ ID NO: 29643 - DNA, 5671 bp, Oryza sativa
gcgcctccgtcgacatggctatccgctcggtcggcgcgcgcgtgtgcgtgcgtgcgtgtcgctcggtggcgtggggggcgatgcgtttttgcacggtgcgccctgttgtatttgtagggagagcgagttgcctgtgtttgtgagttgtgtactttgtgtgagttgtgtgtgttttgtttgttttatttggaagttatttacgcagtttcttaactctgcttactgtcaacagttgcgacaaaatcatttttctggactactgctagtacatgctcttccgatccaggatttggatctacagcgtatttgtcacatctggcgtggtgattaccatcgttggatgcattagggctgagtttagttctaaaccttttttttttcaaactttcaactttttcatcacgtcaaaacttttttacacatataaaattttaactttttttgtcacatcgtttcaatttcaaccaaatttttaattttaacgtaaactaaacgcactccaaggtgaagtatctttggacaagttggaattggaagactgtaattgcgattggctttgcattttacagtcatgtactagtacttgtgtgctttttggacaggttgccgtgctgcacaaaaatacctatccgataaggcgactttgaatctaacatggattaagtatggcaatgcatgccgtggctgatatgggcgcctgcgtttggttgtcttgagctgtttattagtggcgtatatatgctcaagagaaatgtgcgtaatgtatttggtctactcatagtccaaccagatgatttgagaagtcaattttttatatctacaaggctttatccggctgagaagaaaaggattgccatcgatgtatcggagtggggcagtgctgcactgctgcccaagtgcccatagctggccatgcccgacacatccctaatgataaggtttttttttttcatttttatggagaactatgattatttagttcggcagctatatattgagagaagatttctctttaagaccgtgttatgcagttgtacactgagaaaagatttctctcattctctgcacacacgtttcccgaactattgatggatttttttaagaaaattatatagaaaaattattctaaaaatcatattaacttatttttaaattcaagatagtttataattactctccgttttaggttataagacgttttaactttggtcaaagtcaaagtttataggtaatatagtaatatttataatactaaattagtttcatcaaatcaataattaaatatgttttttaataaatttgtcttagtattttttttacaaaattgttcaaacttaaaacagttaaaacgtcttgtaatctagaacagaaggagtaataaattatatactaatacttcaccatacgttccttctaaatcttctcttttcctcgtgtccaccatgcgctcccttccaattctcccgtcatcgatcgagcacgtacgatcgtgtacgtttttttagtcccacatggtgtccgcccgggcagtggcgttctattcgctcgcgacgtctcaagggttttggcatgcagtagtagctgctgccaccacgtcagtccaagtccagcacgtgtacgtacgtgcaggatgtcacgactcctgcgttggatcttaacgccgcacctcactcgctccgagatcaatcgtcgtcccgtccggatcccatcccggccgcgcgcgatcgattctgcacgcgtcgcgtggcgtcgcgcgcgcgtggcgcacgcagattcaccggtacgcgggggggctcatcgcgaacagcattatgtggcggtttccgctgcgatcgcgggtgcctgcgtgcggagtgcggtgtcgctgttgcccgtgcgggcgtcgcgtcgcgtggtgtgattcagaatcgtgcgggatatgacgcttgcattgtgatgggcctaatttgtgcggccgatccatcgcttcgttatttgtagtagagcccataacaatagaagtacttatcgtatcttgccataccgtgtgtcgtgacaagtactaacacaccacgacaatgacttcatttcacacaagagtgaccagtccaaactccaaagtgaaggagcatcatcagcggttcattgcggtagaatccccaggaccttgccatactcgatgaggtcgtcaaatacctcgtccagatccgtccacttgaactcgaacccttccctcaccagcttctccgacgaatagcacactctcggcttctcagggaacccttggaagctgccaatatacgcatacaagagacgatcaccgattcaccgtcagttctcttccctgattcaccgtactacctccgtaaaaaaaaacccaatcctgaatttatgtccagattcaaatttagaattggattttttttaaaacgaatgtagtagaagtttgtgtcgctataactcgaaactgagagtgccagattgccagttcgtacgtaagtacgtacccgtcagttttgacgttgtaccgagggtgctttcctgccacgaaacgggcgaatgccacgacggtggtgctgaggctgctgcagatgtacctccccgacgccgactccttctcggcgacgaatacctcggcgcggcagaggtcgtccacgtgaactgtcggaatggggccggttgctgccaggcctttcagggtttttagctgcgtctcatcacctgaaaaaacagaaaacagctagcatcgatcagtcgaatttgtgctcgctgatcttcttaaactaatttggcgcatgtctctcgatcaggttctcactagatagcaaggagagcatagctgagacgcttgttgcggccgtcggcgtcggcgctgcacccaaagtgaacaccgggaacacggtgatgaggctgatgttgttctcctccgctaatttgcatgctgccttctccatgagcacctttgagacactatacgcctgcgaaaaacaataatggggtatgctaacgttagtatagatgccaaatagatcgcccggcacagccatgcctagggtgaggtcagtcgggccggcctggccctacacaccgggacgtgccgtgccagctcacgggctacacacacggcccagtaagactcaagccgtgctgggctagcccgaaggcacgacaacctatcgtgcttctctacagaataagtctatttttcctacctaaactctgtgggctgtgttcatatggctgaaaaataaatctattttgtattcctcttgtctttgggctagcataagtctattttacatccctccactatttttgttcgatcatgccgtgccggaccggtccaccgtgccaagggagtggcccaagcacagcccggctgtcgggtcaggccggcacgagcacgaccccggttgggctgtgacgtgcttgggccgggctaaattggcatgccttgggctgggccgcgggtctcgagccatatggccatctataagcattagggcgtcatcatctttatggagtatactagtcttctagtagtagcattgtttcttctttttagagtttaagtacttctattcgtaacgtttgtttgagtggatatagagatggatttctatgcattatcaaaaaaattgtagggatgagatggaggctcaaaaaaggtagaacgtgacccaagctggtggcttctctttcgtcaggtactcgacgtcggaccaggaatcctcgtccaggacatggccgtcgccttgcagcggcctgccggagacggcgggcgccgacgatgtgaggatcacgcgcttcaccgtgccggctctcacgcacgacctcatcacattcatggttccttggacgccggcttcaataagctctttctgccataaattaacgtacaaatgcagctttgtcatcgtagaaatcaagagcaaattaatttcagaactggagacttagagagcatatatatatatatatatatatatatatcatcagagatgagacaacacaacatgcagtggtgtcgattagagaaagcgcgctaattagctagctgttcacctcaggattctgtgactggaaattcaccggagcggcgacgaggaaggcgtaatcgcagccggcaacggcatcgtcgaagctgccttcttcgtccatgtcagcgcggaagacctccaaggggcctagtgcttccaagtccttgagatgggaagtcttcttcatgtcatctgaatacacaagagtaggatcttcagaggcagaactgaactctggaaactcgtagtagcgtcgtcttgagaattgagatcataacgatttgcatcctttccagcatatttcactatatgaattaggtgcgactatcggtttgaacatgtaaatattttctacattatctaaaaaaaatattttctacatggtgcaggtaagagtggcatttggcatttgctaagtagaagggaaaattctattcatcctcaggaccctggtgctctggtctcttggcagccgtggaaggaacggaacttctgggtttttgactcggtgctctcttcagtccctgtggtcctggaatccatcctctcggagggtcatctgtggtgccacttttggggattttttgggagtgtagcgtggctatgccccttcccgctgttaggagttgcgtttagccgccgtagtacttcctaagctttagtttacttttttttttttttgcttttttcctctttccttggcataagccagtctggctgattgtgttgtgtaacaaaaactcattttcttctaatatatattgaagtgcaatctttttgcgcgttcgcgaaaaaaatattcatcctcgggaatgttctctcgttattttgcatttcgccaaaaaaaatcattatttttcttaaaaaattaacaagattgatcaatatgtgatatattatttcacaaacaatacaagttcaaaatcagcttacataagtagaaatgaaaacgacaaatttgactcaaataaaacgtgtaatttgcaaccaaatttgttatttttgttctaataattgtataagttgaaatttgaatatatctctggattggtatatatcttattatttttctagaatcttttttatcacaaagtaggactttctttctgttgttcatgacgacaattcagaaaatatgctactgcggaccaaagattccacccctgaatctgaaaggaaggaaaactttaactgtgcttagttcacgtcaaaattggaggtttgcttgaaattagaatatggaaaagttggaagtttgtgtgtagaaaagttttgatgtgatggaaaagttggaagtttgataaaaatgtttggaacttaacaagggctgaatacgtatgaacagaagattaaaacgggaaataataccacctgggtttctgaccgtcgtgttgacagcatatcccttctgaagcagcatcttgatgagcgccgaagcgatatacccgttcccgccggtcacgcacgccgtcttcatctcaaccgctgacatctcgtcgggaggacacgccgcctacttcgacccctcccagtccgcctgagaactagctaggacgacgatagttcagttattaccggcgttcctctgatctgatcgcctgtcgctaaatgcaacaaccagagatggtatcatatcatcgctgtttcaattt

SEQ ID NO: 29644 - DNA, 2978 bp, Oryza sativa
ttgcgtgggcagcacttcggtcattacgccggcgctcgatgctggtgcgggcgtcctgctccccacgcagatcttcccgggtcgaagaagtcgacgaaggagtgacggccgaacggcgaacagcggctgccgctcgtcgtgccctccgtcttgacgacgcggagccggtggtagcagcaccagaggccttggtggcggaggaccgcccaccagcatctaggcgctgccgcgccgtcatgaccaatttggccacgtcgtccagccatcgttgggctggagactccgggtcagggacgacaggcgggtggcgtaagagcgcgcccgtagcttggagcgcgccctggggcgtgctgccgtcgccgtagacgaggaggcgacgctccccatctcgccgttcttttccatcgcccgcgatcggtgaagtcgcggatctttcgaccctctcgagcgcctccccccgcttaggactttggcgtgaagggggcggtggagtacgagctcgacggcgtgggttcggctccccgtcgtcgccactcacactcggagagaggtcgtgcgcctttgcttgctcagccatgaggctgaacaggaaaagcttggtgcacacgaaagagcgcaagagctcagaagatcactcgcagagtcccctacctggcgcgccagatgacggagcgtggggctcctcaccgggagaccgcgctggcccccctttgccggttcggccggggaccctgggtgagactctaagctcccaatctgtatgtggaaggttcgcgagaccggaagcacagaagacaccggcgatgtatacaggttcgggccgctgagaagcgtaataccctactcctgtgttttggtggatctgtgtatgaagcagctacaaagtgtgagccaacctctcccttgttctaggttccgaatctggaaaaaatcaatccaagaaaaagctcccccttctctcagtggtcaaggtcctccttttatatcttaaggggataccacatgcaccatttccctcttttttctgtggggatttcccccaccttctcagaaatagacggagatttgcatggttgccgttcgagtcaccttctgatggaacggcccgcacctacctccactttcgccgggagcaggcgcgacgtagaatcatggctgtctgctggcgacatgaccggtgtcagaatggtcacaaatcggtcattcttgtccaccacgcgtcagcttagctatctgcacgttggctctccttcacactacattttgcctgtaatggttaggatgaagcctggcatatatctgatcagggctaacgtgccatctctgggaggtaacacgctagctccagctggggacgagcgcctagaagccctcgacctgacgggatggggcgaggcgtgcgtcagaccgcctgccgccacctaacccgcgatctgaccggtctgtgactggtcacagaccggataaacgagtgcactgcactgcgctacatgcggtgtgacacgctcagccaaaccgcaattaatgtggttaggtgagccccggtgggctcacctaacccatacacgcggagcgaaaacccacgaggggtcagggcgcctcggccctcggggccgaggggggtgcagcccgaccccctcggggggactaagaggagggcgaacacatcaccctcgggcccgacgtcccccgagggtgccaggccacgtgggcgattgtgtctgcctcaaacctctagtcatgatactcccgatcccatgtcaccgacaacctgatttaagtatacatcgacataaaaattatatatcgttaatatctacacccgatcaagtagatttagtttttccttaatcattcacgattgccgatcgatacacagatgacatcggctcggatataaatgatatgtcatcggcatctggccgatcggctatcatttatagatttaaccacggttcttttgtctttatttcttgttgattgcaggatcaaatcaactgacacgctcacacatccgaaggcgagttttggacctgcactggagttaagtagatctcccaggcctcgtgttttctgtcaacagccaccccttctccccaccgaccaccgccctcctccacgctgtccgtcggccgttgcgcctggagggaggagaagagagaggagagagatacaatgaagagagggagatggggagagaggtggaagaagaggattgtgagaatgacatgtggggctcacgtgggccccaccggtcttaattatttttttctaactaacatgtaggctaacagtttttattattttccaaattaaattgccacgtaaatgccacgacaatgccacgttatccaaaaacctaattaaattagccacgtaggtgccacgtcagcgaaaaatgagaacaatgttggtgatggatcttgtttgcactggttttgtaagttgagggacccatcatacctagtttttccagtacaaggacgaaaatcagattcaaattaagggactttaaatgaacttattctaaatttgctatgggccaccttgtttacgggttagagagcccataacaataatggttaattggatccagccatgcatcgagcctttttatagatcgcaagtggtctcaaaggtgtggtttttaaaatgggattggtgctggagcactcattggtgccgcatccctagtgtcggttgagaaaaccgataccttaagaggtttttcacatgttctgtggtagtgaaagggtccgtatcataaagagattaccataccgtaacacacaacaatgacttatttcacaagacaagaggactaacaatttcacaagagaatttttatgtccaaaactccaaattgacggagcaaccatcaattcagtgcggtagaatccccagggccttgccgtactcgacgaggtcgccgaatatctcgtccagatccgtccacttgaactcgaacccttccctcg

SEQ ID NO: 29645 - DNA, 936 bp, Oryza sativa
catactctcttaattctaaaataaacaaatcaaatataaaatgtgatatatcttgaatctgaacaaataaaagagtagcttcttaaatttgccgtatgtttctcaggctctcaccagacagcaaggagagcgtagttgggatgcttgttgtggtcaacggcgtcggcgccgcgcccaaggtgaacaccgggagcacggtgatgaggctgatgtcgttctcctccgcgaatttgcacgccgccttctccaaaagcaccttcgagacaccatacgcctgcaaaacgcaaacgcaaaaacaatggggtgtgctagcatcagccagccgtcattttcatcagcccggtaaaaaatgtatatgaatgatttgatggaggaccaaaaaagaaaggagtagaatgtgacccaagatggtggcttctctctcgtcaggtagtcgacgtcggaccaggacgactcgtccaggacatggccgacgccgccttgcagcggacggagggcgacggcggccgccgacgatgtcagaatcacgcgcttcaccgtgccggctctcaggcacgatctcatcacgttcagggttccttggacgccggcttcaatcatctctttctgccatcaaacgttggcaggaaacccagcttaatttgtcatcgtagaagttaagagcaaattaatttcagtactagagactaaagagcatgcttatcatcagatgacacaagacaactgtcaactgtgacgtcgattagagaaaaccggattaattagctaagctagctgttcacctcaggattctctgactggagattcaccggagcggcgacgaggaaggcgtaatcgcagccgttgacggcttcatcgaagctgccatcttcgtcaaggtcggcacggaagaccttcaaggtgcctagtgcctccaaccccttgagatgggaattc

SEQ ID NO: 29646 - DNA, 1540 bp, Oryza sativa
gggctataaagaaagtgtgccaaccggcacactaatgttctggtacttctaattagtgtccaaacatccgatgtgacatggcttaaagttttagtccctgatccaaacatttcaaattattttaggacgaggatgcaacactatgtgcggggttggaccatctatggaaagaaggatggaccatttacggaactgtccttacagaactgttcagttgatatgaaagtgggtggttgtttggttgatatctgattgaggagtactcctttcgtctcataaaaaatcaaccaagtatcgaatgtgacacatgctagttgttgacgagtactacaaataaaaaccaaatctatgaccggatgtatagatggccattcgggcggcacggcccaggcacggtcgtgtttaatgaaatatatttaatgtagtgtttaatgaaataaattttgtgttgtaaatgttgctaattttttctataaacttagtcaaaccttttactgaaaatgtttgacaaaaaaagttcaaaatgatttataatatgaaatggatgtagtattaactactataaatatgccaaatggttttattagattttttaaagaaacttaaaaacatgtccataatatacatcttttaacagtttatgaagcggctaaaaaaacaagtggcatccctaacagaccaacgaacggagccttaggtccctcaaaatggacatcccctaatttcttacgtatcaaccaaatgattcttgttaaatttttttataaaaaatatataaatgacatgcaagaacgaaggatatgctctaagggtattaaacttcattgccattatccactgtgtattaggctcatcttaaaacactgtactatttttttttctttaaaaacactgatcacttatttcgcaagcgcatactccagttcggtcctcgtgacagctaggttgaaggtagagcagcatcagctattcgttcaatgtggtagaattcccagggccctgccgtactctacaaggtcatcgagtatgtcgcccatattcgtgtacttgaactcgaacccttccctgatcagcttctccgacgaacagcagactctcggtttctcaggcatcccgtcgaagctgcaaagatacagagacgatcactcgctcgtcagatcgaacacaacaatatttatctattttggatttccaagttggtcaacaattcgatcgtaccggtcggttttgacgttgtactgcgggtaccttccggccatgaaacgggcaagcgccaagacggtggtgttgaagctgcagcagatgtacctcgccgacgactctgccgacgacaatgacgatgactccttctcggcgaggaatatctcggcgcggcagaggtcgtcgacgtgaacgatcgacacggagccggtgacccactgcaggggcttcaggacttcgagatgcgtctcatcacctgagaagtagtagtaaaaaaacagcagccaacttaaactgtgtaacacgcgttgcaaagagtgttgagacttggggtctgttt

SEQ ID NO: 29647 - DNA, 1729 bp, Oryza sativa
gccaccggcgccggcgatgcgcccaaggtgaacaccgggaacacggtgacgaggctcatgttgttctcctccgcgaacttgcatgcggccttctccaaaagcaccttggacacactgtacgcctgcaaacgcaaatgccattgccaattgggtgcaagcttattttcgttggtaaatttaaagaacttttcggtccaatatactgagtattttaagaatttttatcaaattaaaaatggtattttagtaattttcattctagtttgcaacagcgcagtgtctcatggtggtgaaaataatgcctatctctactccctctgtccttaaataactcaacctcttatgacacatcctactattctagtaaaacgaatctagacactctaggatgttacgagatttttttttaacggagggagtatttcgctataagttgtgagtttacataattaccctcatccaatagtatggaaagacaattttaccccctttaattttatactataatatattaaagcacaaggaaatattcataaaaatctttgaattgtttgtactggcagcacatactagtagtagcatatattagtatatattgtacggtaaaagttttcttgaatttatggataagatggagatgtgaaaatgtcaagagagaggaacgtcacccaggctggcggcttctctgttctcaggtagtcgacgtcagaccaggactcctcgtccagcacatacccgtcgccttgcagcggccttctggagatcgctgcgtccgacgatgttatgatcacgcgcttcaccgtccctactttcgcgcacgatctcatcgcgttgagcgttccattgacggcggcttcaaccagatctttctgccaccaccatcaacatcgcaaaaaaaaaaaaaaaaaaaggaaatcaagattagtagagcacatcagttacagagtatcagagtcaatagtgatgttaattagctgttcacctcaggattctctgaattgaagttcatcggagcggcgacgaggaaggcgtagtcgcagccggcgatggcatcgtcgaagcttccttcttcgtccatgtcggcgcggaagaccttcaaggggccaagtgcctgcaagtccttgaggtgggagttcttcgccatgtcatctgaatacaaaccgcagcaattagtggaatcttcagagatgaaactgaaactctgaaaattcacaccatcgtattgataaagtcgcatcatattttgatccatcatatgtcacgatatatatatgtaactatcggttggaagttggaaaaggataagatttgacaacttctccctttcgaaagatatgatattgtccacatgtgcggctaagcctgccatttgctaatgagtggttaagcgaaaacactcgctaattagctcatatggtactagcaggccgaggatatgatcatatgaatggaagaaacactgcaaaaaaagtaaaaaacacgaactagagagtgaaaaaaggaggagaatcttaccggggtttctgaccgtcgtgttgacagcatatcccttctccaacagcatcttgatgagcgcagaagcgatgtacccgttgccgccggtgacgcacgccgtcttcctctcgaccgccgacatcgtcgtcgtcgatcggtcgctacaacaacccaccagcccagatgagacgaagaggacggggaatttatgtttgttgctgtactttgggaagag

SEQ ID NO: 29648 - DNA, 927 bp, Oryza sativa
tatttcagctggttattatggagaggatttactagacaaaccaagtaaattaatcgtgacgatacaagtaaaagtactcttccgtttcaaaataaaacaacatagtattggattggacacgtacataataaagttggttattattattattattattattattattattattattattattattattattattattattattatttcagagacaagatttttatgggaggaaatattattccttccgtcctataataaattcagttttagacttttctatttatcccaaaataaatttatttttaaagtaatcattacatcatgtgaaagtatgataagcctctcccatttatcccaaaataaatttatttttaactaatcattacattagagttcttgaaaatatgatagtatatatgtattgagaataaataaaaatagaaataattatattgggatttaataaagtgagtatattataggcttgtaggtaaatattggtttgtgtgagataggtaaaaaacaaacttattttggaggaaggaatagtaattaatgtgacataattgatatctaatcaacagtggcctggcagcgatcagagacttgacaagtggcaattactacctaggacaagtggacaacatcgagtggcacttggccccacaatggcactgagtttggtgggagatgtgctacgtgtctgcatgcatttacctcaggattctgagacttgaggttcatcggagcggcgacgaggaaggcgtaatcgcagccggcaactgcctcgtcgaaactgccttcctcttccaagtcggcgcggaagatcttcaaggggcctagtgcttgcaactccttgaaatgagagttcttctccatatcatctggaactcaaaatcacaatgcgctgcagtttcagaggccaaa

SEQ ID NO: 29649 - DNA, 8682 bp, Oryza sativa
caaggggcctagtgcttgcaactccttgaaatgagagttcttctccatatcatctggaactcaaaatcacaatgcgctgcagtttcagaggccaaaccaatggtgttcttgtgaattcccgaaatagttttcttcggtcatatcaacttgaaacaaatcaaacatcagcatttatcttctaccaaacagaacaccgcaaaatcttctatgcacacagcatgctgttactgcccggatctatcgtcaccgcatacacacaaaatcaatgaactgaagacgatctacagaccattgttggggtgagaagtaagaagaatctcaccggggtttctgactgtcgtcttgacagcgtatcccttctgcagcagcatcttgatgagcgccgaagcgatatacccgctgccgccggtcacgcacgccgtcttcctctcaaccgccgacatcgccgcggttagttggctacttcgcctctcctagtagacgaagaaagagtgagaattgcttcacgcaccaaataggagcagctaggaccccaagcactgagcagagcgtactgaggttgcttttggtcggggtcattgttggtgttgtcatgtctcgtggtcatagatcatcatattgggaggtacaactactttgagaaaagagtactccctccataaaaaaaaagacaaacaaaccctgatttccgtgcctaacatttgaccgtccatcttatttgaaaaaattataaaaaaaagtaaaaagacaacttacgcataaaatattaatcatattttatcatctaacaacaataaaaatacgaattataaaaaaatttcatataagacggacagtcaaagttgaacacggaaatccagggtttgccttttttttggatagagggagtatgtgtattagaatatatcacatcatatactaagtgcatttatattatgcattaagtgtatttatattgggaccaaaggagtaggaatatatacatagcatgctcaatgcttacaccctctgtcctataaaaaaacaatttagcactggatgtgacatatctataactataatctggagatacctttgttcatgtttagattcgtatacatccattactagatttatttttttcggaacggagggagaacgtgtcttgtgtgggtctttgattagtagcaaacgtaggtaccctgatttatcctagactgagatcctttgatttaaatcaagtgattttaggatcactaacatgtggatacatactctattcgttccaaaatataaatatttttaaacttcgacacagttttcgagatgctattttgatcaataatatatatatatataatgttttaaataaaaaagagttgcatattatgatagtttgtttaatgataaatttagtaacatcaattttacatgattgatcttttttctactaataggtaaagttaaaaaaaataacttgacactattctaaaaatgtttatattttggaagtaagaaggatctatatgttggtgactcaaagtactccagtagaaaaaggaggtcgagagtattcgttcaacgtgtctttttttttaaaaaaaaaatccgggaacagcaattaagccatctaaccaacatcgttgctcctctccccacccaccctatagacttaggggctgcttgaataggaggcacttatatttctgtgaaatcagtctctcccattcaaatagggcattatgttctaacgagccatttggttctgatcaaggttttgaatatcagttttaaagagcacctaaaaatcagtttaaaaaattattgtatgaagtagtatatatgcatctcatacaattaatttttgaacttgaaactgttctcgctgttgctgctaccggtggtaatgtacgctaagatttgcatcttttcgttgtgatcactgttagatagatctctctccccttgagcccaacggctcaagggggccttgaccgcgccctgatcgggggcgcccagcccaatggctggtgggcccccgtcacactgcgccatataaaagaggggtggaggccggcacggcacatggtacgagattcaccgccgccgccaactccaccccacaaaaccctaatccgatcgagagggggcgcagccagtgacgggaaacgccaccgccgcgccacgcctcatcgccgggacgtctacgaccaccactgccgcagccgtcatcaccgtcgacctcaccggcgccgtatccacgtcaagccgcgacgacaacgacgatgtccggcgcctcttactacacgaacttctcaaccggtcggtatctaaaccctctccctttcatctacaatgtcgttcatcaaacccaaatagaaccacccgactagatctaacctaggtgatcctagagcaaagtctaacaatggtatcagagcaaccctagtgttagatcgtttcggggaaagaaatccaaagaaagaaaagcacaagatccgcacggatcaaaagaaccaaaaaccctaaccctaattcttacctcgtcgccggccgtcgtcgacgccggcaacggagggggggaggggcaaagaggcgccgcctaggagccactcgacggccgcgcgcgcacctgcacgcgcgtgccggcgagggggcccgcggcggcgccgccatctccgtcgtcgccatctctctctcacacggtgggggttagagacggtggggggagcggataaaagaaaagaaaggagcgccggccatggcgcggcggcgcgagggccgccggcgtcggcgacgccgctcggcgcgaccgcgcccgcccgagagagagaaagagaggagaagctagggtttcggcggccggccggggcacgaggggttttgatccccgttttcggcgcccggccgtccgatcgcaaaccctaagatcggacgtccggcggcggccggaccgaaatcggcccaagtggggagcgcgcggcggcggctttcccggcccaggcccaggttgcggcctgggggaggggagggggcgctcgcccgcgcgcaaggtggccatgggccgaccggcaaaggccggaacaaagtccatataaggtccctccggggccgaaaatgaataaaagagaacagtagcaatttttccattttattttgtcaattttcatgcaaatttcaatagaattttgaatagatttttgcatgttttacctctgtttaaatttgaaccaacgggagaattttcacagagagagaattacagagatttagctactgttcatatgattttatatagtcttccgctgcaaatagatgaaattgatgaaaattagtgtttctaaaattaaatttcgaaccaacgggagaatttaattttaggaacattaattatgtgctatgatgttgtaattttctgaccaacgttgttaattgcaatattatagttatggttatatgtgttatgtctaattctgcccaacggtgatgtaggcttaatgcataatattttaatgttaattttgttctcaccgcacatgattatttcaggtggctactccttgatgggttgcattaaagatattccgaccctaaaaggagataactacgcagaatggaaaagaaaactcgaccttgcttttatcttgggagaggtggactgggtattgactaccccatgtcctatagaacctgctgaccttgtcagaggtgaaaatgagtcagatgctgactggcaaaagagacagagggacaatgctcctctcgtcatgtcgtatgacattgaacaaaagaaatggtccttagccaacaagaaatgtttggctgtggtaaagaatacgattgagcctaccatattgggctcgatcccagagtgtgacgctgtctcagagtaccttgaaagaataaagagtcagtttactggctcttcaaagacttatgctacacagctgatcaagcagcttgtgacagaaaggtaccatggaggtggtgttagagaccacatacttagaatgagcaacatggcttccaaattgaagccaatggatttgggcataacagatgactttctggtccatctggttatggcctcattgccaaagcagtttgacaattttattgtcaactacaacataagtccagagaaatggaactttgagaagctcattgctaattgtgtgcaagaggaggagagaatcaaagaatcaaatggtggttcaataaactatgttaaagataagaaaaagaaccacaagtctcccacctcaaaaggtaaacagtctcagcatctgcctcaacaacaacagttcgctgttgagaaagatcaatgtctccactgcaagaagacaggacactacaagaaagattgtcctgactttttgaaaatgatcatggcaaagaaaggtgagaacattattacatttgtaaatgaatctcattatgttggttactctagatccacatggtggattgattctggagcaactattcatgcttgtaattgtttaaaggcattccgttcgacgaggactacgcaaagaagagaaagcaccattagagttgccaatggagttgaagaaaaagttgaagctgttggagatcttcctctagagctcgcgaatggcttcatacttttacttcgagatgtcttttatgttccttctttgcaaaggaacttaataagtgtatcaaagttggattttgatggatatgattgccgctttggaagtggcaaatgtgaactatggcataataatgcatgtattggtcttgctgtgttgcgagacgagctttatttgttatctctttctgagaatgtgaatgttgtgtcctcgttgacaaaagaaaacaagaaaagaaagcgaactcccgatgtctcatcgaaattatggcactgtcgtttgggccatatttcgagggggagaattgagagactagttaagaatgaaattcttcctccattggagttctcagacttagaacaatgcatagaatgcattaaaggaaaatttgtaaagagcatcaaaaagggtgcaaaacgaagcgcgggaattttagagatcattcatacagatatttgtggtccatttcctgtgaaaagtgtggatggctatgactcgttcataacattcacagatgattactcccgctatggttatatttatccaattaaagagcgatcagaagcattggataaatttaagatattcaaagctgaagttgaaaatcagcatgatataaagattaaagtagtaagatctgaccgtgggggggagtactatggtcgacatacgccttatgggcaagtccctggaccttttgcaaggttcttgctagagaatggaatagtagcccagtattcaacaccgggcgaacctcaacagaatggggtagctgaaaggcgcaaccgtacccttatggatatggtgcgcagcatgatgagctactccacactaccactcggtttatggatggaggcgttaaaaaccgccattcatattctcaacagagttccaagcaaatcggtgcccaaaacaccgtatgagctatggacaggaagagtaccctcgctaactcacctccgtgtgtgggggagtcctgcagaggccaaagtatttaacccaaatattgggaagttggaccccaaaacagtcagctgccattttattggctatcctgaaagatcaaaaggctatcgtttctactgtccaaacagttatacaaagtttgtagaaacgagacacgccgtcttcttggaagacgaaatgattagggggagctcggtagttcgagaaattgatcttgaggagaggcgggtgtctgtacccgctccgtcgactcaggaacctttcttctctctacctgctgatgttgtgcctgcaatgcctgtcattgaggtaccagcacctgttgttacccctcctgtggcaacaatgaatgagagtgaggaacctgttatacaggattcaacagaaatggttgccacaccagaggaggagctacaacaacctcaaatagataatgtgccagtacaggagactcatcaagagcctcaggtacaggatgtgccaaatgtgcaggcccctagaaggtctgaaagagtcagaagatcggctatccgtgatgactataaagtttataatatagaagagtcgcatatggaggatgatcccacctcatatgaagaggccatgagaagcgctcgctcatctgaatggttggaagccatgaaagatgaaatggaatcaatgaaactaaacgatgtttgggatttagaagaaattcctaaaggagccaaaacagtaggctgtaaatgggtctacaaaaccaaatatgactccagagggaatatagaaaagtttaaagcgcgacttgtggcaaaaggcttcacgcaacgagaagggattgattacaatgagacattttctccagtctcttgtaaagattccttcaggattataatggcactagtggcacattatgatttggaattacatcagatggatgtaaaaacggcatttctaaatggagatttggaggaaaaagtatacatggcacaaccgaaaggttttgtcatgaaaggaaacgaaaatatgggatgtcgtctaaagagatccatttatggattaaagcaagcttcgagacagtggtacttgaagtttgatgggacaataaataaatttgggtttcaagagaatgtcgaggacaactgtatttattcaaagtttaagaatgggagatttattttcctaattctgtatgtggatgacattctactggctagtagtgatgtcagtctactgcaggaaacaaagaaattcttgtcctcaaactttgacatgaaagacctcggtgaggcttcatatgttttgggcatagagattcaccgagatagaacaaagtatgcattgggactttctcaaaagacatatatagaaaaggtgttgaagaaattcaacatgtacagatgcagtgctacacctgctcctataatgaaaggcgaaaagtatggggcatcgcaatgtcccagaaatcagtatgagctcaatgaaatgaaaacaaagccatatgcgtcagctgtaggaagcctacagtacgcgcaagtgtgcacacgacctgacttggcatttgttaccgggttacttggcagatttcagagtaatccaggcctagagcactggaaattggtaaagaaagtcttgcgttatttgcaaggaacaaaaggcctcatgctgtcttacagaagatcagaatcactccagatagtggggtactcagattctgactttgcaaaagataatacaaagtcaacatcgggatacgtgtttaccctggcaggaggagctatttcatggaaaagctcaaaacagactatcactgcagggtctactatgtatgccgagtttatagcatgctatgaggcaacggggcaggtgaactggctaaagaagttcatacccggtttaaaggtggttgacagtattgagaaaccactaaagttatactgcgacaacgaacccgcagtaatgtacgctcacaacaatcagtcaagtggtgctgccaaacacattgacataaagtactatgttgtgaaggacaaagtccgggatcaaacaatcagtctcgagcacattaaaacagaaaggatgctcgcggatccgctcacgaaaggcctaccacccaacgtgttcaaggaacatgtagccggcatgggtttaagggaagccttatgaatcctggactacagggcccaaaagtaaagtatctgtttctgaatagagatgtgtatagtggctgtcgaatccatcggcgattgaccgtgacgatgaaacatgctctatttacaaatctgtgatggaatagaaaaagctaaaagaaaaagtgagatcaagggggagaatgttagatagatctctctccccttgagcccaacggctcaagggggccttgaccgcgccctgatcgggggcgcccagcccaatggctggtgggcccccgtcacactgcgccatataaaagaggggtggaggccggcacggcacatggtacgagattcaccgccgccgccaactccaccccacaaaaccctaatccgatcgagagggggcgcagccagtgacgggaaacgccaccgccgcgccacgcctcatcgccgggacgtctacgaccaccactgccgcagccgtcatcaccgtcgacctcaccggcgccgcatccacgtcaagccgcgacgacaacgacgatgtccggcgcctcttcctccacgaactcctcaaccggtcggtatctaaaccctctccctttcatctacaatgtcgttcatcaaacccaaatagaaccacccgactagatctaacctaggtgatcctagagcaaagtctaacaatcaccaccagagaaacagatgatatacgaggggaacaacatcgttatcagtatggcagaatcccgagggctctaccgtactccaagaaggcatcatcgtacatctcgtccagcgtcctgttcttgaactcgaacccttctccggcgagcttctccgacgagaggcggatcctcggcttttccgggaggtcgccgaggctgcatgaaaggtcaccatcgtcagagctctcgataagatcatggagacgcatggggaattattactcagtgagatcagctcgatcttacgcggcgacgtcgacattgtacttccggtatttg

SEQ ID NO: 29650 - DNA, 4133 bp, Oryza sativa
tcatctcctggtcgcctgaaagaaaatcaagagatgaacaaataaatttcacaggaattgcttttcgttgccgcatttgccatggaccggccggttcttgattcgattagttatcaccggagagcaaggagaggacggcggcgacgcacggtttggcctccgctgccggcgccgggccaacggtgaccaccgggcaaacggtcaccaggctgatgccgttctcctccgcgaccctgctcgcttccttctctgaaagaaccttcgaaagcgagtacgcctgcattgcatccatgtcttaatattttcgatatgcacaaatctatcagggacccaaaaaagtttgaaatttaaacaaatcttgaccgaatttaaatatttttttctaaattaaaaaaaatatgaaatatttggatgaagtaaatgcttgccggaaatttcgaaccgaaattgtaaacgctgattgcatcagcacacggagctgttctcatgtggccgatttaatgggctctgagcctctgattgactgacctgtgttaaataaaatctgtaattttgtgtgtacctttccgggagatgtcttgttggctggtgagctgaggtagtcgacgtcggaccatgacgactcgtcgaggacatggccgtcgccttgcagcggcctgccggagacggcggccgccgacgatgtgaggaccacgcgcctcaccgtgccggctctcacgcacgacctcatcacgttcagagtgcctcgtacaccggcttccaccagttctttctgtcattaccatcaggctgaccaagtaaaaaacaaaactactcccttcgtacaaaaaaaaaatctataactgattatgatacatttagtataacgaatctggatagagatatattcagattcatagtattaggatatgtcacatctagtactgattggtttctatgagacagaaggagtgcgtgtatgtgattctgtgtatgtgtctgtgtcatcgcaacagaaagtagcattgtttcgcttatttaaatcgcttattagtaaataaaaataaactatgatgagaaaaagatcaaacttaaaattaagttctaaattttaaatgttagcttgtaaatgtaagcataagccaacaatgaagagtgaagtgcaaagagacatttttatggaggaatacttagtatcattaatggcctggcaaccataagagacttgaggagtggcaacccccatctagctaaatccataaagataatcttaaaatatgtttccccttcctccgttttatactataagatgatttaactcttttctaattatgttttattatgataagttcataaaaaaaatacagaacatttctcacatataacaaacataccatctaaatacattcaaagttatttttaatgaaactaatttgatgttataaatattattaaattttctataaacttaatcaaattgttgtagacggctatgtaatacctgagggttctctgacttgaggggtcaccggagcagcgacgaggaaggcgtaatcacagccggcgaccgcctcgtcgaagctgccttcctcctccaagtcggcgcggaagaccgccaggggaccaagtgcgtgcaagtccttgaagtgggagttcttctccatgttttctgcgactcaaaattgcaatgtgtagcagcagtttcagaggctaaaaccaaattcctttttaaaaaaaaaaagaaaagaaaaacgaggttaaaaccactgatgctactgcaaatctatgcacgagtatgcacgaaattatgaactgaagaagaagaatctcaccggggtttctgactgtcgtgttgacagcacatcccttctgcagcagcatcttgatgagcgccgaagcgatgtacccgttgccgccggtgacgcacgccgtcttcctctcaaccgccgacatcgctggtcagtcggctcgatttcctactagcagagaacgatcgagaattccttaacccaatagaacaccaagcactgatataatggtagtggtttgatgattgtgctaaggaccagtctcatcgaagcaacaagagggtgtactatgtccgtgttgaatccggatcagctgcagtcgctactgggactgcaatttaggcggtaccagttttcatcaacggatgtagatggaacggtccagatcagcgaggtgcactattcatcgtactgtagcataaatactgtagcacagaatataagttgcagtaatagctataactgcgcatgatctgaatccgtctgtgtgtatagatccaaagtttggatctaaacttcaattctttttcatcacgtcaacctgtcatacacataacttttcagccacatcatctctaattttaaccaaaatccaaaatttacgctgaaataaacacagcctatataggagaggtgaggttgctggcctaatcgaaacagtctcatcaaagcagaaacagagacagcatttatcatatcgtaattgtggctctcgctggagtcactgcaacgtatagacactgggccaggaggacacgtgatgctgaaccttctggatacgagtactgtccaaattcatagagcaaccactgtgagcgatgatataccggcttcattctctccactcacaaaagaatacaccagcacttgaaaaatcgatgatacacggtttgtgaaaccatatttgtatacgaaaatcattaactgaaggagtcaaaattttggccagtagaccacaagaattggcaaacgcaagtacaaaaaatccctcatttccacgccttccgtcctctgaattgctttcccgagcgcttttgcagttttttcttctcctgtcgagaacgcgctgccttcgctctgcttgcagcgaggggcattttcttcttgtgttgtttctgcctattgctcaagccaccggtctaaaacgcaatgagaagcatataagtagagaaggaataaaagcaactacgaaagaacaattcatgatcagatttcacaaggttgtgccatatagccaacataggtcaaaataagcaccaaaaaggaggatcatataaacgaatacctttttctgtttcacagctgttcttgcttggtattttcctctatcctctcttccagccttcaccatttctaatctctcctctttcgtaagctttctctttatgtgagcctacataaaggaagatgttcatataagcaaagtgtggatgtgtgtgcatgagcgcgctggcacgagtgcaatgcgggaggggaagagagaaaatgcacctcaagcttggatgggtcaacccgtttcagactaagctgatcagaagaaggcattttaaaggttactgattttgtgtcatggcccttgccgagtccatgttgtgccagagccagttttgcttctttttttgcctgaaactcataacaatgtcagatatacacaacttcactttctttcccaaaagaaagctccacagcatgaactacagctggaaaaaactcccatacctttagctccttaatacgcttaaaatcttcatcagataagattttaccagcttcatcgcacgaagcttcagccttcttggctcctgccaacttcttcagagctcgaaggcttgcatctgcagcattaagttgccctatataatcactcaactttctcttatttgccttgcgactgctgttttttgacttatcatcctggtcactgtcatcatcctgatcagagccttcatcagaatcatccaatttctcactgagttcctcatcatcatcagattcagatacatcattctcctcatccatatcagagtccaattctagctcatcatcattttcttcactatcattgtcagagatgtcttgatcctcatctagttcctctgtatcatcttcatccccagatagttgatcttcctctttcataccttcatctgtgtcaagcttgtttgcttcagacgaaccatccaaattttgtttagtaccacgagcagattgcaactctttctcatcattagaatcaaaagcatcagactcatcgtctgagccttccccttctgatgaaaaatcttcatctagcaactcagctccaggcacatcagaagcgatagttgcttcgccgaatgcttttgg

SEQ ID NO: 29651 - DNA, 5901 bp, Oryza sativa
gaaatcacaggaatatgcaaaatgataagaactgacctaccggaataaagtacattagagaacgagcggcaatggaaacagctttttcatgggactttttgtataaaacaagggcctggagtagatcttcattcatcaactgcaggtataacagaacgattaacagaggcctgctagatgaataaaataaatagaccaagaatatcttcctaaatatcttacaacccgcacagtacctcaggtggtaatgtagtatacaaacctgcatgtgtgttctcaacttctcatgcataagtgactaacgtgtcaggctacacaagactaaatgtggcctggtaaaaccatgtttataccttttcaattcttcattaagttacacttatatgcttaaaacctgtagcaatcgactatcacatccttttggagtttggactacgcaaccagtcatttaagactagtaaaaaaatgaaatcacaatttctactagagcatgtccagggcacaggaattaggtacaacaaaacatgaccaccataaaaatttaatgaatccatcacacaaatttaaggggtgtctggtcagaggtcagtagcactagaaagcaagagtacagatttgagcaaggtaagtaccaaaggtattctcatgcagatctctcgcacaacattcaagccaacagcaatagcctaaaatgagattggttagaaatatgccatgttagttggaaaatacttaaatatattagatatgtgatgagtgttatgcaaacctctgggcgagaacgatcatgcacaaattgatttactatctgcttaaacagtggttcaactgcatcaggaggcacctgaaattgaagcatattaatttagctgaatttggacaaagcaaaagaaatgatataagtagtgaaatataggagaagagcaaaagtgtttcaaccatatcatggcaagcctgtactgctgcagcaagtaaagttgttacatctcgttgatgaggctgcatcacagaaaggtagaaaacttattatcaaaactagtatgaactagtataatgcacgtgaggtgcaacggtttttttttctaattgtctattatattatcattatgctaattttgctgtcatttcgtaaagatgaaaattttcataatattctattgtcatattttcctttcgacgggatctatggcatgtgggggctaagagatacgcaactcacagtccgtgggtccaccaccactaccatcttttatattagtatagagtatagataaacattatatctaccataaggttgctacaagaagaacacatgccaagttaagaacatacctgaacgtatctttgaagatatggatagaagttcaacaaaaccaagtgatgcagcccaatagtcctcgctataacctttaacatcatcatccttacctgcaagcacccaaccaacattctctaaatttgaattaacgtttattttcgtttaaccatcggatggaactcacaacagacattgtgtttaaaaaataaactattgcacatctgggttccaattctcctacttgaatgctggttccaactatatacactcatgtataaaacttcagcagaaagctaaaagtactaagtaatgatagttctgacaattatatataactttttaaatctttacagaacaaggaatcttcagaacaaggaatggggccaacctcaaaccgctcattgcatttctggagccgagagaagagcttctcagcaaaaccctgtcagccaaaaaacgaaagcttcaatataacagtcaatatgtaaatgataacactctgaacaattatgggattacaccatttcccacctgaggatcctttaaatacgtcagtggtgaataataattggagccagtgtcctcagtggatttacgttgttgccttttcatactacgaatcacacgctgcaatttagctttcttctttttcttagtagcagcagtgcccttgtgatttgcctgagaaagtaatatgacaataaaatacattatatcagaaggcacgtaacagaaaaaagatgtaaaacactataaatcgaaataatggtaaaaattcaaataaccttgtaaacatcctctttactaagaataatttgagggttttgagcttcatcttcactgctggatgcatcactatcatcttcttgctcaacgttttcatacccaagaaggaatgaaatagcggctatcataattctgcatgtaaaagatatattttagatcaacacctattaataaacacaaagatgctggcagtatgtacctagaagaaccatggaaacaagcattgcatatagcatttgctgtgcggtcatcaaaccagacccttcgacggtgaagatcacatagaatagtaaaggccctctttgctctcgactcttcctcgccctgggaaacagcgaagcaagatgcataactaaacgaggtaggaagagaatcatgaatgtattcttgccactatgttaaacccgataatactaatcagtgcaagtgtggtatagtggtatgtcacaaacctgtaggaatgtgaaaaggatgttttgcagtttacgattcctggcttcattcttgtgggtctgattcattctcctgatactgtgtacaatatgtgagaatgctagttttttgacagcccggtcccctataacttgaagctccataaataactccattgtgtcctccagatcaacaatctaaacatcaaaaagcaatgtatacgaggagaatttactctacagtcatacgataatcccgttccaatccacacgatttgaacaaaatttaacttaatgtgaaatgaacagatgaactaaacaggcgtcaccttccgattcaccagtagtatcagcgcctgcacgaggtgcacacggagcccggacggcagcgcgcgcgcgttggtgtcaagcaggccaccaatctggtcgggcaagtcagcgaggtcgtccgggtagaagggcgcgacgtgggcgaggaacagcgcgaggtcgccgagctccttggccacctcccctccgccgccggacgaggacgtggaggccagtgccgcctgctgcgggaagaggaacaccgatgactcgaagtggcgccgcagctggcggagctcctcctcgtacccctccgggtcgcgcttcatcttcgcctgcagcgccgggaggctctgccgctccccggccccgccggtggccgacgccgacgccgcctccggcgtgaacgccggcgcgtgctgacgaggcatcggagcggaaaatccggtgtcccccgccgccgccgccgctgaggtgagaatgctaaaaccctaggccgccgcaaaacttcccgggagaaccgatggcaagaggtagtcgacgatgcgagtgactgggctggccagttacagtacacgtccggcccattaatctagctaaatttggaccagtaaggcccatttttcctccctctagcaaagaaaataagtctaatttgaaagacctcggtcaaattgcatcaatcaaccgcaaaaccgggtatatcgcactctccaacttcaaaaaccggtataaatcgactcctttgatggtttgaaaatcgattttctactgatgtgttaaattaaccgtgatcaaacttattatatccgaattttactattgaaggagacaattcaattagaagcaagagatgagggaagaaaaatatacttagagcctctttatttagggaattttttcttggatttttaagtcgcctttttagtttatatgatttataggctaatggattgaagtactaagtttaatagtagggtcataactctatctagcgtaagaaaaaaaaacttcttcaacataatttttgatgatgagtacaaacgaaagaactgcatatttgttaagcttagactttccagctcataaggttaagagcctactataagcttcaaataatctatagtcaatctaatagttaatttatacaatagttaactataaatatacactaggggtgtgtttggttggacttttcaacctgcttttccttttgcaaaagtcaagagtcaaccaaaggacccaaaagcataagtgcttttgctccaagtgcttttgagggaaaaattacccacctctgccattatgaaaaaacggtccgatattcttttcctcgtctcctccttctcgcgagtcgtgacttcatggggcgagcgtcggccatcgggcgcattgggtgtccgccatcggcgcggcccccgcctttccccaaccgacgccgcccaacctgatgtcggcgcagcccccgcccttccccaaccgacgacgcccaacccgacgccggcgcagctcccgtccttccctgatcgatgccgcccccgcccttcctcaacagacgccggtcaacgcgacgccagcgccgctcccgcccttccccgaccgacgcctcctcctcccgacgccgccgccccttcgctcgtcggccatggaggtgggagacgaaggtggtgaggtggccgacagcggtggcgtcaccactgcctcatcctcctggcgccaccgctcctcaccaccgtgcgtcctcttcgtcgctgaaccgccgctaccgctcctcctcgccgagacgccgctgccaccgctgaggccgacgacaccgccgttgccatatccatctctccctcttcttttatttcaacgtgtgtatgacatgtgggggtcgctgtcagcgggactagttatttcaaaagccacagctattgaaccaaatgagcttttccaaaagccaccgtacatattccccagctacttttaagaagggagtacctatacatctttcgaaagatttttataatcgtatcacacagatttttaatctttatattaaaatccgatagatataataaaaagcaaaaagcaattaagaaacaccataatgaacattaaattaccatatcctcaagaaaaagaccaaatccaatacaaaatttaaaatttacatgtgaagattcaaaaattacagtgtaacttacaaaagttacagtgtaagtttcataaattacactgtaacttacaagaaaatgcactgtaaatttgaatgagaaaatcgagtgagagataagaaaaaaattttcgagtgagatatagcaaaatcgtttaagaaaactacagcccacagatatttttttcaaagccagagctcaactaaacacaccttaagagcttagactttccagctcataggcctaaacaaagaaggccttcttcctctcgcgaaccacgaggcccagttggctagtaatcgttcgcggctagccggcccaccggaccagcgcttcccccgccggcgtcgcgcgtacgtaggagacgacacgacgacttctccgtgagatcgcgcgaaaatcacgacctcaaccgtgcgacggggggcgcaagcgcgacatcacgcagcgttttctccccacccacccgccacgcgcggcaccggcaagcggcgacgcgcgacggctgcgcggtcgttttcggcggcacgccctgcgcgcgcacataattcattctgctcttcccccacggtcgcgtggtcctttccgacgcccccgtccgtgacaaagccaggtttggtggcgagcgaacgagtgactcgatcatgccccgggtcgccgtcacgcagcagcgccctgtgtctgcccccgctccggcgatcgacggcgaccgatcgatcggcagctagcgacgcccgagcttacatgcgcgcgccgcgtcaccttcccgcgaccgatcgatccgtcaatcttccgctaccgtgtatacgcagcagtgtcggctgggacatgtacatacattatactaaaatacagtactacgagccgctttctgaaaaagaaagcgaaggccattatt

SEQ ID NO: 29652 - DNA, 6187 bp, Oryza sativa
  unsure (1)..(6187): unsure at all n locations
catcttggcaagaggtacaccggtctaacattgactataccattgtcacgttttgcgtgaactgcaagagaacgcattactgggcatcgctaggccactatcggtgccattatgtaggagtacaaggtaatcaatacactccctaatcaaaacaggattgcaatccagaacagcggtgacatctgtattaagctcgcagatactgtaccaattataactcgattactcaaacaacaaagcactggcacttcagtggaccacgtttggcaaggacgaaacgtggttttaaggcgaaaaaactcaggagctttgagaggggacagcagcggtcatgctcttttcccccaactaataaagcaccagaaatagtaaatggctagctgacaacgtacgccaagcatcattacaccaaacccccttcacaaatccatctttaaggccctcgtctgtgggccaattgtcgaaaatacgtcgtacggcgcgttagaaaagaatagtttataggttaaatttttctatatactagaaaaaaatgcccgtacgttacaacgggtgaagtcgattttaatcttattattgttatatgttttagttaaaatgaaattcactgtgagagttcgctttatatatttttagaaaatcatgagctatatttaggagtctaatcatctcaagttagcatgcaagttttttaaaacaaatttcttatatgatttcttctgtattaccaaaagtggacgattttaaaaaccgaatcaaatacggatacatatttttaaaagcaaacaaacttaaaaactgacgtatacacatatgacgtaccaaaataccgataaaaacatcttaaatttttataatagtagagatatgttcaatgaaaaaaattaaaataaactctaaaatttaaattttgacagcggttaattctatatagaggaaccaatgggagcctaagctcttttcagttactgtctgttggcttatgatgacacgctttttatactgtttgtaaaaaacttctctatatatatttttaaaatagtcttttaaagaaactataataattaagtatttaattaattataaactaatgatcttctcgtattgcgtaagacaaataagatttgaatacgctctaccgaacgcaacctaaaccggtaaggcacaaggcaattaagacctaatctcgcaacttgacgagacgagacaccaatttactaatactaacaaacagcaaatttctaattagcatcgcgtcgattgtccgatcattctcaggttccagtgcgcgaggtgactgacaagctagcttaactattcgttgagatttcaggaagaaaaagctgtcaaaagcttaataacaagacgtggcacctctaagctgttgattcccgaaaaggacaaagaaaacgaggagagcaacgtcgcaacatgccccggcccggcccggcccattatcagcaaggcccaaggcgacgcgaatctcgaagcccacaacatcgaagttgaccgttcaacagaaataccgaaaatacccctgactaaccaatcatattacgcgaatgaccctgcccgagccggccagccacttagacctggtcaccgccggcttgggctttaaactaacaccagtggcattgggtgtaaataaatcgaaatcggaggggtggggtgggtacccctgatgcgtcagcgttcaaaatatttcgaaatagctcggccgcctcgtcctcttcttctccttcctctctctctctcttctcccacacatctctcgctcagatccgagcgaggcgagaaatccatgaaaaatcgagggtaatctccgctcggtggcttcaaaaacttcgaatccttccccaatttcatcggctccgcagtttttttctcgaggtttttcggatctaaagcgcggctttgtccgcgcttgtaagccacgagagagagagattcttgtgccttcgagctcactccatccggccccaagaaagcttcccttcttccacccaccgccaccactgaggaggagagaaccctaactataacccctaatcctgccactaatcccagttcatggcctcctccctcacgccccgtagcccttacccggtaattttctctcttttgtggaaaagaaatcgcctattttgggggagggttgattcatgggagcttagttcttgcgatttgtggggtgtggttgttgttgttgttgttgcaaaagaaggagaacttgggcaacgcgcggcgggggatgggggtcaagcctggcccgcgccgcaatgtcctctcggcaatcaacaatggcggtggcacgaacagcgacacggcgtcggtggacggcggcgaggccggggctgggccggcggcgcctgtgatcgagttcaccgggagggaggatgtggagcggctgctcgccgagaagatgaaggggaagagcaagaccgactacaaggtgggttcttttgggggatttcttggcgttcgttctgtttgagaatttttggggggcgggtttcctgaatttggttggacctgtgcaggggagaactgagcagatgagtgagtacatcaagaagctgagagcttgcatccgctggtacattgagttggaggacggctacttggtcgagcaggagaagctccgtagtacgatggatgcagagaatgcccagcacgccaagttgggtaatgaattcgaatgcacttctcttttttttgtatttatttgatcacaccaagagaacaagatggtactcttttgggttttgagcattcatgtgtgctgtttggtcatcagagtaccatctcatcgtagtgactgagtttattctggtcatttatgttcttggggtactgtacttccagaggcccagcttagcagtgatctggaagagctgaaagctgcacacctgaacttgacgcggcagtgcgattcgttggaggaaagcttcaacaaggagaaggccgacaggatggttagaactcatctatcgcataataagctgcatagttatgtactgttgctgtgtgcctgtgtgattggtttcagccacggcttacacttgttgacctttaaactggcagcttgctgtggagtcctacgagaaggagaggcagcaaagggaatcggctgaggcgtccctcgacttgctgtcggtggacctggaaagagtcagccatgaagcaaaacggtttagtgagcaagtacgtgttcagaaatgttctattagtcttacatgaatttgagtcatatataatgtcctttctgatggatggaaattgtgaactagctgaaaatggtccaagacacgaacaaaagactgcaggagtacaacaccagcttgcagcaatacaacagtaatcttcaagctgatgcctctaagagtggggacatcatctcaaaactgcaaaaagagaagagtgccatgatggaaacaatggcttctctgaaagatttaaacaattcaatgaagaaccatttggattcttctagggtgagttgtgttttttcgtgaattgataatttttttgggcagtatagttcttgtttcacttaaacatttaattgttttgatttctgttagacttctcaacaagaggccattagaatgaaagaacaacttatgaaagaagtggattgccttagaattgagctacaccaaattagagaagaccgtgatcagtctgtttctcaagtaaataccttgagtgctgagcttgctaattacaaggaactagcaggcaagtctacaaaagactgtgaaagcttgagtgtaaaagtgtcagcctttgaggttagtggtttcagattaaccaaatcaatactttctgtgcgcaactatttggctcaccattatgcttctgctcaggaaacatgtagtatgcaacaagaacagattcaaactttgcagaaacaacttgcagttgcaacaaataaactgaaggttagaaataatattttgtcagtgctgatttacatgtgagatatgattatatgacatttgatctaattgtttacttttgcagcttgctgatgttactgcaattgaggcgatgacaggatatgaagaacaaaaggtgataataaaagatctggaagaacgtttggcatccgcagaatttcaaattgttgaagctgacaagctacgaaagaaactgcacaatacaatattggtaattgtttcagcatactagcacttcttactaaaaacaatttctctattttactgacagaagaaatttttgagtaaatactgaaattttttcatcttgctattgctacttgttactgattagcctttctatttgcaggagcttaaaggaaacatcagagtgttttgtagggtccgaccacttttgcaagacaacgattctagtggtgcagaagaagcccttatttcatatccaacatcagttgaatctgccgggcgtggtattgatttgatgaaccaaggtaaaatcatattcattgttgaagctaaacagaaactatgtttcccccactaagttttcagtggtaaagttaatcggagacttcattttattgttttgtgttgatgtaagtcagagattttccttctcatatgacaaagttttcgatcacggtgcttcacaagaagatgtgtttgtggaaatgtcacaactagttcaaagtgcacttgatgggtacaaggtatgaatatttcactacaacaatgaagtattggtgaataatctgttcatgaggttcctgtctctaataactcaaatatcctaactttattttttttatttcaagaacaaatgaaagttgttttaattgatatggtggcaccccaaaatttatctcttcagcaccaccacataagcacaaatacatgctaaaagccgtgaacatcttacattgatgtttctagtatatatcacctgcatcctgcatttgtataatcaccattattttgaaactctgactgatgtttctagtttaattcagttttgaagtacttggcaaattggtatgcttaagtatttnntgcatgatgcaggtntgcatatntgcttatggtcaacaagggtctggtaaacttatacaaatgatgggtccacaagggcgtgatcagaaaggcatcatacctcgttctttggagcaaatttttaagacaagtcagtctcttgaatctcaaggatggaagtacagtatgcaggttagtatccatagtgcaatgcagattctgaagtgtacattctatgtagtgttgctgagagtttttcctatgtgcaggcatcaatgttggaaatatacaatgagacaattcgtgatttgttagcacctggtcggtctaataactttgatctgtctaccagtaaacaatacaccataaagcatgatccacaagggaacacaaccgtcactgaccttactgttgctgatgtttttagtagcgccgacgtaacttctcttctagcgaaagcatcccaaagcaggtaaatacgctttattcatttttaatcattcacttgtgccttgtaactgtttgctctaagggtattgaccattatcagtttaatgttatatttgaaatagcaatgctttggatatgtctagatgattctctcatctatcactcaaatatattagagagagcagaaacataagagggtttaccttttatacaagctagcacttattatctgaattcacatgtgtctgttagccacctagtctacatatcaacagtgagtctaaattttttttcaccacattgaaccaggtctgtgggtaggacccaaatgaatgaacaatcttcccggagccattttgttttcacactgaagatatctggatcaaatgaggtactcgcttcacccatattttagaatattaatcacagtgctgaaactttacaaactggtcacaatattttttttttcattttcatgctaactaaacagaaccactgaaacttgagcaaatgtatgtcactaattttcttttgatcttaatgcagaacactgggcaacaagtccaaggtgtccttaacttgattgatttagctggcagtgaacgccttgctaaaagtggctccacgggtgatcgtttgaaggaaactcaggtgagtgtgttcatcacaaatttacaatattcttatttgataatcacattgtcttatctgtttgttttctttatgtttcaggcaatcaataa

SEQ ID NO: 29653 - DNA, 1292 bp, Oryza sativa
ttcaatttttctcagactattatgcccctgagactctttcttctcctcggttcaatctagcgagcgtgagaaggtgagaagagaatcggcagcgacaccggcgcccgccaccaccactgagccaccgttacctcagctccagccgccgcgccgaggtcctccccagctgtgccgatcgtcctagtccgcccaattgtgccgcctcctcgatgacatacaccatgagtccatgacatacaacctcaattcatgagttcatatatataacttgcaagcggtttaattttcatttaatttcgcatcaagcagagctgccgacttgtttaattttgtatgagcaagttcgttcgctttggttaacccaaacgaactttaaaaagaagttgcaaaatgtttttcgaacatacaagaagatactactagaatagaagtcgctttgtgcttgaaaattatacacagttgttgatttcagaatgtaaaatcggcacatcattgacacaaaatgtgaacaaaaatatttaccaggcaccagaggaaattacacaggaggcaaaaaaaccactatgaattcagagaagagaagaaaaaaaaatgaaagctaagctcaggggtcctcagtgatgcacgagaggtgcggctgccacggcgaggcatggctcccggtgctcatgcgccgccggtgttggtggtggtgttgcttctgcaccctcatcatccttgtcgtctccggcgacgcgctgcactggctgcccaaccaatcggcgacggcggcgttgccctccgacttgctgcggacgtggtgcccgtggccggcggcgccgccggtgctcgtccttctcttggcgtcggggacggaggcggccgggatgaggaagtagatctcgccgcactccagcttcgactccggcgacacgatgtgtatccggcccatcgccccctgctgcgacgagcactgccggctaagcacgtggttggggtgcgccgccagcacctcaccggcggacacagcacggccgtacgcgtcgatgcggccggctcggtgcctagggtttcgctgaggataggcggcggctggggaggagactcaccggggagaggcggcggcgcagctgttggggggcgggaccggtgaggcacgccgcggcggcgatgcagtggtggtgggcggcgccggtgtcgctgccgcttctcttctcgacttctcgcgttcggtcgctagattgaaacgaagagaagaaagagtccgactgaatcagttgactcaggggcataatagtccaagaaaaattgaa

SEQ ID NO: 29654 - DNA, 2398 bp, Oryza sativa
ttttaacaagaaaggaaattggataaagtgttgcactacgtactttgctagcgcatatacactaaataaggaacccccgaggctgcatagcacgtttctttttgggcaaagtggatggccactatccggataagctcttttgggctgagtttggatgtggtgctagaaatttaggatttttcacaaatgctaaatgagactaaattattagtgtcaggttaattgaatactttctccattttcatagtattgttgttttgaattttttttctattctacctttttaaatttaatcaagtttataaaaaatatagcaatattttaaaacagaacaaacacattattaaaatatctttaatgtagtatttaatgaaattaattttttttacatgttgctagtttttttttataaacttagtcaaaccctttacttaaaaggtttaactagatgatttataatatgaaacggagggagtattaattactataaatatgacaaatggttttattagattttttttaaagaagctttaaaacttttcataatatacatcatttaacagtttgggaagcggctaaaaaaacaagtggcatccctaacagaccaaatgaacggagccttggtccctcaaaatggacatctccttatttcttacgtatcatccaaatgaatcttgttaatttttttaaaaatatatataactatttaaatgacatgcaagaccaaaggataccctataaggtattaattttttttgccattatctactgtgtattaggctcatcttaaaacactgtatttttttttctttgagatgtttaaaggcacagaccacttatttcacaagcgcatatatagtttggtcctcgtgacatctaccccctctatcccataaaaaccatcctaaaccatcctagtactgaatgtgacatatcttagtattacaaatctggatatacacctgtccagattcgttgtactagaatatgtcacatccagtcttagtttcgtttttttggacgaaaggatatgtcacatccagtcttagtttcgtttttttgacgaagggagtaggttgaaagtagagcagcatgagctgttcgttcaatgtggtagaattcccagggccctgccttactccacaaggtcatcaagtatgtcgcccaaattcgtgtacttgaactcgaacggtcgaacccttccctgatcagcttctccgacgaacagcagactctcggtttctcaggcatcccgtcgaagctgcaaagataacagagatcatcactcgctcgtcagatcgaacacagcatgcatgtatatctatgttggatttcgaagttggccaacaattcgatcgtaccggtcggttttgacgttgtactgcgggtaccttccggccatgaaacgggcaagcgccaagacggtggtgttgaagctgcagcagatgtacctcgccgacgactctgccgacgacaatgacgatgactccttctcggcgaggaatatctcggcgcggcagaggtcgtcgacgtgaacgatcgacacgtagccggtgaacgattgcaggggcttcaggacttcgagatgcgtctcatcacctgagaagtaataaacagaagccaacttaggtgtgtttatattcagagacgcggtaaagttttggcgtgtaacatcggatattatatagggtgtcgtaagagttgttggggcattaataaaaaactaattacagcatcgctaataaaccgcgagatgaatttattaagcctaattaatttatcattagcgaatgtttactgtaataccagattcgtctcacaaattagtcgtaatcttgtaattagttattttctagcctatatttaatattttatatagctgttcaaatattcgatgtgacggggtgtaaatttttaaggtgggatctaagaaccacctgcaagtgttgagactttggtgggagctagcttgttgatttgatcgctggtgctggtgcttctaactcaccggatagcagggagaggatgccggggacgctcgtcctcgccaccggcgccggcgctgcgcccaaggtgaacaccgggaatacggtgacgaggctcatgttgttctcctccgcgaacttgcatgctgccttctccaaaagcaccttggagacacagtacgcctgcaaacgcaaacgccattttcaaccatacaatatttatttttggtaaacttataaaaaaagtctatgtttagtttattgctaaatttagtcaatatataagaaatcctgccaaaattttgataatattagcatcttgccaaaattttaacattgccaaaacttggtaaggtttatttttgttacaatctaaacaggccctaaatttagagaacttttctatacaatat

SEQ ID NO: 29655 - DNA, 2804 bp, Oryza sativa
ttcgccatgtcatctgaatacaaatcgcagcaattagtagaatctttgagaggtgaaactgaactctgaaaattcacaccatctttttgagatcatataaagtctcataataattcgatccatcatatgtcacgatatgtatatatgtaactatcagttggaagttggaaaaggataagattttgtcctcatgtgcggctaagcctgccatttgctaattggttaagcgaaaacactcgctaaaaagctcatatggtactagctggcctatgatttcacacctgaactgaatggaagaaacactgcaaaaaacatgaacttagagagtgaaaaaatgaggaggagaacctcaccggggtttctgaccgtcgtcttgacagcatatcccttctccaacagcatatcttgatgagcgcagatgcgatgtagccgttgccgccggtgacgcacgccgtcttcctctcaaccgccgacatcgtcgtcgtcggtcgctacaacctctccagcccagatgacgaagaggacgatgaatttatttttgttgctgttctttggaaagagttcaatttgtgtagtgagccagtgaggtggtctggcgtgcttatcagtaagtattcctaaaagaaacattctgacgagcactatatccagaatatcacctttattataaaataaaaccggtgcggtgcgagttgggtggttgattgaagtgtcaatatggagtggacaaatagatcgtcatatcacgctgctctcagcaatggtaagcatagctggtagagtactacacaatactacggtggtgtttgaatattgaagatgaagatggagattaaggggctgtttggttcagatactaacattgactaggtttaccatgctttcttaaccaaacttgccaaagatgaggccatcaaaatccaagccacactctagccaacaaaatgaaaccatgccacactttttagagacacttacatgtgggacctagattacaaaagaggaatcttgccacacttgtggaagccaaccaaacaatcatctaacatggtcaaacttgtctaaccttaagtatggcaaagtgtagtaacttatggccatcaactaaacagcccctaagtttttatgcaaaacaatatgctattaacgtatgattgattgagttttaattcttacaaacttgaaaaatagattaatatgatattttagtgcaacttttatataaaaagtttttgtacgaaacacatcatttatcatttaacagtttgaaaagcgtgtcacgaaaatcttaatatttatctaagtcttgtggaagaaaagaactggacctgagtcatgcattcgtgcgtctggactgacatgtagattcatggccgaccatcgacttacaactgacgttaatccgggcgtgcgtcatacgcattgtccgtaagccgatcgagagaggggacggtaggtaaagtacaatcgccccgtgtgtcgtgtcgtgcaccgtgttaattgggggaaaaagtacacccaaggtccctcaacttgtcagcgagataaaaaaacatacttaaaccataaaaccatatatatatatagtcccttaactaaacaaaaccgatcacccgagatccttcggtggttttgaccccgatttcggtctatgtggcggctgagtcagcatgggaccaacgtgggtcccatatatcaggatgccatgtcagccggtcctcggttcctcctctctgttgagcgcgagcgcgaggcttgcaggcgagcagatggttgaggactctgcgagctcggaccggtgcacgacgcggaaggggtccgggtgaccggcgagggcgcggtcgacggctgcaacgcccacggcctcggcggcggagaggaggagatcggcgaccagcgccgccgccgccgcgcttcctccacgcgctagccaccaccgcctccacggggacctcgccgtgggcggcggccatcgtcgacctcgccgcccctagggccctccacgccggcgcacaaggggcttgccgcggaggatgagcggcgtggagctccagacgcgccgccagcgggaggcgagcgcggcggtgcgagtcgcgcccttgaagggaggcgggcgacgaggaggtcgtcggggagcgcgctgacgcggtcctcgccgtcgtatccctcggcggcggaaagcatggcgccgttgtcggaggcgggatggccggggaaccaccggaggcggacttggacgtggcgctgtcgtcgtcgtcgtcctcggcgtcggggaagaaggtgggcgcggcggcggcggaggctagggggttgccgcggctagtgtggatggaaagctgaacattgcttcttcagctccaatatattgtaattcacgagcctttttattttgatggttgcttcttcagttcgaaagatgtctctgtttttattcttgttcaagccattggcaagtctgaagaacctagactgaattctatactgtagtacagttctaccatcgtcagtacagtataaagaagcaatcttttgaatccttttcaagtaggagtatagtatgagattattatagcctgtcaacttgctgtttgtaactagccaatgctaatcttttcagctcgattatgatatatatcacgtcgtcagatttgtgcaaaattggtatagagacattctgaccgggttatggtcgatgacactgtccatcatctgagagtttgcaagtctctgaactctgaacattgcccagaatctcttacaggaatctttttgttggtcttctcatacagtatatatcattggcc

SEQ ID NO: 29656 - DNA, 1604 bp, Oryza sativa
  unsure (1)..(1604): unsure at all n locations
gaccgggttatggtcgatgacactgtccatcatctgagagtttgcaagtctctgaactctgaacattgcccagaatctcttacaggaatctttttgttggtcttctcatacagtatatatcattggccccttgcaagcagaggacaaattctctttgcattcgtatgcattttaattctgcgaaacctgtagcttgtcctgtgtataaacaacgagaatatcatctgtttatcattccaatttccaagtatcaacttctacctcgaccaggagtaatacagattctgaagtttataaacacatctctgcctgaacaagatggacacctactgttttcagttcaccatttgatctttaccagataaacctgaagttcaaaccgtgcagcactgcagccatgtttcccaagatagaatgacgcgtacacaagcttccagcgtgtcgagggcgaggtcgacggcggcgccgcaccgcgtgtgccagcaaccccaggcgccgcaccccgggagcgggccgctattgggagccgccaccgacgcctgcctgctgtacagaaactgcagcacgagcacgagcaccagcaccttgtaccgcaccagccgcggcaaccccctagcctccgccgccgcgcccaccttttttctcgacgccgaggacgacgacgacgacagtgccacgaccttcttcttctcggcaccggcgcccgccacctcttgcgcgtgccccacgcagcaccacccttcccggtggcgccgccgcgccactatgttcgttgccggccggcttccaacaggagaaaagagtgagagagagagagagagaggaggaagggaggatgctgacggcggcgttgcctccgccggcgcgacgccggctgccggaccttctnctctcccctccccccggcgcctcctcccccacagcgccgcccgtcgccggctgagaaaagtgagagagagaaagggagaagaggggaaataagaggaaagagatgaggtggcgtgggttccacgtgggtcccatgctgactcatccgctataaaccgccgaggaatctcgtatgatcggttttgtatagttaaggaatcccgcatatctggttttgcggttcgaggatgattttgtatctcgctgacaagttgagggaccttcggtgcactttttccgaattttttttatttttaattttttttattaaaagttttacaaaaataatttttcattttgaaaattgacagaagtggtcgcctaccgccctctgggagggcgatttttaaaaatcgccatcccagagggcggcgaaaatgacgtggcagacggccgttcgctctcgggcgacggccgtcaacgaaatttgcatgcggcccccttgccgccctccgctagggcgattttgtactgtgcggggggccgcctgcaaatgggcggcgagggggcatggaattttgcaggcggcccccttgctgccctgggggagggcgattttatactgtgctatatttttttttataaatatcaatagttatcaaatctttttatattgaaaactatacaagattaaaatctccaagactggtaaaatacaattttattattttttaggg

SEQ ID NO: 29657 - DNA, 522 bp, Oryza sativa
caataggacaacgttctttaaagatggccgcttttcactaatcacccccgattaatccattacttaattaactggagttaaaactaaatttagctgaatttggcttgcagctgtcgtccggcggggacaagcacaacgagttcgacttcgagttcctgggcaacgtcaccggcgagccgtacctggtgcagaccaacctgtacatcgacggcgtcggcaaccgggagcagcgcatcgacctgtggttcgaccccaccgccgacttccacacctacgccgtgctctggaaccccagccaggtcgtcttcctcgtcgacgacacccccatccgcgtctacgagaacaagaacgccaccgccgccgtcaagggccaccaccgccacgccgccgccgccaatggcaccagcaacgccacatcggcggcggcgtccgtgccgccgttcccgtcgccgcagccgatgtcggtgtacagctccatctggaacgcggacgactgggcgacgcagggcgggcgggtgaaga

SEQ ID NO: 29658 - DNA, 849 bp, Oryza sativa
taccgtacaaatattttgttagtgccaaaatataagcaagttttggcactaccaaatatttggtaaggtaaaattgcatttgatcatatttggtttgctgccaaaatgtaaaattgtagtgaagaatgttctacataatctcaaatctagattatgtattaccaatgaataggcttccattttcgtgtgttgtgtgctagtgggaaagaagatatgaagaggttgccttcagattgtcaattatatagcgtcgttttcactgcaatatatgtgaactcaatgagatacattattcattagatgtgacaagacgatcacgcgtgggcgtgattcactttatgtcaacaggcagcgccgaaagttgatagtgataactcgagctgccgcttttcatgtgtgctgttgtggactgtacgcgctactggatctgacactaccatgaagcgccgaaagtgcgttgtcgtgagcataagttgttctagcaccatatgaatgaaaagaactatgtagacgagacaaacacaagtagtactgcagtagtaatagcaaaagtagtactgctttacaagtttgtaagccaaaagaaacggtcacataaggactgaagaggtagaacactactgacgaggcctcttacccctgtccctcctaccctgcgccctaatgtgcccctgggagtacgtgagtcggtccgggggtacggcacgggcaactcgttctgcctgtacaggtgtgacctctggctgctcctgagtgtgcgcctctggagctcctccagctgagaggagcctagtacgtcgtggtggtgtgcaccgtgcaagtcgtcgtcgtagaactggctagtaggac

SEQ ID NO: 29659 - DNA, 1496 bp, Oryza sativa
cctatgcaagatggaaataaaaaattcagtagttgtcctatattatgcaagataaatgaaataattgtaagaagtaatacaaattcgacgtacccccacgaagtagtctcggtcacggtgcgtgggatacgcgtccgtgacagcggcaacgtgcggctctggggcgtctggagtgaaggtcacacgcgcacgagtgcgaggaaggtaccagcgaaggtagtcacggtagttctcctccgtgtgtgggaagagctcgttgatcacctcctctgtagctaacacccagtcgtcaacgtactgctgtacacgtggagcccaaagtgcgcctgctagctgtccccgtcgagtcaacatgtgaagagaggtacattatatggctcgatgatcgcttaattatcataaaaatttagaaatgaacaatccgaactcacgagtggtcggcaaggaggacggtcggctgcacgttgcccggaaacacctgcctaagtccgaactgtctcatcacatgctgcgggcagtgaggctcaacgaaaatgtcgaacaccatcggcaggatggtgagccagtaagcctggtcgcgtgtgcacaaggacgaaagtcctagcggtgctctcgcagcgacggcttcttctgtgtacggctcccagatgacgtcgctcggcaggagacggtcaaactcgaacacgaagtccgggtaacctcgtctcacctggacgtgagcgtaacgacgctgcaataaacatgatcggaattagacatgttatgtgaagaaaaaaagaagacgactgataaacttataacgcagcgaagttgcactaaccccacgtcgacaccagtaagtccccatcgtgggaccgtcctctggccactgcgcgctgcgaccaaccccgtagggtgcgctgtccaccactggtcgacctatggcaaacctctcggctgcccaaagctgaagcaacatagggcagccagcgatgatcgctcccgcgtcagtcttcgtgcacgcctcacagagggcacggtacgtggctgctagcacggcagaaccccagctccactgtggcacgtcctgtggctgagcatccgcgatgaaccgtgcgtagtggaccagccggaagtccacagcgtgcccgtgggtgctagtgaacatcacccacccgaacaacaacaacaggtacgcctcaagggagcgtcggaccgagtaatcatcagcgtcagggtgcagaaggtccgcctacaattaagaatgaaatgttagtacaaaacactctgttgatcgcaaataagcatgtatgataatacaacttatttacttacagtgaactggagcaaccaagccttgctaggcccgactgtagagtacgaagaaagggtgttggccggtcctaggtgtggaaggcgcatcacctgctcgaagcgcgcagtgatatcctcctcccacccaaaaacacagtccacgggaccaactggtgctcccgccagcggtagcccgagcaggt

SEQ ID NO: 29660 - DNA, 5245 bp, Oryza sativa
attaataatactgtgtagctctaggattcgtctttataaaatggctttgggcaactaagtgacttttaaatgccgttacgtgaaaacttacccctatcttattatccccttgtactcctttgcattaattgtgcatctccggtgtggcctgctgagtactgtggttgactcattcttgctcaatcttttccccccttcagtaagagaagctttgaagaagaagtcttaggtggagtcctggcttataccccagttgagcgcctgtgaagatggagccgtaggcccgctagtccgctgctgtttatttttgtttgtcaggcctaaagtacctttgtaataatgtaaatattatcgatataataaagatgtgtcttttataccatgtttgtgtggtgtacccggcttttcctgggacggggattaatacactggtgttcgggaaaaggcaattttcccggtcgcgacaagatggtatcagagccatctcgactgtaggataagccaagtggataaaacctaaggacatattttataaataaaactatttgcgaaagttccttttttttctccttcccctaatgctatttgcaaaaggtttactcccttcttccttcttcggatttccactagtactagatggttagtttgcgaagaagaagatgtcgccaattgttcgccgaagctccggaagactgcaggatccgctagcgaagtggaggaagcagtgaagccagctgtgaagcagtgaagatcttggagaacccgtcgcagaacctaagccaccctgtagggtagtgttgttagtcgtgtgttccttgcttgtgtgtgtagcgcgtggtttgcatcggggggttgtgatgtaaccatgctaggttgtttgcttaatcaacttgcagaataagtgaaacaaacaacacatcaacaaagagagttagttcctttaaggtcctgtccctagttctggtctattctttcctagcttgtttcctctctcacctcaatccctgtaacagatgtttaacagagaaaaaggaaagaatgtcagagggtatgcctccagtaactcaagttttcaactcaatccaccactggcctcaagagagttaaccagggcacacccttggtccattccaagcatgccgcttagttcacagctaccattggttggaagtcaagaccaaaatcagtatgtgtttgatcgagcatttgccacccaggtcaatgagcttccaatgccagaagaggatgtccccttttgtcacgattgtagagaacaaggacactatgccctgaattgtccatgggtatatgccaaagaagccccttcctttggtttaacagggcagacatcgctaaaccagcctcctcgcaccaagtcaagcttgcagcctagtgtgcaaagtagagagcccaatggagagaatccattgaatcccgggaattgctttcctcctagcccttcgtaccacgtggggtcacgtactaagcaagccaaaggcaagaagagtaagaatcagaagagaaaagcgccgatgcgaactgaagaagaagtacgtaagatggctattagcagcaccgaatggcctcccgcagggataactattcctagacgtcaaagaggaaataccttccgaggtgcacgacagttgacccagcaccttctaagccatggtggcagagtatctgatagtgaagggtcagatcaagtctcctcggatgatgaagatgagtctccccgacatctcggtgaggaagagatggaatcaaaagcatgtatccgttgtggagaaattggacacattgctagcatgtgtctcacactctgcgcttattgtgaagaagaccatccaccaggggagtgtcccacccgcaaggtcacatgctttctgtgcgaaggtacaaatcatgtgcccaaggattgccaactcagtgtgttgttgaccaagaccgcagaaatccaacgaacgaccctacgattgtctcgtcagctagtcagctccaacagcaacatcgacgatatcatccacaacaccaatgctcctcctgctccacctaactctgcaataaatcatagcaataatatctttagcaccaaccattctctgcaccgacagcctcagcaaagagttgtcgtcgatggaagaagttgtgtctctccccgacctactccaggccaagcaaagggcaatcaacctcaggagggcgataccaagcagaaaaccgtcatccgcttcaaccagcaatcagaaggaagcttctcctgcgaatgatagcattatgcagtcctatcacatcatcacagaaccaatcaaggatgatgcagtcactagaacaatgccagctatatctctccggaatcaaaatgagcagccatgtttgtggttttcagtttgctacttatcattgtgtaatcgaaagtatgcagcaatcatgtaataaacaaatatattcatgattttaaacaatgagcttgctatgtttagggatgattcatgttgaggatacaatgtaccaatgataagcaccttccctttttgtttaaggcagtgccttgtattcgtgtaataagggagaaatgggtaatacagacaagttctaagaggattcttgtggaagatgcggatatgtgatcatatgtataattgtttactgacaaggagacctagggtctcgtgtcagaagaactatattataaactcgagttaataaccaacctgttgatggaaaagaaaaccaattaaactgtgttgggttaaaaagccaatgagacagtagttggggataggagtttggatacgccttttacagatcaagataaggattgctggatgaaacccataagggtacccgccatgcctctacattgataagttcggatatacctgcaaacagttaagaagatccaggagacatcaatatttgagaacatagtagtcgatggttggtaattagtctatcaggtatcagaaaagggtcaaaggtgatatggcagaagaacaatttgggatgctccccatctcgaggaagcactaaagatgatcatcggcaattaaaccctagtggcatagatacagatagcaagcaacgtatttccttgaaggtagtcagtgcagctttttgacgaaccacatcaaggtttcacggaaaggcagcaagccaaaggacctcatcgtccccagaagcgtccgcaatccacattaaagaataccacctgttagagataagccgaaagatgattgataaaagagattggcaaagacgttctccagcatgaaagaagtaggccgaaaggtgattgataaacagaaacatgctctgcatcgctcaaggaagacccctgatagtaattgccccgcaacagtcaccttgtcattaagtaagcaagatgacctaggtaaaagtgtttctatgaaggcaaagagtgaaatcttcaactcggtatcagatgctgcacggagtgaaaagtgcaagcaccggttaccaggcaacaccatgtcttgggagattgtcacgcccagaaattcacgaaccagaatttctaagctgaatgtgcattaaacccctgtccaggaccggccagggtacacaaacgacaattgttgacatacagatccacgtcttacaaaaatataaaagattacaaatgcagcggaaaaagagaaaagcgagctaagcctgaagacttgactcctgcagcgggcgactccattccacaggcatccttgacggcagcgacgaaaccaacctcttcgagacatcttcaactgagaaggacttcaactctggtgtgggggaaaagagagcaagactgagtactacccactgtactcagcaagtcacaccggaagaggaggtatgatgcaagatatatccaagggaggctaaaggttcttttgcataaagccggcatttcaaagcagtagttgaaagcagtaaaacagttgtagtaattaatccatattaaccaatcactgtccaacgttacaccacgttgcaacaggcccaaaccaccacctgacctaaccagttccaaaagctaactagggtgaaactaatcacggtgaatctggtcgaccgcccataaccgcgggcacggctattcgaatagttttactctgatcagaggtgtacaactgtacccacaagacacagccccacgacacgttcccgtgcgccgacatgccaccacgacataccggaaagaggccgtgacaggacccttcgcataaccccctctaacggatcgcaccacacttaagggttcgcccccgtccccagcagcaaacggcaagcccccttttcgtgccgcggtgaatccggcagccgatcaaccggacaccccggccgacccaattccatcacgcccaccctcgcctgggtacgtcggctagagaaaagctacactacaagcccagccgttgcccacgctggcttgtggtaagtacgataaattcttccagggcatcccgcgaaccggtctttaatcgccatgggcacgtctagcaaaaccatgcacccacagcccaccatgtagtgtattttaattagccaacaccattgcggtggcactaatccaaagctattgccaataatcaagtctatgctttaatgtggtccccttttgtgcactagttgaactaagcatggctaagcatctcctaaaccaacatctagtcattttaatacccaagttatcattggcataagggaaacaacatatagctgagtaataggacccatcccacatgatattgtaaaacaatgcaatatttaatagaaatgcgggacatttgtaaattaggtacaatatgatcaattgcaatgtatgacttgccttgctctcgcactgatggaaccacagcaacgtcttcgagaaactgcggatcgacgaaacgggcgaaatctacgcgacaaacaaagcacacaagcaaaacatgctataagactactgaaacaggaaacaaaaccatttttaatggattctacacatttttcttgatttactgagacttgaatggacttaaacggagctcggatgaattagttatgaattttagaagattcactgtgtttttactaataaagaaaaagtccttaattaattattgcgcaatatattccagggctgacgtcagcacggggtggcgcggcgccgacaagcggggcccaccggtcagcggcccggggagagagaggggaagggcgctggtacacgggcccactcggcagcggctcaagggggggg

SEQ ID NO: 29661 - DNA, 819 bp, Oryza sativa
ccaaacaagtgtagcagctaccattagcaatcatgcaaccaaaataattgtaagcagaacagattgaaatataaaaattatcttgacatacaggtgaaagcaacactcgctgtagagggagctctgtagaagcaaagaggccaacagctgttgcaacagtgcgtacaaattcttcccgcaccctccagctcttgtgagtccatgcataacttccagctctttcaacaatgattgtcggtgatgaaacctgagaatgtagagagtaaaaacagcttagtataccccgcaaaataatatcagaaccataaaggtccataagaatataaatgaatattaacattggaaaagcaacagtccaacaaaagatgagaaatctccatgcatacaagagaatatacagcctggaaaataagctcaagccaccaaggacattttttaaattcaaagtacaaataagtatttattttcaatggtgtagcaaattagcaacaggcaatgccatgtttcaaatgcaactaaaacattgattttgaagggctctgtccaaattcatagctaaaggtagctatattttgagacaaagggagtaaaaaagaagcagcatgcagaaaaggagaaatataggttcaactagctaaattctgtgtgttggtaattggctatggaaaaaaataatcaaacatgttctatatccaaaataagtgaatatgattttcgaacaaacatgtattttccccttttgtgtgcgcgtgtgtgttatagacatgacaattcagtcgttttgggctgttccatattaaatttgatttttcttaatgg

SEQ ID NO: 29662 - DNA, 827 bp, Oryza sativa
cattgacacaatcgaaaagaagcctttggtatgaactttgctcccgaagctccaagactttgttgaacagaatcggatcaagaggacagtcaggtaaatgccagccagtgaaaagcatactcgactgcgcatcgtctaatccagcagacgacattatattttgcacaagaacatggcattccgattcatcgtcatctacatcagggagaaaagaagactgccctcgggtgccaggtaatgctgattctgaagtggtgtcgtcccatgataaggaacaagcaacagcctcaattgctgaagatcttgagacagcttctgaagaaagttaagcagaaatgtcagtatataaactaaccaatctgagacttgaagaactctaggctggaaactagacttactagcattttttgatgtagtgcttgcagatgattcaggttcattacaactgctatcttcagagggtgcatcaagaactgacgtagggctgggttggtcgcgtgtactatttaggacctcattcagtcctagtttattcaggtttccacttcgacaatccaatgatgcaggtacatcagttaaagcagttgttccctgtaataaaatttctcatcaaattctctgtggccgaacaaatgcattgaacaaatatttcttacaaatggaagaaaggatgtcatagctcaagaataaatgtgcccatatcaattacccagctatatgaaaagaacataagatttggcttgcaagatagatgagatgaagtgcctacctctgaagtgctggttgattgcacagcacaaatatcaagtatgtcctcacaaatggtg

SEQ ID NO: 29663 - DNA, 548 bp, Oryza sativa
tttgggacaaagtttgaattacagaagttgatttattttgagacgaagcgagtacacatttgtttctggcgtaaaatgacataaacagtgtacaaaaaaaggggagaaattcatcagttgtaacttgcaaagacatatcatcgttgacaggcaggaacaaaatccagcacagcttctccacgagctccttccagactccaccctcaatttgctcggtaatgtcaaccaactgcgtcctcatcgttttcacccagcctgttccttcaacctcctgcttcgcaactctctctatcatgatcccagcattatctctcgtgctcacccagaacatccgtgccccgtaaatccaatctttcaggatgctccaaacttctatccgcaatgcaggagagaaggcgtccatccatgttcttgagtgtgctttgctccatgggaatgtacttagcaaggtgttctcgcggatctcaacaagagcaacattgacacaatcgaaaagaagcctttggtatgaactttgctcccgaagctccaagactttgttgaacaga

SEQ ID NO: 29664 - DNA, 729 bp, Oryza sativa
cagttagtgttcaacccttcggtttcgccgttcattcatgacttcttttattatgcagttatatgcgggaagcttgagtggacgtccacccacttattgcatgttatttaaatgattataaaaaaaattaaaaaaaatatgaacaagatagatcaatatgtaatatatcaattcacaaacatgtaagttaaaattcaacttctacaaattataacaaaaataacaaacaaaactcaaattactgtatgtatatttacaattaaatttgttatttttgttacaacttatagaagttgaatttgaacttacatgtttgtggagtgatatattacatattgatctctcttgtcaatttttttgaaaattttccgtaaccatctagctgacatgcaataaacgggtggacgtccactcaaattattagaatccatctctatgtatatgcaaactgtttttgagcaaacaaatgaaactaaatcacctacgagatcctccatgtccgcgggcttcatgtccacgacgttgaagcactggtccgtcacctccaggtgccacaggttgatcctgaggtcgtcggccgacacgaacgtctccccgtcactgcacacatgaaaaagagaacaaatctacattatgacctcgttaattctcagagttgagacagaatggcatgacacaggttgtaaacttgtactgtaatagctggatcaaccaacctaccagttgttc

SEQ ID NO: 29665 - DNA, 678 bp, Oryza sativa
ttcctttttgaagaatcttgacttgaaataggtcactcgtgctcaaccttgccctcgggggctcggttcggtcagctaaaatcgccaaacggggcccagaaccgagccgtgccccggggcgtggtgaactccgggggggaatcggcaaaaacccacaatcgggtcacccataaccctcggtcaccacgttcccggcctggccagtctcgacatgtggatctccccaggcactagccccgacccgagccatttgaggactaggacctgggcacgagcccttgatcaagccaagacacagaaggaccgcggcacagaccatcctcgtctcatacacacaacaaatagaattgacatagaaatttcctctttatttggttgcagattaaattagtctatacaagaagggggcccgaaggcctcggaagaagaaagaaaaagctattcaagattggcaggggcctgggggctcactccgacgcgcccgggtcaccagccttgtcgtcgttatcgtccgcaccaccgtcgacgccctcctcgttggagtcgatggcgaacgcgagccgaggggccgcaccctcgaagctgggaacgatgtggtcggcggcgtcccggacctgcgcgcgtgcgccgtcctcgggttacaaaagggaactcttccagcgctggccacggggagaa

SEQ ID NO: 29666 - DNA, 955 bp, Oryza sativa
atcaacgtagtggaaatcctggctattgtcgtccaataaagtcataaatttatgcggattggtgatgacttggtgtttcagtgttttaaaaaagtgttctgcagagcttaacggcacccttttttttagaaaaaaaaacattgatttgatgaaagaatatcatatggatatatttaagatcagaacttcataaagattagcccatggacatatgtaagggtcaaaatgtcacttaatttagtatcgaatggtgcaagtttgtatctttcaaaacttcaggagtttgttttttttgcacgacaatatgaatataaaatattggtagagtttcattttgctaccaagcattcatattttatttctctattcttgacctcgcttatgtaggttctaaatttacagtctgtgtgagaatggagtttctcttgaggttaaaaatgatgtttcatcactaatttgtatttgataacctgcatatttgaatgcatgaacatacaatgcactctgttttattcacatttttctcaatcagctgagttttaactcttatcttccatattctcaaggtgcacgggtatctgttagtgatggtacagtcactattgtagcaaaaacccaaccaattatggataaggctatcgagaaggtatgtatcaacaatacaacaatatgctatttattcattgtgcttatgaaagggtctgtgatctttgcttgcactttattcatgatcttctgttctataaaatttgaaatatgagtacaacacaaagtgcctgggagcaagaaccccagaccattctaaatttctaacttttctacctcattacaggtagaatttcttgtgggtcgtgaaattgaagttggcagaacggtcacaggtgttgtttcctcaataaaagagcccggtccttttgtggaattcaatggtggacagcaaggtctacttcatatt

SEQ ID NO: 29667 - DNA, 861 bp, Oryza sativa
attaattaggatatttcatgtaatttccttagagatatatttgggcaaaagtttaccgcaaagacttatggtatcttagagtttgttagagataagtgtcgtgtccggcaaggacatattttgtaatctcgggtataaatagaacccgaacccatgtaatcaattaacaatagttcaatacaatcttggtgcatcgccaccctttttactttcgttctatttcgacgagttcttgctttcgggttgagctacatcgttttgatcttcaactagaggtaaaacttgttatggcagcttgcattgtcgggattagtgcttccatctctatgacactctaatcttgattatgtaatctgtcgagttatcatatatactttgcaatctatgttagttgcgctatataacttgttatcagttggttcttattgttaggaagcaatcggtagagttatgttttgttattgatctagattgtatcgtgtatataccatcttttgtaggttttcatcatcttgtctagatcttatacttgtctttatgcttaatgttgcatcggttaggttcgatctattaagtaatatctataattatgatatctggcttcttttatgattatcaagagagatagtatcggggtttcagccgatcttacctaatttagctattttatatcttatatgcttaattgatatgctaagtctgccctttatattaagatcttattgcaataaagtatattaggctttctgtttgacatattctatttgttctagtaatggtatcggagtactagccgatacgtgctagatctatctgatcgtctatgctataaacatttataatctttgtattaatgtatac

SEQ ID NO: 29668 - DNA, 1274 bp, Oryza sativa
agtgcaagttcagactgggtagctagagtaccagcctttatttttattcagacactactgcaccaaggacagaaaggcattcaagaagttatgcagaattttgaaaaggtcatgaagttatttttccgttatttggatgatcctcatcacaaagttgcacaggcagctttctctacacttgcagatattattccagcttgcaagaagcaatttgagagctatgttgaaagaattttaccgtatgtattttcaagacttattgatccaaaggaattagttaggcaaccatgttcatcaaccttggaagttgttggccgcacatatcccattgacacattgctacctgctctagtacgttcactggatgaacaaaggtctccaaaagcaaaactggctgttcttgagtttgctaataagtcattcagcaggtacaaagtagactcagaaggttatagtaacagtggctttcttaagctatggctttcaaagctagcacctttaatacatgaaaagaatgcaaagttgaaggaaacttccatttctggaatcatagcagtttattctcattttgactcaacagcggttctaaattttattttaaatttgtctattgaagaacaaaaccttgtgaggcgagcactgaagcaatatactcctcgtatcgaggtcgatctggtaaattacttgcagagcaaaaaagaacgttcacgtcccaaatcttatgaccaagttgattttggaaattcttctgaagatggttatgcactgacaccaaagagtagttatgcatttgggcggttttctgctagttcccttgataatgcatcagggaagaagatgaatatggttcatggatcaatattccttgatatttctactggccgaacatcctctgatgtcagcattgataatgttaagcaatgtttcaaacctgaagctgaagttcttgcaacaagtagggaatcaaagaacattgctcgcacagttgtagaagctgcacgttcatggacagactatcctggaaaatcagatgctaccattgatgatgaaaattctactggtactcctcgtctggagtttggtcgtcttgctgtttctgatggacgtggtgctgttatttcaacttctgtggaagacgctcaagagggaaatccacttgtggagcttagttctgtgaagattaccccacacaccagtaatggccctagcatcccacaacttattcatcaggtacgcctgaaatatctcctttttccatcaactttgttagtaat

SEQ ID NO: 29669 - DNA, 1946 bp, Oryza sativa
catgtgaccaaggatgtcgtggcgaaggtaaactttcctcatttaggaagccctcttgcttttgggctaatccctttttaatgccggtgcaggtttcaaatgaagcaaaccagtgcttaaatgtcgtgttggcaaaatatgatctttttaaatgccttgctgtatgtacagagctcccttttttgtataaaagagtatatattaatgcaacactacttgtttacacttcttgttactagcagcttatacttttctttatctttgtgcttgcactgcaggttattgtacctttgttggttagtgatgatgaaaagatgcttgtcgtgtgtaccaactgtttgacaaaggtatcttagttacacgctttaattatcattgatgcaacaccaactccaaagataattgaataaaaacatcagacaatgaggagaagtaattgacctacatttaatttgtaataactttatatgtctatattcgtaaattcaagattcaaaataatctcaaaattctagattcctgaagtgttactagtacaatgaggcagtcattaatggtatttttatctctaataaggcctgtcacaacttgaatatcttggcaactaccaactaccgagttgattactggtgtaccttatacaactatttcattgaagcttcgttgctggtttacttgtgaatgagattaagtaaatattttttatattacaagaaacatgttagcttgtagagctgttccatctcatactggaattttattgttcatacataccatactaaccttatttggttgctggttttctcctggtaattttgcagcttgttggacgcctatcagaggaggaattaatgactcaactgccttcatttttaccagcactttttgatgctttcaataaccagagtccagatgttcgcaaggtgctttgcttgttctttgacactagtaatatgcccgtgcattgcaatgggcccatactactgagaatgggttgtggattagcctaaacatgcaatttttttaaccaattgtttttttttgtttttgtccggggaattttctatttttatgtgggagcacgcgctgcgtgcgaggggaggacggatgactccacttttatgtagtagagagttttcatagggatatgctagtaaagaaggcaatagactgatagttaacatgatagaaacatggtaggcatgtaaagaaggcaatagactgatagttaacatgatagaaacatgtaaagaaggcaatagactgatagttaacatgatagaaacatggtaggcatgtgatagactgatagtaaagaaataagtacggaatccatttatacaacaaaagtttacttcatacacaggaacagtatggcccatttgtagtcattcctaaaattatttaaactgatttatcatgattgtttaaattggatatatgaaaatgatatgtttgggtttgttcgaatattatttccattatattataatttaccatgctctatgttagtgccatagtgcattctctattttgagtttctaataatatgtccatgtttggtcactgtcaattgcactttaatcacaagtgaccatctgcctgctgtctaccattgttatctggattatgtatcaatatgttttagataattaaattcattccagcctttgcttcacagaagctacgtgtaataatatatgactatgtgcacgtttaatacatatcacctttaaaaaaatgaatgttttgtgtttggaatctgatatcgtattcactttcttccagactgttgtattctgcttggtggatatctacattatgcttgggaaagcatttgtaccatatctagaggggcttaatagcacgcagctgcgcctagtaacaatctatgcaaacaggatatcacaggcaaggtctggtgcaccgattgatgctaaccacta

SEQ ID NO: 29670 - DNA, 2085 bp, Oryza sativa
aaggcggctcttctcctcatcttccgtcgccccgctgagcgccgagcccattctgcaggccttggccgccgcaaacaccgcggtgctagatgggttcagcgcccaagtggaggccctgcgcgcggaacgagcggagctcgaggccgcatgggcacgcgttgaggaggggcggcgctcggtggacgccatggtggaggtgggccgtaaagctcaccgccgtcacgtctcggagcttgaagcccggaaggcggcgctgacggagatcgctcgtgaggtggaggaggagcgagcggccgccctcatcgctaccaccacgatgattgaggcgcaagacgccctccgccttcaaaacgccagccgggaggcggagctgaaagaaaagctcgacgccgcccagggagtccttgactccgccgctgcccgagagcggcgggtaacagagactgaggcggcgtcccggcggcgcgaggagtcccttgaggcccgtgctatggcgctggaagaacacgccggcgccgtggagaaaggcttgacggaccgcgaggccgccgctgctctccgggaggcgacgctggcggcgcacgaggccgcctgcgccgaggaggagtgcgcgctccgcctccgcgaggacgcactcgctgagcgggagcgagctctcgaggaggctgaggccacgaccaaacggctggcggacagcctgtcccttcgcgaggcggcgcaagaggagcaggcgcgccgcaatcttgaatgcgtccgcgccgagagagccgcactggagcagcgggctgctgacctcgaggcgcgggaaaaggagctggacgcgagggcgcatatcggtggggcggccgcgggcgaaagcgacttagccgcccgcctcgcagctgccgaacacaccgtcgccgatatgcagcgagcgctggactcctccaccggggaggccgaggcccttcgcttggcgggcgagattgggcccgacatgctttgggatgcggtctcccgcctgaagcgcgccggtcggcaagcgggtctctggaaaggccagacgacggtgccccccaccaatctggaaggcctcgctccgcacctcaacaggatggcctgggttctcgaacaactccccgaggagcttgagaagaccatcaagtcatcctcgagggacctcgcgcggggagcggtcgaactcgtgctggcgagttaccaggcccgggaccccaacttctctccatggatggcgctggaggagttccctcccgggaccgaggacgacgcgcgcgcacgggtcggggttgctgccgaccacatcgtcaacggcttcgagggctcggcccctcggctcgcgttcgcccccgactccgacgagggggggaacgccagcagtgcaagcgacggtggcaacgaggccggcgacctgggcgcgtcagaatgagcccccaggcccccgccaatcttaacttttttctttttctttcttctaaggccttcatgcctcttttttgtacaaattaacttaatctgcaatcagaaatgatgaaaaaaatttttgtgttagttttattttgctatacatacgagatgaggatgatctgtgccgtggtccttttgcgtcttagcttgaaataagggttcgtgcccttggatggctcgggtcggggctagtgcctggggagatccacatgtcgagactggccaggccgggaacgtggtgaccgaggggtatgggtgacccgattgtaggtttttgccgattcccccccggagttcaccacgccccggggcacggctcggttctgggccccgtttggcgattttagctgaccgaaccgaacccccgagggcaaggtcaagcatgagtgaccttatttcaagtcaagattcttcaaaaggaaaaaacggcacagacacaacctttagaaaattgaaactgcttctattgaaatgctgaaataaaggaaaaaggaatatatgcgcatgtgtggtagcccccggccaatcctgcacacccgaggggggtgcggggttggcccgagccaaaacctgacacccgacccccccccttcaggggtagaagcgacgaaggtgttcgat

SEQ ID NO: 29671 - DNA, 7007 bp, Oryza sativa
cgcctgtcagtggcgcgcgcgcggggaggaggccgatgggccgcggggaaaggaaaaaaaggaagggagagttgggccgagccggcccaagagaggaagggggggaaaagaagacttttagagatttttctttttataaaccttttcaactttgtttatttcttctcaattattatttgtgctctgaaaattccactaaaatttgagggctccttttagaccaaggagaatttaacaaaaattctccgggccacatttgaatttttcttgtacgtattttagtgtttaccaatttcttttcgaattttaactaattctattattccttttagagaatgatttttaatttcgggatgaatttatcaggacgtgacaaatccaccccccttacaagaatctcgtccccgagattcgaggaggctagcaagaagataggttgggcggtcttctcttcttgtctgacttcttccgctctggactgcttggctcgatctcctgttgcagaagaaatcttctcttcacccgacttgtccctggttgcacctttaactgactcagactaggctgcggtggttgaggatggggcttcagttctagaacttcttatcattcatatctttggcgtcaacctcataccagttaccaccttcgtgacatgcgtcgacatcagctttgtcattactaggatatcatgtttggcaacttgcccctaactgcctcatattagctttcctggtctccgggtgctagctacttctgctattcgattccagggtcaaccactctaactataagttatgcttcccaagagaaccaatttatcccgcttgacatgctttgacgtcttcccgaatgactttgctgctggacttgttattgtctgatcgtgatcctgccagatctgaagcttcgttgttagaggtgattttaatctgacctctgtagactatcttcgaacatatcactggttctataactgggaatggctctcacgaacaagcagctcggattcactttctttatgttcagtttactttccgctattctcttcatgttgtcatcatttagcattcaacgtattcctgtgcaccttcagccttgatgtgttctttctcgatggatcgattgctaggaaaatgcgttgagcgatactattgcaagtgcttttattctagtagcatctgatacaaagcccaaggttgaaccgagctttagattccactgttcaggttttacttcttgacttcttggtcatgtcacaaaagtttccatccttgtccccatagaagtacttctacctgcggtcatctctcttactcgtgaattcacctactttaatgacagggcaactgttgtagggttgtttgctatcgggagtcttcctcgagtgacacaaatcatggttctcgttatcctttatcaatcacctttcgacctacttcttttcccagtaaccaaacatcttttccgatctcttccaaaagaatcccatggaacttgtctgtattacacatttctccctcattacatgaatacgaggcactgccttaaacaaaaagggacggtgcttaacatcggtacattgtatcctcaacatgaatcatccataagcatagcaagctcactgtttatagacatgaatatatttatgtattacatgattgctgcaaactttcgattacaccatgataagtagcgaactgaaaaccacaaacatggctgctcattttgattctggagagatatagctggcattgttctagtgactgcatcatccttgattggttctgtgattatgtgataggactgcatattgctatcattcacaggagaagcttccttctgattgctgtttgaagcggatgacggtcttctgcttggtatcgccctccggaggttgattgccctttgcttggcctggagtaggtcggggagagacacaactttttccatcgacgacaattccttgctgaggctgtcggtgcagagaatggttaatgctgaaggtattattgccatgatttattgcagagttaggtggagcaagaggagcattggtgctgtggatgatatcatcgatgttgttgttggagctgactagctgacgagacaatcgtagggttgttcgttggatttctgcggtcttggtcaacaacacactgagttggcaatccttgggcccacggtttgctccttcgcacagaaaacatgtcaccttgcgagtgggacactcccctggtggatggtcttcttcatagggagtgcagagtgtgagacacatgctagcaacgtgtccaatttctccacaacgggtgcatgcctttgatccgaagaagacacatctgaaactcttagtccaaacaaatgtctctttggttgatcacttgattttcttcgccatcaatcgcgaggttatttgattcataatagattatgagcttacggagatgagaccctgggtctccctaatcagcaacaaagtgtacacaactcaccggacttgcgatcttaacatggatccttcataaacttatcaaactccttcataatctcatgtttctctgttattacatgattgacggggaacaactataaaacataagtatatgattactgatacaagagtattatggttgcttctgactagcgctaggcttaacaggtactgcatttgctccagtgaccacttggcgattggcacgtctgcttccttaacaggtactaccgttgtaaataactttcttacgcttgggttcttcatcctgtacttgatttcttggctgctgtgctggaacatccaaaggtacaatgccgatactggcctctgtcttgtcaactgatggctggggctgtggtaatgcactcgctggagttggagctgttgcaacgcgggctataggactgcttcgggatgcatggatgacaattcgctgaggagcaagcttccgattgcagggagttgcgtggactgacgtgctggcagctatgtttctcggttttgggcacttgtcggcgaaatgacccattccttgacaattgaagcaacagatatcttcccggactcggcattttcttttctcattttgattcctctgtcctggcactggagttaggctgaaactgtaatcttggcgaggattggtgttgccttgatgcttctctccgttggaactggcgggttggttagccatcttcttcgtcagcagaaaactgaattgacaatcttttggtacatgatcagttccttcacaaaagaaacaagtgatcctgctcgttggacacctgtcgggtggatggtcttcctcgcaatgaacgcatatagtggcacacgagctggcgacatgaccgatttctccacaacgagagcatgccttacgttccatttcatcttcatcatctgaggagacttgatctgaatcttcactatcagacactctacctccattagctaaaagatgctctgtcaactgtggtgcacctcggaaggtatttcttctctgacgtcttgtcattcctggtggaggccattctgtgctggtaatgatcatcttacggacttcatcttcggttcgcattggtgtttttcttttctgctgaggacgctcccttgcatagtgcccttgctcatcacacataaagcaaatgttacttgcttcttttgggtcaacatgtggcacgtcaccatgggtccttcgggatgctggcggcatgctgacttgtggtgtgagtgcttggactgcctccaactgcacttgaggttgtatttgactcaggttcagaattggcgtctgatgctgctgtagtatctctataagcaatcggttctggttaatcaggtgttggaccagtgtcacacaactggtgtctggtgcttcattcactcgggagcttgaggtaccaatgtcctgacttctaaccttattgcctttctcattgtcagccatctgttgcaaaggtttggagagggagagagggaaaacaaaggggagagacagattagaaactaaggataggaccttaacagatctaagtcttttgctgttatgatgtatgttaggcttattctgcaagttgattaagcaaacaacctagcatggttacatcacaacccactgatgcaaaccacgcgctacacacacaagcaaggaaacacacaactaacgactctaccctagagggtggcttaggttctgcgacgggttctccaagatcttcactcttgcttcacatctggcttcactgcttcctttgctgcgctgacggatccaacagccttctggagtttcgacaaacaactgacgatgtcttcttcttcactgacctgaccaactagtactagttgaaatccgaagaaggaagaagggagtaaaccttttgcaaatagcattaagggaaggagaaaaaaggaactttcgcaaatagttttatttataaaatatgtccttaggttttatccacttggcttatcctacagtcgagatggctctgataccatcttgtcgcgaccgggaaaattgccttttcccgaacgccagtgtattaatccccgtcccaggaaaagccggggtacaccacacaaacatgatataaaggacacatctttattatatcgataatatttacattattacaaaggcacttcaggcctgacaatcaaaaataaacagcagcggactagcgggcctacggctccatcttcacaggcgctcaactggggtataagccaggactccacctaagacatcttctccaaagcttctcttactgaagaggggagaaagatagagcaagaatgagtacaaccacagtactcagcaagacacaccggagaatgcatgattaatgcaagggagtacaaggagataataatataggggttcagttttacagtaaacagcatttaaaagtcacttggttgcccaaagctattttataaagacgatcctagagctacacagtattattaaacaaggccgtgaaccctcacgaacctgccttaacccaaggcctacgatgattcagaccgaactggcaacccgaccctgggtcccagctcgtcccaagccaacccaggccaaccattccacattttagttgttgagcaaattttaagaatttgaaacactgacttgggtacattgctcggcttgcccataaccgagggcgcggctattcgaatagattatactctgatcagaggtgtacatctttacccacaagacacatcttcctcgcgtgcaaccacgtgccacataccaccacggtatacggacggaagacgtgacatagttcccaacccatcctagccataaacaagagtaccgacccaatccccctacggccgggacacccgggacaggcaggcaggactgagccccctagcagcagggcaccaaccctctgccatgacatctcgactaccgggccgcagctcgtgtagccttcatttgccctggagaatgtccatcgacccccgacttcatccatctccaatccgtgtacttttgtttatgaccagactgagccacaaactaagccttacccactagacatgtggaagtacggtagtgctttgcaacagaggcccgagcttaatccttatagtggccggggtgctacttcccacaactggcatgcacccaaaccccaccgaaaacaggttttaggggttttgaaagaggaagagaggtgtatgtccaattccaccataaaccaacaattccatagtgaccaaatgatatgaatatacccaaagtctaaaattataaaatccacctaatgttgtcctattaatcagcgaagcatctacctaaattcatactagtggaaccataaatagagtgtccactagttggggttttgtttattctagggtgaacaaggtaataatatcaataacaataatagtatggtcataacaaaggtaaataggcatggctaaataaaacagtgataacgcgggaatttaaataaagcgataatgcattaatttaaattaaaataattttataaactgggattcaatatgctcaaggatgatgtgacttgccttgctcgctttcccaaacgctggcttcaacttccacgaagagcggatcttccgaagctgcagcgtctacacgaccaacggaaaagaaaaaggcttttactctaataaactccacataacagcagaaacaaagcacaaaaatgggttcttgacttcttaaggaaaaattagagacttgaacggtccaattccgagttcaaatggccaagatatggccatttgaagtttatatgctctttaaatggatatttgcgaatttcttcatttaaattttaattaaaaatctcatttattgcgtcagccgagggagagggcgcgcggaccgggtccacgggagtggggcccatgcgtcaacctctcggtccacggtggaccgggagcacgcggctggcggcggtcggcgccgtgggtcccacgcgtcagccgcacccgcgggcgcgggcggctgacggccgggcccacttggcagccgcgagggcgcgcccgaaggcggccttgccggcacggccgacgggaggggaacgcgcccgcgccccgatggtcaccgccggcgaccaccggcgcggcggagcggcacccgagagagaggagggaagggggaaggcgaatggaacggtcttcggctcaccccggtcgacggcgacgacgggaacggcggccgaagcggaagaaggcggcggcgcggttcgggacggcgaggacgacggtgctccggcggtcggcgagcaaaacggaggcgcggacgaggtcgacgggaacgcggcgaagccgatggaggtgacgccgagtggggaggaggtcccgagcgacgacggcggcgaactggagctcggcggcgacggcggagagaaggtgcgacggtgcgggctcgattccgacggggaggagaggcggcgagtggcggaaacggaggaggagagcacggggaacgcttatatagcgccgggagagagagaga

SEQ ID NO: 29672 - DNA, 1533 bp, Oryza sativa
gaacgaatccgagggagagagagagggaaaaacgggggaaacgggagagggaatcgcggggaatgattcccccctcattatggcgcgcagggacggtgggatgcggcggaatctgcggcggcggcggcgctagggcacgggcgagcggcgggagcggcgggaggaaggcgatgacaggtgggccccacccgtcagcgagggcggcgggcgggcccgcctgtcagcggcgcgcgcgcggggaggaggccgatgggccgcggggagaggagagagagggagggagagttgggccgagccggcccaagagaggaaggggggaaaagaagacttttagagatttttctttttataaaccttttcaactttgtttatttcttctcaattattatttgtgctctgaaaattccactaaaatttgagggctctttttagaccaaggagaatttaacaaaaattctccgggccacatttgaatttttcttgtacgtattttagtgtttgccaatttcttttcgaattttaattaattctattattccttttagagaatgatttttatttcgggatgaatttatcaggacgtgacagtttgccatagtaaagtgtcactttttatcatgataaaataggatagatgtcggacatctatatgcggagattattggtttacttgacaaggttattggaccttggggcataggttgggttggacatggagatgtcaccccaacagcacaagagtcacatatgatgtgattagcaaggtgttgcttacctgttttgataattgtctagcttggatgccaaagctcactagacactaataaaatgaggatcttaactcactatgttactagagggaattttgtttcacaatacataatgggagtatcttttgttaaattgtttgatgaaaggttaaatgtaaacatggtgctgattttgcatacatatatttctattgtagattatggcagctcatgcaccatccaattttaacttgcggtctattcttgagaaagagaagttgactggaacaaacttcatggattggtatcgcaacctgagaattgttctcaggcaagagcacaaagagtttctgcttatacagccttttccagctgacttgcccaacaatgctcctgctgctcaacgtaggaagcatgaaaggcgatgcaatgattaccttgatataagctgtctcatgcttgctactatgtcccctgagcttcaaagccaatatgaggcattggatgctcatacgataatcacgggactacgtaacatgtttgaggaccaagcaagagctgagaggtttaatacctcaaagttcttgtttgcgtacaggcttgcacaaggtaatccagtgagcccacatgtgatcaaaatgattggttaccccgagagtctggataagcttggttttccccttagccgagagttggctactgatttgattctccagtcgctccctcccagctttgagccgttcattatgaatttcaacatgaacaacctgaacaggaccttggc

SEQ ID NO: 29673 - DNA, 761 bp, Oryza sativa
cgagctcggtaccccgttatctctgcttcttgtttgcaagcagagggttatggttttagatctgtggacaatggttgttcagtttattataatgacattttctatttccatgcacccatgatgaatggcttatacattgtgaatcttgatggatgttcagtctataacattaatgcaaaaagacaacgtcctaatgatttgaatcccacttttatttggcattgtcgcttgggtcatataaatgagaaacgcatggagaagcttcatagagatggacttctacactcatttgattttgaatcatttgagacatgtgaatcttgtttacttggcaaaatgacaaaggcacctttcacgggtcaaagtgaaagggcaagtgaactattggcactagtacatactgatgtatgtggaccaatgagctcaactgccagaagtggttttgggtactttattacctttaccgatgactttagtagatatggttatgtctacttaatgaggcataagtctgagtcctttgaaaagttcaaggaatttcagaatgaggtacaaaatcatttgggcaagacaatcaagtatctacgatctgatcatggtggagagtacctgagacttgaatttggtaatcatctaaaggagtgtggaattgttccacaactcactccgccaggaacgccttagtggaatggggtgtctgaacggaggaatcgtacattgttggacatggtgcgatcaggggatcctctagagtcgacctg

SEQ ID NO: 29674 - DNA, 660 bp, Oryza sativa
aggcaagacagaatctgtctcgcaacttttcccaactaccgtttacacatccaacggtagaggtgtaccattgctttgctctctcttgaagagagaacgggaacaatttcgaccgcacagtttcttgtttcatgccacgaatcttaaggaacttacgaattacatgagcagacttgttcaaagtctcgcagatgattgtagggattttctagatcaaagccagaaaaaggattttccctaaccatactgattagttgtgtaaatgggctccaataaaggaggtggctcatagaattcgccccgaggagcagacagctcaaaaagaggttgctccatggtcgagaagagtgacaggaatacttctctagtatagcaggagcgaaggtagaaataaaaaaaataaaaaggatatgaggatgaactaggttcagaaatgatcagcaaccgttccccggcaacggcgtcagaaatgcttgttggtatttaatacggtcacagataaaatccgcaagcgcacggatataccgatgtagcactttccctacggagtattccaagggtatcgaatccaaaggaacgtgtgtgggcaaatctttcttgcggtcatccaaggacaccaagccaatgataggctaggatagagaggatttactagtgaga

SEQ ID NO: 29675 - DNA, 2771 bp, Oryza sativa
ccccgaaacagtgaccgccgtcaccgattggaagcaacccaagacagtcactcagattcgcagtttcttgggtttggcaggatactaccggaggttcatcgagaacttctccaaaatcgctcgacccatgacacagttgttgaagaaagaaaagaagtttgtgtggagcccgcaatgcgaaaaggcgttccaaactctcaaggaaaagttggtttcctcgccagtgttaatcttgccggatactcgcaaggactttatggtgtactgtgatgcttcgcgccaaggattggggtgcgtgctcatgcaggacggtcatgtggtagcctatgcttcacgccagctacgacctcatgaaggcaactaccctacacatgacttggagttagcagcggtggttcatgctctaaaaatctggcggcactatctcattgggaaccgctgtgaaatatatactgatcataagagtttgaaatacatcttcacccagtcggacctgaatcttcggcaaaggagatggttcgaactcatcaaggattatgatgtgggaattcactatcatccttgctaagccaacgtggttgccgacgctctaagtcgaaagagccactgcaacactctcaacgttcggggcattccacccgaacttaatcaacagatggaagccctgaacctcagcatagttggtcgcggattcttggctgcgttagaagccaagcccaccttgctcgatcaaatccgcgaggctcagaagaatgatccggacatgcatggactcctcaagaatatgaaacagggtaaagccgctggtttcacagaggatgaacacggaaccttatggaacggaaagcgagtatgcgttccagatagcagagaacttaaacagctgatacttcaggaagctcacgaaagtccttattccattcacccgggcagtaccaagatgtacttagacttgaaggagaaatactggtgggttagcatgaagcgggaaattgcagagtttgtggctctatgtgatgtgtgccagcgtgtcaggcagaacaccaacgaccggtcggacttctccaacctctccaagtgccggaatggaaatgggatgaaattgggatggatttcatcaccggcctcccaaaaacccaaggtggatatgactctatatgggtaatagtggatcgattaaccaaggtagctcgattcattcctgtgaagaccacctatggagggaacaaactagcggagctctacttcgctaggatcgtgagtctccatggtattcccaagaaaatcgtatctgataggggaagccaattcacctctcacttttggaagaagctccaagaagagctgggtactcgattgaatttcagcaccgcctatcacccgcagacagatggacagaccgagcgtctaaatcaaatcctagaggatatgcttcgcgcatgtgtcctggacttcgggaagacctgggataagagtctcccctatgccgagttctcctacaataacagctatcaagccagcatacaaatggcaccctatgaagcggtgtacggtcgcaaatgccggacaccgctattgtgggaccaagttggagaaagccaagtgttcgggactgatattctgagagaagctgaagctaaagtcagaatcattttggataatcctaaggtgggacaagtccccgcaaaaaaggcatgcagataaccgtcgccgtgatctggaattcgcagtggatgactttgtgtatcttcgggtcacgccattgcgaggtgtgcacaggtttcagacgaaagggaagctcgcacctcggtatgtgggtcccttccgtatcatcgctcgacgtggagaagttgcttaccagctggagttgcccgcctccttgggcaacgtgcatgatgtgttccatgtgtcgcaactcaagaaatgtctccgagtgccatccgagcaggccgactcagagcaaattgaagttcgcgaagacctgacgtatgtggagaagccagtgaaaatcctggacaccatggagcgcaggaccaggaaccgggtaatccgtttttgcaaggtccagtggagcaaccacgccgaagaagaagctacttgggagcgcgaagacgagctgaaggcagcccatcccgatctcttcgccagttcttccgaatctcggggtcgagattccgtttaaggggggtaggtttgtcgcgtcccaaatcgactctaaaattcatcctcaaaattgtgcaaaagaataattaaaattcatgtgaaagcctccaacaattaaaatgtgcaaagataaaagtcaaatgaggcttggaggatttttgtatatttcctaaaagcctaaaatacttaaacaaattttagtggaattttcagagcacaaataataatggaaaagaaataaacaaagttgaaatggttttataaaaagaaaatcctaaaagaagttcttttccccccccttccttcttgggccggctcggcccattccctccctctctctctctttccccccccggcccatcggatccccgcgcgcgcgcgcgccgctgacaggcgggcccgcccgccgctctcgctgacgggtgggacccacctgtcatctaccttctctcgccgcgcccgccgccagcgcccgtgccctagcgccgccgacgccgagaatcccgccgctcccgtccgccccgcgtgcaatcaagaggggggaattattccccgcaatcccctcccccgtttccccctctttaccctctctctctcccttggattcg

SEQ ID NO: 29676 - DNA, 1026 bp, Oryza sativa
ctgatcagagtaaatctattcgaatagccgagccctcggatatgggcaagccgagcaatgtacccaagtcagtgttctaattcttaaaatttgctcaacaactaaaatgtggaatggttggcctgggttggcctgggacgagctgggacccagggtcgggttgccagttcggtccgaatcatcgtaggccttgggttaaggcaggttcgtgtgggttcacggccttgattaataatattggatagttctaggatcgtgtttacaaaatggccttgagcaactaaatgtctttaaatgctgtttactgcaaccctaaccctctatattataattcccttgtactcccttgcatttattctgcatttgtgggtgtgtcttgttgagtacggtggttgtactcagtcttgctcaattttcccaagcccagatgaggagttccttgaagatgaaggctttggtgtctagctcgtgcctgccgtcaagcgcctgtggtcgtcgccctagtcttccgctgtttttcgttgtctttgagtgtgctgggccgttgttgcccgtgtaataattttatatacgcttccgcttgttaaactctgaattgtatcaacttttggtgtaccttgcctcctgggacaaggattaatgcacgcacgtaaggaatgcccgttgggttatttccggtcgtgacacccactccctcgggcaaccctcaggcgacagcctccggggaggctcgcgacgaggccgcgggcacatcgcctgggcccacctccccgggtgacgcccaggatcaaacgggtccgggggacatccccgagcccagcacgtcctccggggggccgagccgcatcgccttctctccaaggcggctcttctcctcatcttccgtcgccccgctgagcgccgagcccattctgcaggccttggccgccgcaaacaccgcggtgctagatgggttcagcgcccaagtggaggccctgcgcgcggaacgagcggagctcgagcccgcatgggcacgcgttgagcagg

SEQ ID NO: 29677 - DNA, 1794 bp, Oryza sativa
gccttcgctcttccaagtagtcgaggtcatctctacgaagctgatcttgatcagcctcgcagtacatggtggcccgaggagacctcagggtgagctcggatgggagaaccgcttctgcgccgtagacgaggaagaaaggcgtttccccggtcgctcggcttggtgtggttcggtttgcccagagcaccgctggcaactcctcgatccatgaatcgccatgcttcttgagaatattgaaggtcttggttttaaggcctttgaggatttctgcattggcgcgctccacttggccattgcttctggggtgggcaggtgaggcgaagcaaagcttgatgcccatgtcttcgcagtagtcgccgaagagttcactagtgaattgggtgccattatccgtaataatacggttaggcactccaaaacgggccgtgatgcccttaatgaatttaagagcagagtgcttatcgatcttgataaccggataagcctcgggccacttagtgaacttgtcgatcgcaacatacagatactcaaacccgcccggggcccgtttgaacggtcccaggatatcaagcccccagacagcaaatggccatgatagtggtatgatctgcagggcctgggccggctgatggatttgcctggcgtggaactgacacgctctgcatcgccggaccagatcgactgcatcattgagagctgtcggccaataaaatccttgacgaaaggccttgccaaccagggtgcgcgaggcggaatgggctccgcactcgccctcatggatgtcagcaagaagctcaacgccttgttcctgaggaatgcacttcaggaggattccgttagccgcgcgccgatagagggtcccttctaccagcacatagcgtttggaaatgcgttgtacgcgttcactcccttcgcggtcctcaggtagagtcttatctgtgaggtatgtttggatctcagagatccaagcaatcaatctaagggagcttggagcgctcccttcgggtcccgaggcctggactccgacgggcctcgggggccggtcaggcgcatccgtctcccctaaggggtcgggtcgcgccgacggctgggtaagcctttcttcaaaggcgcccggtggggtctgggctcgcgaggacgcgagccgtgagagttcgtcggctatcatgttatcccgtctgggcacatgccgaagctctatcccgtcaaaatggcgctccatacgccgtacttggcgcacgtaggcgtccatctgcgggtcagagcaccggtactccttacagacttggttaacaaccagctgagagtcgcctaacaccaggaggcggcggatccccagcccggctgccaccctgagtccggcaaggagtccctcgtactctgccatattattggtcgctcgaaagtcgaggcggaccagatatctaaggacgtctccggtcggggaggtcaacgtgacccccgcaccggcaccctggagggacagagaaccatcgaactgcatcacccagtgggtggtgtgaggcagctgcgaggggttcgtgctggcctcggggattgagacggtctctggagccggggtccactctgccacaaaatcggggagggcctggctcttgatagcgtggcgtggttcaaagtgcagatcgaactcagaaagctcgattgcccattttaccacccgtcctgtaccctctcgattatgcaagatttgaccgagggggtaagacgtaaccacagtgaccctatgtgcctgaaaataatggcgcagtttcctcgaggccatcagaatag

SEQ ID NO: 29678 - DNA, 19045 bp, Oryza sativa
agaaagctcgattgcccattttaccacccgtcctgtaccctctcgattatgcaagatttgaccgaggggtaagacgtaaccacagtgaccctatgtgcctgaaaataatggcgcagtttcctcgaggccatcagaatagcgtaaagcatcttctgggcctgagggtatcgggtcttagcgtcccggagggcctcactaacaaagtagacaggccgctgcacccttcggtggggctgatcctctctactaggggccgtacccccggggggttcttcgttcaagtgggctttgggggcgcacttgttttctgtgccgatgacctcggggtcggaggatgaaaggggcggccttccctcagtggcctcgggcccgtcctgggggtcgggggctcctggcatcgtcggacaagcgggcaaagggccaactccggtcgtcaggggcctctggccttcgttgggctcgggggcctcttctccctgctctttcccgggtcgagtcagcacagggttagcctcggggtcaaagggcgttaagtgcggccttcccgcagtggccttggggccctcctgagggtcgggggcacctagcaccgtctgacaagcgggcagagggccggctccggtcgtcaggggccgtaggccaccgtccgaatcgggggcctctcctccccgctcgctcccgggccaagttagcacagagtgggggtgcacgaaatgaggattgtcttcatcgcgctccacaaccaatgctgcactaactacttggggggtcgccgctaagtaaagtagcaggggctcatttggctccggggcgactagaactgggggagagctgagatatgcctttaactgagtgagggcatgttcagcttcctccgtccaagtaaacggccccgagcgcttgagagcttaaacaagggtagcgccttctctcccagccttgatatgaaacgacttagggcggccatgcaaccggtgacgcattgcacatccctaagtttgctgggggggcgcatccgctcaatagctcgaatcttctcggggttggcctcaatgcctcgggcagagaccaagaacccgagaagcttgcccgcaggtacaccaaacacacacttatcggggttcagctttatgcgggcggagcggaggttctcaaaagtttccgctagatctaaaagtaaagtttcttggttgcgcgtttttacaaccaagtcatcgacataagcctcaacattacgtcctatttggctacccaaagaaattcgagtagtacgttgaaaagtaggacctgcattctttaacccgaagggcattgatgtataacaataggttcctacgggggtaatgaacgcagttttttcctcatcctccctagccatgcgaatctgatggtaaccagagtatgcatctagaaaacacaaaaggtcgcaccccgcagtggagtcgacgatctgatctatgcgaggcagggggtaaggatccttaggacatgccttgttaaggtcggtgtagtcgatgcacatccgaagcttgccgttcgccttgggaacgaccaccgggttcgccagccactccggatggatgacttcacggatgaatccggcctcgagaagcctcgccacctcctcgcggatgaaggcttgacgttccggggcctgccgccgcactttctgccggaccggccttgcgcccggccgcacggcgagacggtgctcaatcacctccctggggaccccgggcatgtccgctggtctccatgcgaagacgtcagcgtttgcccgcaggaaggagacgagcgcgtcttcctatttgccatccagaagaccaccgatccgtgtggtcttggatgggccgtcgcccaaggcaacctccttgaccgggacctcgtcgcatgtggcaatccgctgcctcggggcggtgggggcggaggtgccaagcctctcgtcaccaccctcgggcttggtcgcagcagcgaggtggtccgcgcgctgctccatgcaagcgagcgcgactttaaggtcgccacggacagagatggggccaccggggcccggcatcttcatctggaggtaggcgtagtggaccgccgccataaacttcaccaacgcgggcctccccaggaccgcgttgtagggcagactgaggtccgccacatcgaagttcacccgctccgtgcggaagttggctgatccaccaaaggtgaccggtaggtcgatgtgacctaacggccatgtgtgccccggcgtcacaccgatgatcggttgagacggctggagcaccatccccggggccttgatagcatcaaaggccgcgggggaaaggatgttgagagccgctcctccatctatgaggacacgccccaacttcacattgcagatggtgggagaaaccaccatcgcaatctgccctccccgggcaacgcacggtgggtggtcggtctggtcaaaggtgagggccacctccgaccaccgcgcccgacgcgtcgcctcatgagtaggggccgcggcgagaagctctcgcctcatggccttgaaactccggcgagaaacgtgagcacacgctcccccgtcgacagtggcaatggtggccccaggttcttggaaacctaggtcatcatcaccgtcatcgatgtcagcggcgggggccttctgtttggcctcacttcgccgtttaccggagggaactgccgcggacttgccctcacggcgttcctgcctcctgtcctcctcccacttcctcgttcgctcagccaagtttttgactgcgcgacagtccgcgagatcgtggagggaggtgttgtggacggagcaccacttgctggctgggcgctccctgctgggagtaccagcctctttctttttgtcgctcgcaggcctcccctttcgggtggcccgcggagcgccctcgacggcgaggacgtgaccctcgtcgccggaatggaccgaccttttcttcctcctcctgtcacgccgccctgtctgagcggcggatccgggggcggccgaagctgccacaccggaaccggaggggttccaggtccaggcctcctccttacgagccactcggtccgcgagctgaaaaagttctgcggtagtctggggctctttggaggcaatcttttcgagcatgcggttgtgccgcacaccccccctgaacgcgtagatcaccgcgtgtgcagggatgcaaggtatagtattgcggacttggcagaaacgctgaatgtacgagcgaagggattcatcatcccctcgctgtactgcgtgcaagtccgcttcttcacctgggcgtggataggtgccttgaaagttcatggtgaactgctggcacagatcctcccaggagtggaccgacgcgggtggcaggttcattagccaaccccgcgcctgtcccttcagggccatgggaaagaaattcgccatgaccctgtcgtctcccccagcggcctcgatcccggtcgtatagacctggagaaactcggtggggttgacgctcccatcatacttctcggtgatggtgggccggaaccttgggggccaacggacattccgaagactcgccacaaaggctctacagccaacaccaccaaccgggggcacggagggctgatcctcacgtccatgtcgaggtgacaccctggacgaagaggcaccctccgttgcgcggggagtacgccgatcactacgtcggcgctcaatgtcgaggcgggcatccggctcttcatgctgatcctcccgagtcggaggcgccgacgaaggagtggtagccgaatggcgtgcagcagccgccgctcgccgcgccctccgccttgatgacacagaaccggtagtggcggcgccggaggtcttggtggtggcggaccgtccgccagcacccaggcgttgctgtgccgtcatgaccaagttggccacgtcgtccagccatcgctgggctggagactccgggtcagggacgacaggcgggtgacgtaggagcgcgccaacagcctgaagcgcgccttgaggcgtgctgccgtcgccgtagacgaggaggcgacgctccccatctcgccgttctcctgcaccacccgcgactggcgatgctgcggatttttcgactctctcgagcgcctccccccgcttgggactttggcgtggaggaggtgggggagtacgagctcgacggcgcgggtttggctccccgtcgtcgccgctcacactcggagagaggtcgtgcgcctttgcttgctcggccattaggcagaacaagggaaacttggcgcacacggaagagtatgagagctcagaaaacacacactgagccccctacctggcgcgccagatgacggagctcgtggcccctcaccgggagactgcgcaagcccccctttgccggttcgaccaggggcttagggtgcaatcccaagctctctctctctctctgtatgtggaaagatcacccgcccgcaagacacacgagacacggcgatgtatacaggttcgggccgctgcgaagcgtaataccctactcctgtgtttttgtggatttgtgtatggacaagttacaaaagattaacttcctttcccctcagccttccaaaaaggaaaaagtcccctctctaaatgggcaaggtcctccttttatatctcaaggggataccacatgcacctttctctttaatgggcggagatcggtacggtttccatccgggagcccttctgatgggacagcccacacctacccccacctcccccgaagacagagatgacgcgggaccgtggctgtctgtcgatgacgcgaccagtgccagactggtcattcttgtccaccacgcgtcagcttaacaacgtgcatgtttgcccttcttcgtgtaacaccttgcctgtaatggttaggatgaagcctggtataaatctgaccagggctaacgtgccatctctaagagataacacgctagctccggcttgagacgagtgcctagaggctttcgtcttgacgggatggggcaaggcgtgcgtcagaccgccagtcgccacctaacccgtgatctgaccggtctgtgactggtcacagaccggataaaggaacgcgctgtactgcgttgcatgcagcgtgacacgcttgaccagactgcaataaatgctgttaggtgagcacagctgtgctcacttatcccatatatgtggcgcagacttccttaaggggtcggggtgcctcggccctcggggccggggcaagcgcaacccgaccccccctcgggggaaatcaggaggagggcggacacctcaccctcgggcccgacgtccccgaaggtgctaggccacgtgggcgattgcgtctgcctcaagcctctggtcatgatactcccggtcccatatcaccgacaccgtgggaagatcatgtagagacagcttgactaataatttatatattacttgtgataatcatattctaagcaggggttaagataatccaagggtagagtgacacacaagcattaactactcattctcataatatatcatctaagttaagtggatagaaaagagaaagaaaatcttttcctatacttgtaatatacatagtatacatacattctagctagctgatatacgagctaatactctctatcggatgccttcctggtacttcgagaagccaccactggctgcagagttcctacgacaacccgctatgaccatacaaccggggctaaatacggaggaataccctccccaggaaattaacttaggattatataccagcgaggaggaatacccggactgagctgtcacaatcagcggcccacctctcattcgcaatatataaccccaaataatgatatcccgtaatctagacaccacgtctaaactaccagatactactctaatatcatcgtcgtgacatagagtaattgcataagcaaacattataccgcaccaaagcatctcccagataagctagccgtatattcagtataacataaacataatgtaaagtaggcattcatatactcagaaagtattccaataccataaatgtataaagaagagtattctaataaaagtacaaagcttacaaaagagaagagagaagctattagagccatacccgaactcttccgaaggcttccggactcctgatttttactctattcctattccaccagctagatactactaaactaaacttgagagaaatgaaaaagctattgcttgaggtgtgtgttgaagtgaagagagtgagctccttatatagaggtagttatgacggttgtggaaggggaaatgtccgaagtaccccgcaaccgccatcaggagaagatctggagcgtctctgccaaaccccacatccaacggtggagaaatgggttcggccgaacctggggccggcccaaccagcccacaatttggctggtggcctcctggacttctcttctccgcagacttgtgaattttggcccaattcatcgtgtcaactcgtcaactctgagttcttggcccattcatacataagtctggtgctcgacatcgtccgattgatttatcgtttgcgttgacatcaattctccttcattttagtgtcattctctgcaaaaggttagtatacctaatactagtggaatattattattctaacatgtttatgcattgcaagcatggctagttcacctctattttggtaatattgactgtcgaaactgatcaataacgaccatcaacaatacttcactcgaacaacctcatattttcgcttatgcttatacttatcagccaaaattttgaattttcaactttaaatttggagctgatttcggggtttttcattgtagtttatttttcagcctgtgcttttagatcgttaagaataagtatataaaagttttttttctcgaatacgcaggagagtacataaaagttttattcacaatttttttttgcaaatacattattcgctttttcctccaatatgcgacacgacgtggctaaaaatttgtcacaaaacaagcgtgacaaaaaaatgaggtaccttgttaacgtatgattaatgaagtatgagctacaaaagacttaaaatattaattaatatgattttctaaagcaactttctaaatgtatttttaaaaataagttcaggaagcgtgcgtatggaaaacgaaagggtggaagtgggaaaagaggagaaatgaatgcagcctaagtttacctttctcgccaaaaaaatatctacattatttactgatgttaaagaagatataattgctaatagggatgatttagatattatatagtataaatctaagaaatagcataaatgtttatcaaagcaacatagtataaatctaacaaatagcataaatgtttatcaaagcaacaccattcaagaaattttatggagaactcgtactttagatgtcatttatatgtcttgtcaagcgtagcctacgatgcatggccgtgcttcacatgggctacctttgtagttaaagaaaaatgcttgtatttgatatggtccgagtagtacttcataagtctcagaatgaataaatttttcatttcccccctccatttatcctcggataagttcattttttcagccattattactttggagattataaaaatagatgataaatatattaagaatagataaactactgaataataaaaatagttacattagggatttgataaagggatagtattttagtttttttatttatatatactacatccgtcccaaaatataacaacctatgattgaatgggatatatcctagtccaataaatctggacaacactttgtattcaacgtgcaatcctaaatagtcatattttgtgacggagggagtactagtagataagtaaaataataaatttattttgtgaaagatggagtatagttcttacacccaaaaatgaatttcgtttgtttgacaaacggaccaacgatcagaccacgctgtgactgtgagccggacaacactttgtattcaacgtgcaattgtgactgagggagtactagtagatagataagtaaaataataaatttatggctgaatagctaatttaatccctcaagttttaccgaaggctcaatttggtccttcacattttattttgtccacatagctcctctaaatatttgttttggcttgaaatcaccttaggcccacttaatatgccatatggctatttctagttaatatttctattagaaaatgtcccttttacacttaatttgtatatacaactatatactagaaaatagaaaaccaaagatgaataaacaacattgcagatgtgtttcccattatttcaacatgtgcacataaaacttaagcaattgctactgtatatactttctagtacataatttattttcgttttacataatttactatggtgacctataagaaaatcaagcatgcaatttttctcttatatatgtgaatgataggggtataagtgtcatttatcaaaagagttgttggttcaatgctacatttgaactaaaatgaaaacttaaaggactaatacggatagattgaaacatcaaggactaaactgagtcccagatgaaatttgaaggagcaccttttgtgaaagatggagtataagctcctacgccaaaaaaaagaatttcggttgggcgacaaacggaccaacgatcagaccacgatgtgactgtgagcctggacaacgcagcagcaagccccgtaccgcgcgtacgccggggcaacgtggcacacgctcctaccctagcgatcggagacgagccgaccgcgttgtggcgcgcgcccccattgccattgcaattgctcgtctcgtctgtcgtctcatggctctgctcgagtgctcgactcgcccacacgacactgccaccgcgcgccattaactcccgcacccgcattcatgcccgcgccgcgttccaaccaccgcaccgccttaaatgcccctccatcccccattcccatccctcctcacctccacctccacctagctctagagccttccctctcctcctcctccacatccaccggagagagtgtgtttattggttcttggaggagagatgtccaagatggcggaggagaaggtgctggcggcgccggccaccgtcgacggcgggatgcagtcctccggggacctgcaggcttcgtcggcggcggcggcgcgtgtgcggcccgtcgagacgctcctccgcgccgcgccgctggggctctgcgtcgccgccatggccatcatgctccgcaactcggtcaccaacgagtacggcaccgtctcctactccgacctcggcggcttcaagtacgcttctggaactctcctgcggcggcggcggatcgacatggctcactctcctctgatctgatttctttttgttgtttttctttttcccaaggtacctggtgtacgcgaacgggctctgcgccgcctactcgctggcgtcggcgttctacatcgccgtgccgaggccggcgacgttgtcccgctcctgggtcgttttcctcctcgaccaggttgctttcccctcactgctgcttcttcctccatttcttgccttcccaacaaggattcactccaatttgcagccctttcgattcattttgctcgagcaatcatgctcctgtagtagaatgaaaaaaaaaaaaagctcgatgcgtcggaaataaaaagcagaaatctcggggtatttagagggggaaagttgaagttcgataaaattttgtttaaatttgagtaaaattgacttaatttatttatttttgaatatatcggacgaaagaatatcctatcagaggatggaaattcctgaaatttcagatgttcttgaaatttcgttcccgaatttccgttatgtctgtgtcgagctcactgaggtatttgtaggacggtgttttcggtgtgaacctttccttggatccgtatgtatctgttagcttaccaaaccgagaaatcaacaaatcctgtaaaaaaagatctgatcctttttagttcatatataacccaactgacgaactgaaccgaccgataacatctgcaaaaaagattctgagggatcatatcatacctatccatacgatgaactaactaaggctgacttcttttcttctctttcctaactcacctctctcgtcttgcttatgcatggtttttaaaatactaaacggtatattttaaaaaaaagtttctatatgaaagttactttaaaaaatcatttaatatatttatgttatttttaagctaatacttaattaattatacattgatacaccaccatgtttttgggaccgtctcgaacataatatttttctcaatttcaaacttcaactttcttattattttccgttagcttgttttttaaactgttaaataatactttttgacaaaatgtttctacgtaaaagttgtttaaaagattcaaataaatccattttaaattttataataattaatacttaattagtgggacaatagccattttgctccatgaagtttcgctctgagatcattttagtccatgacctttcaaattgtccaagcgagcctttaaactttttaaactttatcatgtggacatatatatatatatatatatatatatatatatatatagtcctttggcccatcggaaatttgccatgtaggcatgccatgtcatctttcaatgtcatctttcaatgccacgtcatctttcaatgtaaatatatgatgaaatgcccaatttgcccatacacatgaccaaattgttcctggagcaaaacttctattctcccttaattaattatatgcgaatgaactttctcgttttatgtgcgccaaaaaaattatcaaatcaactgagagaacatgctaagctgagatgagatcacatatatgcaggtgttcacgtacctgatcctggcagcgggggcggcgtcggcggagctactgtacctggcgtacaacggcgacaaggaggtgacgtggagcgaggcgtgcggcgtcttcggtggattctgccggcaggcgaggacgtcggtggccatcaccttcgcctccgttgcctggtacatcctcctctccctcatctcctcctaccgcctcttcagcgcctacgacccaccccagccttccctcggcaacaagggcgtcgagatcgccgccttcccccgctgatcgccgccgccgccggagacgaagaagaagacgaccacccagacgaccaccaccaccacgacatccccagctactaagcttgagctgctgcgtgcttgggtactactactagctaggcgagagcatgattaagtaataataataagtacttttatctctccagctaaatatatagtgatgagtgctttttaatttcttcttgtgctctgttatatatatatgtgattatctctgacctgatcatgatcatcgtcgtcatatactcatatatctctactcgaactcgtggtatgtatggttgttgattcgatcagctgtggtgaactgattgacccgttacaaagattgcaaactggatatgtatctgcggttagagaatgggtggtataatttgagatcttgaatgggtgttgcttaagggctccttattttccccctttggaatgaatgatttattgagaacattggagtaagaaaaaaaaaagaacttggaaattagatgtcacggtttgttgtatcgtaatattacgagtctatcggaaatttatagaaaacggcgtttggtaataccattggaaaaacatgtatatcatgtggaatttacacgagacaatgtatatttgagtttatgcaaaattcaaatataatagcctagtactccctccgttttttaatagatgacaccgttgattttttctcacatgtttgactattcgttttattcaaaaaatttatgcaaatgtataagatataaatcacacttaaagtactatgagtgataaaacgactcataataaaataaattataattacgtaaattttttaaataagataaatagtcaaatatgtgagaaaaagtcaacggttttaactttatttttttattttttaaaaattttatggtgtagtaggaagagagtaggggtttagggtttagggtttagtagtagcttccaaaggattttgttggactccttactctgttcaaagcaatcgtgtacaaataatcttacatcggattttagtactataaaattcatactctctccgtccttaaaaaaaaaaaaagataaactctgggtttccgtgtccaacgtttaattatccgtcttatatgaaatttttctataattagtattttcattattgttagatgataaaacatgattaacactttatgcgtgacttatctttttaatttttttcataattttttcaaataagacggacggtcaaacgttggacacggaaacttagggtttgtattttttttttttttgggacggagggagtacgttctatttagtacatgaggcactgttctgtggaggggggttaggaatggtggatagtaatatgattatttaaaagcagctttttataaagtttctttttttttagaaacgtaacatttaaacatttgttcagaaagcatgcctatgcctatgaaggctgtgtttagtttatactaaaattgaaagtttggtttaaattagaacgatatgacgaaaaagttggaaatttgtgtgtgtaggaaagttttgatgtgatggaaaagttgaaaatttgaagaaaactttggagcaaaacacggcggaaaatgaaaagcgagagagaagttgggaaaataggagaaaaaacttccgtatggaaagcttttgtaaagactgtattctttatatagttcattaaacgtgcatgtgaaaaaacttccgtacggaaaacttttgtaaaaactgtattgtttatatagttcattaaacgtgcacgtgaaaaaggagaaaaaataaagttatttgtagtagaaaagaacacacaacaaagtaatttacagaacagttcaccagaggttggtgactgcagttatttaggaatcactaggccctcttaccttgaaagcattttaatctgaaattagaaaacaaaaacttgaaataattaaaaaccattttcaaaatttccttatgctggtatttattggattttattttttcttttcctattgtaccattgccaaaaactaattaaataatttcaaaggtaatttaaaaaggaatcaacttcaaattctaaatttgaaataagaaaatgaataattttgatattgggaatatatataccatctttgactctttatgtaattatttatatatattaataattagcaagtcctaattgtcgtgtatacttttttttaaagataatatcagccgatataatttaacaattatattgacattccattaaaattataatattataatatacctgtaaatagcccggataacataagattggctcgatccattattcattgaataagtaataccaaaatgtagaatgaaccaatatctacatatatcatacattgttgttttttctccaatcaatataggggttgctcagattgtatccaaaataaaccttatcaaaatttgggtctagatcccctggagttggagccaactccaccggtagatttggctcaatcttaaccgttcttctgacttctacggctgggatcatggcacctactcttcttctaatcaactatcttaatcatatagatttagaggaaaatatttagtttttttgaagtacttcccaccataaccatgattattctccgaccaatagtatcaataaaacaacgctggccatcacaaaaccatataaataaacattagcattatgttcttcaccatggttggaggtggagatggtgggtggaatacccttgaatcttcagtttgactgtttgaggcaatgaagaacaatatgccaattttatcaccatagctgaactaaagtttgatgacaaagacgaagctatcgcggctctggaggggaaacgatggtctgctgctttggtactagtaatttaattaggaaaggaaagaaacacagttacagagattagagaaaatctcagccgtataagtcaaaaggacggttgagattcggccaaatccaccggtggagttggccccaactccaggggatctggacccatcaaaatttggtatattgtcaaaattttagtaggatttcttatgtattatcaaaatttggcaagaaagtaaatggatgcacatatttgacaacttaaaaaaaacatggtttgaaatggtattaatctgaaccagcccgaaacttcggagtactctctactagtactagccatttcaagaaaaaaaaaaaccctgccgcttgtttaagagaaatttaaaattttgtcgttaacaagttcttttttttttttttgctattgactagttagcgtgcacgtgcaaggcacgtcaacaatattgaatagtaaatactttacatatatggaacagaaaaaacttaacctttactgtaacaatagagagaaacaaatcgattattctttttctaaaaaacaaacaatcaaataatatatcaccgataattgtttacggcccattgccatccccgccacttaacgccttgcatgttggccccaagccacactcttttttaggcagagagaattcagttatttttttagtatttataattatccaaaatggtgctactgtttgttaatggtggtgcaaacaattgctttgctggtccagtttaaaatcggatgattaacggaagcatagtgacagggataaatctccgagaaaaatggcataaatcaacaatactcaaagagtctcgcattgatgctatgtaagagaaaatttgattatgaaatacaagttacaaattatcatggtcatgtaactgtttgctagtgtttatgcaaatggtcatttctttcattacggtttgattagataattactaacagcatcattaggttgataaattggatggttgctaataacatcatcaggttgctgtgacaatatgatctttctgcaagaaaaggttgcagttatagtgatgaagttgtgagccaaaaggcagaataaaggcacagtgacatctgtcacgctgatggtactgaagtacgcaaatctgtttacaaattgtagcatttttttgtcatttttcagttgaggtagatgtgagaggcgacgtcttggatgagctagttgaagccctaaagcagcctggtttgagcacctgcaaacaaaaccacacctccagctgtcaatcaatcagcttccaaatttgccaaaattactataagaaaatcttgcaatggtcaagcacgtttaatacacgtctaataaaaccattttctatatacagacttagaacatattgtttttctcaattttatcaaaattatctaattgaatgttgtgatttgtcagatacacattaaaacaaaaccctgctgaaattatctgaacttcgcataccacctgctgaatcactgtaaaacaaaaacatttttttctctgaaccttgatgttcatcgccaaagttgggttaggcagtatccaacacatgggcctaaattgtccctttaggcaatatacatacatatgaggtagtgtaagagatacattacagaagaaatttggagagcagcaacatttacagtgctctcctgtctaaacaaatcgttccttgcttcaattatctttggacatgtggtctatatatactctgtacatttcaataatcttgagacatgttgtctatactcagtccattacaatgctctccagtccaaacaggtgaaatggattgaagccataactcctactacgagtatatgaaataagagtattaacaatgtatatatttcttaccaacaatattgtagatatgcagtgatccttgtggcagtgcaattcaaatatggtatctaaaatatgggtaattatcataacaggataaacaagctacaaaggatttatgccacatgtaaatttacttaattaacttgcaatgtcaactggctgaaataataatttttcgagatgattacagcactttaaaagcaatagcttcaaaggctaacaacaaaaacactatagctgataaaaaaggtacggtaaattatatttcttgccttcaatagtagaaaagaaatagaactgcattgacaaatgaaagatgtccagaaatctcaaaacttttttacatatctagctatcaaagtcacatatatgcccattccagtcaaatatatgattaaattaagaaatgcacaaattggaatacccagaaactgcatcacattagtttgagctaccatgtaataataatctactgccacatgggaatatgatattgaaaattagcctaagaacaaaagtacagtggagcccaagaactaattgcctataggataagccccaaccacaggatggcatccatggtctagctttgtggtctgccaaaacatttacgtgttttcctctaacagagctcaccttcacctgcaacaatcaggcctcaggaccagaggggaagtcacagttccatagcatctgagtttacaacagaggggatgattgaatcgaattacatccagctagggtaatattcaaaaatagaaatagaacgacaaaagaagttaaagaataatgcacgtgcaaggcaaagaaccataaattaacatgacatgtttcataattgtaatcattccatagttcataatagatgcgcaagaagttcagttaagaaatttttttaccaaatcaaattaatgttgcaccaaacaaaaaactatccaatataattatgagccaaatggcatgcggatttttttagatgcaaaagtttagttttttcttctgagatgaaactgtatacaaaatactgcatacctcatgagtacatggtgtttgaatatgtgacaatgaagtggaccattgctacaggcctaaggaagaaccagctccaacaggggaagaacataagcactccagagccatttcttcaattcaggggttcctatcaatgaaaactgaaaaacaaatcctttgtacataaacaattgcatgtttgtactgcaggaaaaacgtttacatattcagttatcatgaattatgtgtatagaactaaacttgacatgttcaaggaaaatattatcactgcataaatctgaatttgtgatgtgtatgaaagcatgatatccagtaatatcaatagaatactctacatgcaataccattgcttataatgatgtccaaagtatcaagtgatggtgcatagaagtataggactataggggcttgtagcagcagaaatattagaatggcctcatcctgaaactaaagtatgcagtatttttagtccataacggtctccacatgtctttagtagtaacaatgacaaagatatacagggactgtcacacagtcagtcacatatgtgggctgggccaagcggtgggaggagaaaaacaaaatttgcatcaacaagaagcacgtgaggtaactaacaatgtctattggtaaaaattgtacaaatctacgaaacaaaacgtctagaacaatccatgcatacaaacttttataaaaatatttctaaaagtaatgaccttctcaatctcagatgattcacattgctagcgttcacctttagaatgaatatcctactctgctcttttcagcttggaatttcctcctggaatcaaataataataccaggttgaattttatattgacaatgtactattatttgcatatttcagaaaaaagctagtgagcaaggcatcatacactgttaactgttcaatgtgcaagatgtctaaaatgacaggggaagtatgcagtacgacaataatcaaatctctataacttcgccactttctttactatagtccctcttggtggtgtttggatccagggacttaactttagtctctgtatttagacactaatttagagtattaaatatagactacttacaaaactaattacataaatgaaagctaatttgcgagataaattttttaagcataattaatccataattagagaatgtttactgtagcatcacatagactaatcatggattgattaggctcaatagattcgtctcgcgaattagttcaagattatggatgagttttattaatagtctacatttaatatttataattagtatccaaacatccgatgtgatagggacttaaaagttttagtcccatctaaacagggtcttagacttttttctcgagaatacacaaaagtttttcatgcctttgtatctagaattgggaggtagctcctcctagatttaaaaaatcatccaatattatataagttaagttgtctaaagaagattatatttcacatgttattaagtacccacggatgatttgcttctttcagcaaattaggtactggtgccgtcttctccttcatctatctctcagttgtatcattttccacgtacaaaacatgctttgagtcagtgctaccactgataaggaaattgatattggcattcatactaatactaactaaagaggaggaagggcaacaaaggatgggcttgcaaataaatttaaggtacttgaattgcacctcagtggaggcggtggagagcctagcctaggatatgagcattttgtttgttacctctctgaccaaggagctcacttttttttccccggaaaacaaggagctgactttggttacagaaaaatcagaagcatgtactggaaagcaataatccctctagatgaaattgaactgggttggatagcaatagtatacaagttcactaattcacctgttgttgataacctattactatattccattcttaccccttctcttatagctcattctcataatttgtaactccaccgcagtccctaccaaacaataaatcacaatttatccatccaaaacaacatttgctaagagagttagggcctgtttggtacaactccaactcctaaatataactccaggagttgagtctggagtggagttgtggagctggctaaacccagctggg

SEQ ID NO: 29679 - DNA, 11805 bp, Oryza sativa
aactctagtacattttttgagagagctctacccaactccactcctagttttggtggagctgaaactgtttggctgagctccagctccaggagaggtggagttgaagctggagttgtgccaaacaggccctaactattttctaggacatggttggctgcagcttcagttcattctctggcaacatcctgttggttgcaggctgccgctggtactctttgatccccgcaagctggcactgctaattaacccccaacggccactgtcattgctaacaacatggcctctaggcgctagtctaaaattcgttgggtgggtgagctagactgggttcccctattaaaataaaatccccaactggcataatctgtataaaatcccaaatacacagtcagaataatacgcaggcagcagcagctgaaccaagcggcaagcgcacatgagccgaaccagcaataggagccgaggagaacccctcccacgtaccttgagcagcaccatggaagcccggtagtcgcagctctgctcctgtcgtcacgccagatcgcaggtggagttcatggcagcgatggatccacggctccgatggtggcggttgcaggcggagtagggaaccggtggcggcgaggaattgaggaggcagcggggaaggcgcgacggtggtgaagcgcgaacgcgcgcgaggggaacccgcagagggggaaagcgcggcggtagtgaggcacggatgcggggggaagggcgccggtgggatgcgtagacacggggtggggaacgcccaacggcggtggggaggcacggtcaggggtggaggcggggaggagtgcgcccggcggtttggggataggacggggaagagcgctaatccaatcgctattttgctgtaaccgctgtttactcgaggtatgagattggtgggagatcgctaattgcagaggtgatccaacttttgatataagccattggatgaatagatctaagggtaaaaaaaaagtaggtatttgatgaactcgtactttttatagtagtatagatgagtcataacccacaccgcttggtttttgcaccaatcagtgatgcaattacgaaatgacagtaatgcttcgttcggttgatcatattaaagaaaagattagggagatttagaggagaataatttcacatctattaatgagtggaattaatcccctgtaacctcgatctaataggaaataaccgaacaaagagaaataaaagagacatgtaggctaatatttttatttaacctttcacataattttttttctattaatccaaaaatgaatgttatttaatcagcactatgtctagtaaccaatatacacaatttgagagaatctaagattgacttgggaacatttctggattgatgccaaaatatgccataccaattatttggcaacttaaatagtatgcgattggtttggattagagccagagcattgctaatgcccatactttatttggcaatattctagaacttccttcactgatatcaaacacatgaatagcaaaccaaatatatatactactagaaaatttatgctcctgttggcgcgcctactgattaacccgtacatgcgaaatatgtagcgatatagcctcttaatagtattttaatttccgttatttttaatccaaacggatagtatgtcatgatcaagctttaagataaggtgtggcttggttagcagttggagtagcacacagtggtaaagctcgagaagctttaccattgcacgtcatcgttgataggaccgatcatttttcaaatgatttcatgatgtgccaatagtaccttgctatgtatttaatttattttgcattaacatttgattttgatgctactccatttttattttttaagatagttttttttacttgatttagttctctatacttttgtagtgctaatattttacggatatataaaagtggcatttgtttactttgatgtcaaattctgtagcatgagatgaggacattggtatatacttgaaatgttccttagggtagtaacctcttgttacatagttgcataatagatttattggtaattttttaattgcttggaattgtgtcatcctttatacaatttttttggaattttaattttgtgtactaaaagtcacatttagatctatcatatgacacgtataagttaatagtacattggctcataataatgaagagaggaaaaaaaatcctctcaaaaaacaagagaaaaaaaaaagaaaagacaaacaaccaaagaggcctagtcctacccctctcccactggctggcacagctgagctgcagcccagccactggcgggacggcccaactcgagcgaaaaagctaattggcgactggacatgtgtcgcgcgcgggggtggggcggcggacggcgcccgcgagagaggttttttatttcggtctctgttttgtttttttttctgtttcttccttttttttgggttctatttctgttttggttttttcggttttttttctctttctttttctgctttttttaagatgtacgtatgcaaagtttatattcgtatatataccaaattttgtatttgtacgcatataaagtttgtattcgtgttattttctctcggtatatatataggtggtttgtatacacgtatgcaaaaattgtatacatgtatactttttatatgtcaatttttggtacacataaaaattatatatacgtatgtatatactttatatacgtatgtataaattttgtattgtatatgtcgacgtttgatgttgcaattccggtatttgtataggatggagatcgttggtactaggatatatacgagagtgaggtaaaagagacggagacatgatttttatacaggttaggaccccttaattggcaggtaataaccctacatcctgttgaccgaagccggtcgttgctcttattcatcataatcacaccagtacaatatttggggtagcctatctaactgttgtcgacatgacggtctgaacgtctgactcgtagtcgacaacagggtagccttcctcctcgagttcgtgcccggcaagatcagagacaacgctatgtctctcctgacagtatccggagacatcgtaggggactagccgtgcttatccctgatgtcgatatccggcggcttatcttggcgtatgttggcttgtatgttgtggcctctattgttccatgtatgttgattgtctcttctatggtgggtgtgtgttgatcgtctcccctctcctcctagggggccttgtatttatacccataagtgtcctcttgtccaagtagaactagggaaaccaatatggatacaatccaagtagtccttgtcgtttccatgtagaactctggttgtctttccttatccggaactcctcctatatccgcgggttgtttccgtataagacatggtatgtggtgggtcctgccgagatttagtcaactactattaggtatgtggtatccataaccctgacagtagtccccgacttcaatgcaaatgaacgagttcatattctcaaccgcaaaccttagaggaactgttatcgagctcacgtgaccgttctcggtgagttcagagataacgttaaacttcctttatcagcctcgtgtgggcacctaaagggtttgtctgagtcaatcatcaaagtcaaccaagaaagtacagagcatatgactaagttacccgtcttgctgtaatcgagaatttggattgaagtcaagaaattttatctcgacaggtacaccatctcttcattccgtattccttgtcgagatccaccaaccgttcttgagtaatcgagtaggcgtagagtctgcgacggagccttgtcaacatttgtcgtactcgcctttgtcgatcttggtgtagaaccatagagacatggagtcttcaacgatgtcgaatagagttttcctgaaatcaatacttagaaaagaatattagatagaaatagcccccgagtgaacgctcaaagggtgacatgttataatatgtatggaaaactaaaaatgaattaaatttacataccaatgttttgtatatgagcgtctactcttttaccaacttcgatcagtcaatttgtttgagttatacactctccctagcccccagccttgtcgtcggagaatcgttctcgggaaataaggctcttagacctttgacctgcatcggttgaataagcacttatcctagcccccagccgtgaagttggaaaacccaatttccgattacacggcttggttaatacgcacggtgagaactcttacacgaccagatcttacatggtcttttgtctctacaggatccgacaaggccttatccgctctgggcgtccctagccgaagttcccttaggttcctcggaggccttgtcaagacggtgtaaaaggacattaggataggtttcaatgctaggtgtttttgtggtaagggatctctgggtaaaacgcttggcgatattgtgtacctgaggtcaacttttgttgaagtagaggtaatgggagaatcgctacacctctagtcaagaaccaggtagtagtcgtaactcaacgactagaagtaaatgtacgagagatcactacgattgaatggttaagaaccagtgagtaggtgtctctcgatcatttgaagtcgtggtgcgaggaccgctgcgttattgctgtagtcgtacctcgaccatctgaggttgcggtgcgagggattgctacgtactggtttgaggaccagcgaacgtgtagaatcatctctcgaacaccaatggaggttgcggtgcgagagattgctacgtactggtttggggaccagcgaacaagtagaattatttctcgaacaccaatggaagttgcggtgcgagagattgctacgtactggttcgaggaccagtgaacgtgtagaattatctttcgaacaccaatggaggtgctagagttggtttattacatgtgcgtctcatgtggccagcatgactcacgcacccaacttatagcatatccggatgtccattcgcaatcatgtcgggtgatcaagccgacggtgttcgcgaggaattatccgttaacaatcttttctcgagtagtccagccatggccgatgctatgaggtaggtcgtcggtcttcgttggtaggttgggcgcgacgactctgcatttgtcgagatcgttctcgataatgcggtgtactcgacgacaacctactcgggtgctcaattgttcctgaagaatattttctagaaggcaagacatatagcagagaatatcgagtatgtactcaacaaactgcatggatcttctagcattatcaggatataacgagcagatataaatatcaggcattatgtagaccataaacaagcatgatttatacagaagaaaatagagcgagcccccagcgttagaccgtagtcaatttaacatcggggacacccgcgcaacaaatattgtataaaaaacatgctctaggtaaacataataaattattgatctgacaacatctgaaaataggtacggtaaattgtgtataaaatattgcgtacctttatagatacatgccggatgtatctacgggattagtagattaatttaaaaaatcaatctactatataccttgatttgcatgcccgacatactatcaatagaagatataagtatgcatgcagtagacctggacgtcaatatcttgctgtcttggaagagcaatgccacctgtcgcatgcatacatgtgtctaggcatgtgtacgtggcatggttaggcaagcacgcttggttgaccaattccggctagcacacggcaagttggcgacgcagtggcgcctattctcggagaatttcgcgcggcatgcatcgaggtatattggttggtgggaatcggcgtcgtgtccggcctgtgcgcagccagccaataactcacaccaattgatgtcgtgcacgaggaggaattgatattggatcggttttggaagctgccgatactgaagattctccacggtggcgatgacttgatgaagcttggtcgatctcgccggatcgaatattcgacgacgatggttccgatcttgttggacgacatactccggtcgggttagatctccccataaccgaagttgtcaagtagcttgttgttggagaatccatctcttaaacccatctcgtcgaaaccctgaagcaccaaatccccctacctagcgcgccattgttgacgtttgatgtcgcgattctggtatttgcatagtatggggatcgttggtactaggatatatgcgagactgaggtaaaagagacggagacaggatttttatacaggttcggacccctgaattgtcaggtaataaccctacatcctgttggccaaagccagtcgttgctcttattcatcataatcataccagtacaatatttggggtagcctatctaactgttgtcgacatggcggtctgaaggtctgactcgtagtcgacaatagggtagccttcctcctcgagttcgtgcccggcgagatcagagacaacgctatgtctctcctgacagtatccggagacaccgtaagggactagccgtgcttatccctgatgtcgatatctggcggcttgtcttggcgtatgttgacttgtatgttgtggcctctgttgttccgtgtatgttgattgtctcttctatggtgggtgtgtgttgattgtctgtctcccctctcctcctagggggccttgtatttatacccataagtgtccccttgtccaagtagaactagggaaaccaatatggatacaatccgagtagtccttgtcgtttccatatagaaatctggttgtatttccttatccggaactcctcctacatccgtaggttgtttccgtataggacatggtatgtggtaggtcctgccgagatttagtcaactactattagatatgtggtatccataaccctgaaacgtagtagtattgtcgtagtagtattgctgttgctactactacagtagtagcggcgcgcaacagtggtagtagcagtagtaggagtaggagtagtggtagagcagtagttgcaggaggagtggactggtcacgcgcccacgctcccgtgcaaatcactcattaggggcaccccaactcgagttgtgctactactacgaagccacgaaggggagtggagggcctaggactacacccgtcatctaatgtatagtgcgccgtgctgcgtaaatttgcatgaaaacccgtcggctctagaatatcagattactctacctaccaaagaattatttcctccctcctataatataagacgcgcccgtatttcaagattcaacgtgtaaaacatttgacccatacatagtataatatggaatgaattttatttattaaaaattatatcattggattgatatttaaatttacttgtatatggctataattttgttgctacaaaccttataatatataagatattatgaactaaagattagttttgtagaccattttaactttaaccgcgccttatagagggaacagcattagtagtgcgaaaattcgcgtagattttgacacctggtttggtttgtgacctaaattggccttaccaatttttgtcgatgccaaattttggctaggcaaagttgtgtttggattgaagccaaaatagcccaagttaattattgaaatggcctattttcttaggcatgtcaaaatttggtttcaaaccaaatagacactacacactgttaaaacgaatttgctatatatttgtcgacaaattttcctccaaaaatttgtcagatgtaattacagtacaatcgtagtgtaattacactgtaacttgcatgcaattacactgtaactataatgaaatttgtatgtaactttcaagaatctctcggtaacatgttatttcagtaaaatagaggttgtgggaacttctttcacatatgtgtgtgctgtgatttttttctttctcaccagaacaaatcttgcaatagatctaacgattcaaaattacgtgaaacttacatacaagttacactgtagttacatgcaagttacagtgtaattacatacaagtttcagtgtaattacactacgattgtactataattacatctgtcaaatttttagtagaaaatttatcaacaaatgtataggtggtcccctattaaaattgccaaatactggtaaggccaatttaggcctcaaaccaaaaccggcccatagtgtctcagaagcatatggaacggagccacgtaggagctggctactgggcccgtgggctgtggctggcccggcccgctccgttccagtgagccggggcccggagggaagaagagagcaaccagagcagcgcgtgtcgagcggcggcgactcggttagcggatggccgccttgccgcaggctgctgccggcgtcccggcgagccgtcgtgtcggcgaccggaggtgggacacgcgctgcggcgccggggaggccccgcatgggtgcgcggaggcgtggggggcagcgcctggtgccgcacctggagcaggcggcagccgacggggtggcgtgggggcggcgcggcggaggcgcactgcccaccacagaaagacggcagccgagccggcagagccactcctgcaccatcaatcgaacatgcagggtacgtggattttttttcctccaatttttttcccatattcatttgtactgtcaaattgcttggtgaggagttcatttcagctttcagattcgctctgcgacagtgtaacatgtttagggttcctttggagtaattcctatataagtcatttggtttataggattgctttaaaggaaatttactacataggataggaaagtttcctccacttcttggaggaattttagcatcaggtctaacctctagtttcaaattcctttgagattttcaattcattttatctccaacaaatcaatatataatcttaaatctcctatggttttcctatgatacatccaaacacatgttttaaacgattcctgtagtattacttcctgtatgattcaccatcgtgtgacatctcaatccttgtgttttttatattcctgtattctcctgtgacttttgttgagaatgccttggaaggctgaaacgataggtggtactacgtgttgtttaaactgtgctgataggtagaccacaaattagaacttaagaattgatgtttgccagcagcctagcaccctagtcggaacttggaagggaccagaataatgaaatgatttgttggtcattaatagacagtttcttttgattgacagcggaaattactcgatattgttcttcaaattattagtggtatgaaccttttgagtgattgacaggaaacaaatccaccactatctgttaaagatgagagccaaaagtctgcagttggcctgacgatattgttctgttcatagtcagtcgcgtcttcttgtattggttttgttttaccctgattgcgtgaagtgaaactattattcaggttcgctcaagtcaataagattttcacatttctctttttaaaaagggataagattcagacaatcatttctgcaagtgcatattgttctgctgctccttttgcagattataattgtcgacgctatttgtgatcccgtgcatgcactttggcactcgtccatgcctcattttttccccttccgcagccactgcagatggttggtgatcataggttattcaacactcaagtcctgaacttcccttttccttaattgacaataccagggttggtgccgatattggcttttacctaatttaagtatctccgccatgtgtggcagggatttctcttggttaggattaacctaattaaccatccggcatgatccatgcatggcacagcttgtgggtctcctatttttggggttgatcttcctccttcctccccttggtattagaggacatcatctccctgtcccctctttgccctgccatttccttctccttcctcctgcagcagctgtcgtaagtcgtggcacgacagctgctgcgatatctatcgcaccaggaaggatccttccgaggaggaaaggcaaacggcgggacgcttgagccaacacacaccattgacaaaaacattaattagatcgtgatagaggaatataacaatcacagaagccatggcaagcagcggcaaggagcaccggcgaggtgttccacgcccaccgccgttgtcgctctacatcgagagggagcaaggtgaggtcatcatggctggtcaggcgctggcgacgacgaggatgctccagcaggtcgccaccagcagcagtggcaagaagaggatactgtccaagcagctgtccatgaaggagacaacccgggaggtcaagtgggagaagcggcgcaggcagatacaccggcagaggagcagcatggcccttcaggatgttgaggaagaagcgagtgccaacatgttcgccgccaccactgacagcgaaatgggctccagcaccgagcgggtgcccaagaggctgaccgatggagacctcgatgagctgaggggatccatggagcttggctttggattcgacgaggagaatggtgggcagaacctctgtgacacgctccctgccctcgacctctacttcgccgtcaaccggcagctctcggagcccaagatgcgtttgtccactagctccttgccatcaccgacatcagcgacgtcgtcctcctctaccctcggtggcacatcgaacccgggtagccccgtcgcaccttcttctttcatggactcgtggaagatttgcagtccaggtaaagaaaaaaaagaacaatatttatcccctttctcttggaatattgattctatttgtgttaatttatgtcactgtttttgtctgctaagatgatgtgaaattgtgatgcatgcaacttaacaggtgacaaccctcagcttgtgaagacaaggcttaggcactgggctcaagtagtggcctgttcagtgaaacactccagctgatcagtgctgtaacaaccatattctcctcccaaaagccattaacaatacaatgtttatatatatatatatatatatatatatatatatatatatatatatatatatatatgcatatccctgcatgcattggttagatggcgaaggatgagaaaattaaacttcgatggtataaactgaacgtaaccttttttccctctgatgatgacgcccatggttgtgtttgtatatatacagattttagtatacaaatatgtatgtgttggcaaacattaatgttctacatattgcatatatgtgtcctggttttgcaagaatatttttcatgccaattaatctctggccgatctctaattgatacaaatacagccttcactaacataacatgttggttgatttcagtaaaaccatatggaacagaactacagttacagaaacagaaaccagagactatcttagttgtaccagagtcacaaatgattctatgaggacttcatagaggtagagtgtgcgtgtgtattcataggaatgagtgtgagcgcattgtgagcgcctgtgtttgtattttacttataaaaaaaattgctccaaaatgcatatacattttatgttaatatacttggtgagctttgccacaagagcacttaagcatcactttttttcctgggttccttggtgaatttcagacctagttaaaaaaaaatctctctctctgatcccacataaaaacatgtgttaagattcgacctatatagggtgagtcctcgtgttggaagcaagggcctcaaagtaacggttaagaattgatccataggtggtg

SEQ ID NO: 29680 - DNA, 1569 bp, Oryza sativa
atgatgacgcccatggttgtgttgtatatatacagattttagtatacaaatatgtatgtgttggcaaacattaatgttctacatattgcatatatgtgtcctggttttgcaagaatatttttcatgccaattaatctctggccgatctctaattgatacaaatacagccttcactaacataacatgttggttgatttcagtaaaaccatatggaacagaactacagttacagaaacagaaaccagagactatcttagttgtaccagagtcacaaatgattctatgaggacttcatagaggtagagtgtgcgtgtgtattcataggaatgagtgtgagcgcattgtgagcgcctgtgtttgtattttacttataaaaaaaattgctccaaaatgcatatacattttatgttaatatacttggtgagctttgccacaagagcacttaagcatcactttttttcctgggttccttggtgaatttcagacctagttaaaaaaaaatctctctctctgatcccacataaaaacatgtgttaagattcgacctatatagggtgagtcctcgtgttggaagcaagggcctcaaagtaacggttaagaattgatccataggtggtgagtccgggtgttgaggcttattcttaatgaaaaaccatggggacgtccattctcgcgtcggtcaagtgtttttttttaatcacagtagttatagtcgtctgaaaggaaagagttaaaatatacttcctccgtctcaaaataagtgcaacttggtaccgtgcatgtttaacgtttgactgttcgtcttatttgaaatttttttatgattagtatttttattgttattaaatgataaaacatgaatagtactttatgtgtgattaattctttttaattttttcataaaattttaaataaaacggatagtcaaacatcggacatgggtacccatggctacacttattttgggacagaggtagtagaatatttagtgggccaacattgggctgttaatttcttcatggagagagtgcgcacaatatcttcccatgggctgccttacatatgtactgagccataggggcctctggccctctggttcccgataatttcatgtaattccaagttttggtcaatacagtgtttgcttttcaatcttcttagcgcatgttttttttaaagaaactcttagcccatgctggtctgggccttttgtgtgagcttattataagatagaaggcccaagcccaacagttatgcgtgccaaaatgcaagtccgtgacatgcaaatgtcagatgctgtcgactacctctacaaatgtatgtcattttagagttatgtacatgaataaagtggttaaaatgatatgtaggtattgcatattggaaataatacatatcatttatacatgaggtgacgagggtggtaacaccatctagtccactgatgctcattcccccatgagaaactgataagctgtgatggcataagtgtttatgttgtaatgcattgtctatctattttgtgcacaaattttgacagtttgaccctttgcaaaaactatttttaca

SEQ ID NO: 29681 - DNA, 1095 bp, Oryza sativa
  unsure (1)..(1095): unsure at all n locations
aatttccattttggtgttaagaggcatcatgtggtaactagatcctgttatttccttttttattttttttaaaacgttatgtatcttttatctggtagcaattggccctaattctctcattctctcattcgcagaagcctttgtttgaaaggctatacactgcaaccatttgtaatagaatgcggatccatgtttttcatctatagaaaatccaagctagccattctccattgccttcataatatctactgtccagaagataaagttttagatcagtagtcagagactcttagcagagacctgaaaaatatttttgaatttttttaagttatgttaacttctttgtgttcctaggatctacttctgagtattgatatgaatctccttttagtgtcaaagtgcttaaatattgatttgtttcttaatatttctttttttttatcttcattcatctgaatggcaacaggaagtatggctttaatggatgctggaatacctgtaagggaacatgtggctggtgtttctgttggtcttgtcagtgaagtggaccagacaactggagatatttctagttatcgcatattaacggatattttagtaagtatagttgcataccatttctaccatcaatccttataaataactattcctttttcatccaactgtatattttggttggtgctgaactgaacatggccattgatgtttcccagggtcttgagnnnnnnnnnnnnnnnnnnnnnnnnnnnnnnnnnnnaacaaggagaggtattactgctattcaactggatataaaacctgctggaataccgttggacataatatgtgaaagtttggaacctgcacgaaaggctcgaaatcaaatccttgaccgtatggaccaggaaataagttctgcacgtgcttttaatgatgggagctctcctcgattaggtttgttagtgcacttatagtttagttcttttaaggagttcttttttggtgcaaacattgcttgatcaacaccagaattgcccttcatttgcagctacactgagcttcagcagtgattctcttaagaaactgctttttcacaggaaaaaaattgagcaagaa

SEQ ID NO: 29682 - DNA, 585 bp, Oryza sativa
cccgatagcttaggagatgactttgcaacctttgggcgtttcttcttaggatcatttgtaacatcttgcgcatcacattcagcagcacttcgaattataactgcaggagtagaacacccaggtgtctcctcaatcatgttgtcttcgtctttgctgatggatggttcagcattagcatccttgctaggcatgttctctacagccgtccagccaacaacttcttgacttggcaaaggatcagtatgattacttgctaaatccttcttttcatgggcatggggcagggtagctttaagagaaagtttaatgttacccctcaagtcctgtccaatgcatgtcaatgagagcacttggccaacagatacaacatccgagaccttagacacctgcaggtagaagggaaaataaaatgagcactaaatacatatatattaaatacaactgattaaaagctggttaatcaacattttaaccagtatgaatgcaatgaactaatggatcacttatactgtgaaacgtgattgaacctcttcttgttgctcaagtgtgtttgggtagaacaatagtcttatatccatgggtgac

SEQ ID NO: 29683 - DNA, 1874 bp, Oryza sativa
tgtaaatgttgcacgtggtgttcttggtgtgtttcactcagtatcttacgatgttagtagttacaactatttttcttgtatggtataaaaatgtttcaattaggaatataatcatatatttgataaaaataatcatttgagattttgttttgaaaatttacttgtaaggagtataacaatgtaggagtaattagatagtatatataataaatagtttagtagaaaaatcaatttaaaatttatttatgttgcatgtcctccttcttgcatgcatggagtagaccatttattcataagagaaacaaagagatagacacgtagacaggaaagatgcatactttttgtatcgagtagtagtactagtctactgcatttagggcagtaacagtgtgccacacattttcgccgaacctcgcttgccaccaaggccaggaacggtattagctacatgctctacagtggaggtcactcatggtgggtccccccactctctctattgctctctctatccccctttacttttcactctgcttttcatcacatcgccttttctatcgcgtaggaaatgaggcgtcggcacggagcgttcccggcgatggactcggatccaagcggagctacggtggtgtttagggtggaaaataacatctgagatctcgtttgtttagagatacatatatgtgtgggcgtgccagtgtacctgaatacacaatgtaaacaaaacataggaaacatgctctttattaatcttaaaagatcataaatacaaattcccaatgtaatatatatgtatgcgcgctccataatctgtcattggacagatctgacttgtgcgatgtggtctcctggttcctggggcctcgagaagctcccagttaattacctccgcaggtctaggcctgcaagagaacctccgattaagctgcttgtggtcgtctcgtcgtcttcacttcgcattctccatgcatggttgtgatgatgatgtaaatgtgtgtgtgtgtgtgtgagcgccggcagcgatccatggcctcgtcggtccgtgcgccagtgttggtcgcccaccctccgtcgtctagccttgtcggtcttgaacaacgtgtcgatgtagattgttggtgaagacatgcatggagttgcgtagcttgaacgacttgacgtcacagcagttgcgtcgagattagattagagaagaatcagggaggaattattgaagatggttgatgtagacggtggccggatttaatcaaagctcggcatctcatttgggacaaataagaaaaaccaacaggacttcttcagcccacgcattggtttgtgcatggcactgtagcagcgatgacatgtcgtcctccgattggttggccacgttgccacaataattaacttaatcaacatgcattagctagcttgttgccatccaacagcactggctcgccgtcctcccgtcgtccttcctctgtactgcagccatacttgcctccatcgtcatccgctggtttcgacgccatgcatgatgcttgacctccggcatgagaactgatagaagtcttggcagtcggcggcagctccgccgatcctcggcgcgctccggcagggcggcttcccgacgacctcctccatggttagcccgctccagtgcggtgaagcttgcaaatcaaggatgtctggtatctcggcgaggtcgcagcttcgggtagatgcatcaccagcggcttgaattagcagcgtcgagtccagggacaagtagcactgcgtcggcttgaacagacaccggcatcgatgaagcttctgtgacgccgtaagatgaatcggccaccgcgacttccccggcgacgacgatacgtgtagaaggatccctatgcatggatgtgtgc

SEQ ID NO: 29684 - DNA, 2628 bp, Oryza sativa
atgttactacggctacacttaatctaagcctcacatcaataccatagtgcctgtgaacctcgaatattaacgattcattcgtacaaaaatcctacaaaatttctgttaagcagtggtcattatggacagatccttttttttttgtccacacgaaaattctatgaagttcagacgtttaattgtccttgatcatcaaagttatatcgaccgtccattctccgatgtactcatcctggccgtccaccgctacgagccttctccccctcgtacgcatacgcgaaacgcccccccaccgccgccgccgccgccgtattcctcctccgctcctcccttctcaagcaaaccaccggacctccctcgtctccgcatccggtccacccctcgctgctcgggtgtgcccctcgcgttgccctgtacgccggcgaggcgctatctccacctcatcgtgctgattttcccttctgtgggtgtgcaggaatcatcagaaaggaggaggaggatatgccgctgggactgatactgagctcgctcggaaggtcgatgcggcgtaagcggctgtcctcgctcggcatcctctcctccaagagggcgcctcgggattactacaaggggaagaactgcaagcccaccgggttccacacccgcaaaggtaatgccttgcgggacgctctgtgatctgattctagtcgtctgtattgctcaagcatgctctctttgtgtataatcgcatataagattgcgaccaggttttgcttagctgagaaattttgtgatttcgaaccggatagtttaattaaaccgaacgttgatggagaatgaaatggtgacagttgctagtcaccacactatttgcccaaccggaaatctggaagaacctaggaagggatgttctttatgtgaatcgttttgttccaggatttatctgagtcaaccgtgcaagtaattgtctgcttactgtaatttgggaggtgctttcaataatgtcaaatatcgcttcaataaaaggtgtgagtaaccaaagtttaataaggcattaaagatctagtgagtagcaaataacatttcaattcaacaggtccatttcaactggtggttcagccaagcagaaatttctcatggacacattgaaaaatgctctatctatcatagttacataatggtattttaatttgtatggtatataatcatcctacagaacatagtaaatcttggtgctatcatggctgcagctgtactgtggtaacgctcaagccatggcaaggtgcaaagcactattgcattggcttgcagccgcagcccacacaaccgcagcaaagagatccgaacagcctgtttgttagtctgccagaaagaaaaatattgaagagcagagtctggtggtattcagttcaccttgaaaatatgtaggcagtattcaacaaagaggcccaaacataaaatattgaagagcagagtctggtggtattcagttcaccttgaaaatatgtaggcagtattcaacaaagaagcccaaacatatctgtatgcaagtacagttttaccagtgctagatgattatgggtaacaaattacaggataacgcaaagacttatccatcagtggatatttgctcttagctataacttagccttgacctttctatgcaattcttgtttggagcacggacatgtttaaattttagttatcattgattagtttgattgttttgtgcaagggacggatacttctccattgtattcctgatttacttgatacttgattcaaatgacatttgtactaactattatatgatcattcaactgattgtcgttatctatgtccatcccttttctttcatgagtaaagcaacctacttgcttagtctaattttcgaaatattgattaattctgcaggtggatatgttatggtggatgagaagttgccaagatttgtggtccctgacttgactgatttcaaggtaattagcatactgccacggtttagtgtccactgcttctctggttaattccagtctgaacttgctgggcaaacttttaaaagtaacttaatggcacctaacaaacagaaaatagctaatataacataatcaaagctctcagttctgtttgaggtccttcttaagaaatatgatggaaataacttgccatgtccaaattttatctgaaaagatgatgacttcattccttgggcaatgagttgaatgctccataatccattactgttgaaacgtttaactcaggcaagacagataaattgatcatgaatggtataacatggaattcttctttatgtggtatgagtgaccaaggaatcatcttgttcctgttttttttcccttttcaattatggttgtgtgtatagtaataaatttcctgtataaatgactgcagttgaagccgtacgtgtcacaatgtgccagggacatcacagcgtcatcggcatcctccacttcagcagagactagtgaaaacaagaagtgatcttatggatgctctaggcattgtttgtgttttgcaagaacgcagagcatctttgcagttatgcttttcttatggtgaaaacaagaactgatcttagtgcatgtagcttcatcgtctgctgcatgttgactattatttagctacatc

SEQ ID NO: 29685 - DNA, 1845 bp, Oryza sativa
ttcttgctctattgtaagtatatcctcatgaattgattcacattctcaggcagttaaatgcatcaacccacaacttagattagctaagagagctggcaaaaagaagaaagagtacaagatctcattgatttcagataaatcctatgagaaaattagaacattatcagaagcacccattgaagaagtcttcactgattcaacatacggcaaggtgattatatgttatctgtactcttccttaaaaaatatgtggaggggaaataaaatgctcgattgtgaccattttgtatgaattcaagccaccactatttgttttctatgccctgtcttttgtttgagaagcaaaatgtaacatgtttcaaactttactttttctttacaacatgaactcactgagtatttttctttctgcagtttgagcgaggagaagccttggaaaatattacacaatctgtgaaagcaaagcttgaagaagaatgcgatgaggacagcttgaagtttcttcacaaggcagttgatacagtgagaaaacaggtagtgcacactaattgctttggttaaagccttgcaaatggagggaaaaacctatttttggcaactgatggacatcaaatgcatgcatgtcggtcaacttattattgtacatatacagctaacatatatcctgattttgcaatgcgcgatggctgatgtcattattcgaccttttgcccttctgcatgaatgattttatcacatctagttttcctgcttgaatgattttatcacatccaatttaaatgcatcgaaacttacaagtttggaatgacctggtcatgctaacagaaatagcagagcacttttatttctttatgatttaacagaaattataaactttggcaagtctgtaacttatgtatccaacacattagtgtataacaaatctcattgtttagcactttaaacttagcatgccggttttgcattgagacaagcaaacttctagtcctgatgcatccttttgagccttcgtttgcttcatatgcctagatttacacaacctacataatttattggtgttgtagatcccagatgtactagctatccttgacaaaaatctgatattactttattcagtgttatgttcttatgtagagtcacttctgttatttcagttgacatggatttgtgcccatcttttgcgcaggttatacgcaaaagaataatcgagaaaggacttagagttgatggcaggcaacttgatgaagttaggccactctactgtgaatccagcacatatccaatattgcatggatatgccctgttttcacgtggggatacacaggttctctcgcacacactttaaattgaaggaacattgcaacatttgttttccagtaaagtgcccacccacatggactactttatttgtaggttttatgtacagttacccttggtgctcctggtgatgctcagcgattggattcaattgttggtcctccaacaaagcgtttcatgcttcactacagctttccaccattttcaataaatgaagttgcgaaacgtgggggcttgaatcgacgtgaagttggacatggtacattgtctagtttatgtttgtgtgcagattataggaactagtgagttaattaccctgaagtattagacaaacaactaaggtcatgtttggattgtggcctattggtacgatgagatagtctcacatgggtacgtgtactcagtaagagagtgtgttgaaaaatggagaaaggaccagtgaacaatagatagttgagtccttggcaatgggtacgtgtactcagtaagagagtgtgttaaaaatgggggtaccgagctgaattcgcc

SEQ ID NO: 29686 - DNA, 708 bp, Oryza sativa
gaacaagataaaagcaatctgaattgtaaataggagttaaatacgaatgataagttggggttccgaagaacaagcagacggacggtctagccgacacgcgcgctgcaagcaagtagcaatggctaaactttaatctatcaaaacccaataaactgtaaaggggtacctgactatttaaggaggtgggaggacgacctaaggggaccctagggtcgtgctccacctggttggggcgcaccccacatgggccccacttgggccggggtcccagacgaagttacaagcccataggcccattataggtgacgcagcaccttcttttttgatttcgcccgactgggatggaatttggcgatgaagctggatccattggaaagatgactccgagagctttccatcaagtactcatggacccaaaatggagctcgcatgcatatttggcggccgtttgaagtcgacactgtagcaggtggccgaactggattgcagaacttggacagcttgatcttgatgtgaacgacggttgtatctatagtagccatggtcacatcatcctccccttcttcacggaaaaccgtcctcggtttttccatatggtgctcttcgtgtagtccatttaaaactacctgtttcttccaatcacaacaagacaaactcgagataattttgttagcaataacatttctctctagattgcatgttttatcc

SEQ ID NO: 29687 - DNA, 562 bp, Oryza sativa
ttatgccggttccgtttttccaaacagatctcgaaaccgacaccaaacaaaaaattcaccaaggtgtatgggatggcacggtgtagattgaaccaaaaggaaaggagagggagtcggactcaaggggggaatgccgcatggaaggtggtgggactcggtgagaaatctaaaagaaggaaaccgattccttttctgcgtggcccccaaatagaaacgaaagcaatctaatctagtctaatattctccttctatcttcctcatgcgcatcttctgcttccttcttcttcacgcgcacatgcacggcaaaaacaaacacacacaaggatcggcaaactctagatgcaactcaagaactcaaaactaaccgacagaaacttctgaaaactacaaaaatagaaccgtggcagcgagccgattccgttttcgtaggtcccgacaacaacagagacacggtggcagcgacgactgtggtacaaaacgtgaccagaactcgaaactctaaacgaactagacgctaagaccagcaacacgacgtgacgatgcaacacaaaattcaacaaag

SEQ ID NO: 29688 - DNA, 879 bp, Oryza sativa
cttaagcttatggagaagggcgagcaattcattcatatttcaggttttcaacaagttgcttgtactagttagttgtgctaggtatcctgtgtaaattctttcaagcctaaccttgcagcatacgcatttgaaagaaatgatttttgtataatgaaaatcgaccaaattatgaatgaaaaattatattttgttacagaaaaatgatattctgaactaaaatagtatggttatttgactctgctattacacagtataactgtttgtttgatctgataaatgcaagcacttgcagataataaatgatgaagacgggggcctgcagaaacggtatccttctccatcattgcgtgagaagggtgtccaactttctcatgcttcatctcatgcaagtggtacacatttagccggatacagcacttcagctattgttgcgatggacaagagtgcagctatttcttctgaatcatctctttcgtcaagaagtcttctgtcgcagtcaaagaaaataggtagaactgctgaaagaagcatagagagcgttctcagttcaagtaaacaaaaggtttctgccattgaaagtttattgaagggtgtaagcggccggcaaaatttctcagctatgcgctcaacaagcttggatcttggtattctttaagctgcttaattggagtttgctctttcattatgtagtttaaaattcttagctattgctttccgacttatattataaatacttaagaaatctcaatttcttttttcttttcctcctagtgcaggagttgatcctccatcctctcgtgatcctcctatcccacttgctgcaactgcttcggaccatctgtctttgcagaattccatattgctggattcatccctgcc

SEQ ID NO: 29689 - DNA, 754 bp, Oryza sativa
agatatgtagctgtttttcaaactttctgctgagaaaatgatcagggctgccattgctctcttgtgttttgctgagtaattgtatcggtcaaaatgtgccaaatcctggaccatgtttttcattacgctatatcccacctgaaaacgtgacaattcatttggttctttgcctacaaggtcaccatagttgctgttgtgttgtagaagtattgagcctttaatatacttctttggccttggtggcgcattttccttcaccacatgttccttgcttgaacttgctaattcatacttggctctttgcttgttttcttatccatcttctcacgcttctggtcctttataataccctcctcccttgtttacctttctcatttatagaacccttcacatctgcatctcctccttatcgtcaaattcatagatttgggcatcagcagtcctaaaacctctcatccacatgttttttccttccactatggccagtacaggtgaagcaccatcagtaaaggctacagcaaagacttcaatcccttctggggtaatacagaattcctttctcttggaaccagtacccttcacaatccttctgaacctgcgcttaagttctttgcgggctttatcaattttttgggtagatgatctcaggatagcactgaagtcattagcatgagttaacttcaggtctaaagtaaatagcagttcggatggcatgtcatacactccaaatgactgttcatcacccattctgaat

SEQ ID NO: 29690 - DNA, 10103 bp, Oryza sativa
tcgactttgagatatggcaaatgaatgtcaaaatagctttcctcaatggaaatctcgatgaggatatgtacatgacacaacccaaaggttttgttgatccacaatcaactaaaaagatatgctaattgcagaaatccattcatgggttgaagcaagcatctcggagttggaatattcgttttgatgaagtagtcaaggtgttaggctttttcaaaaacgaacaagagccttgtgtatacaagaagattagtggaagcgcactggtgtttctaatcctatatgtagatgacatattattgattgggaatgatattcctattcttgaatccgttaagacattgttgaaaaatagtttttcaatgaaagacttaggggaagcagcatatattctgggcataaggatctatagagatagatcaaagaggctaattggattaagccagagtacatacattgacaaggtgttgaagaggttcaacatgcaagattctaagaaaggtttcttaccgatgtcacatgacattaatcttggcaagaatcagtgtcctcaaacgactgatgagcgaaacaagatgagtgtgattccatatgcctcggcaatcggatccatcatgtatgctatgctatgtacatgtccagatgtttcatatgcacttagtgcaacaaaccgatacccatcagatccaggtgagagtcactggatagctgtaaagaatatcttgaagtacttgagaagaactgaggatatgttcctagtctatggaggacaggaagagctcgttgtaaatggttacactgatgcaagcttccaaaccgacaaagatgattttagatcgcggtctggatttgtgttctgcctcaatggaggcgttgtgagttggaagagttccaagcaagatacagtggctgattctacaacagaagccgaatatattgccgcctctgaagcagcaaaggatgctgtttggataaagaaatttgtttcttaactaggtgtgatgactagtgcttctagccctatggacctctattcgataatagtggtgccattgcacaagccaaggaccctagatcgcatcaaaagtccaaacacattttacggcggtatcacctcattcgcaagatagtgggtagaggagatgtgaagatatgcaaaatacatacggatttgaatgttgcagatccgttgacaaagccactccctcaccctaagcatgaggcacacactagggcaatgggtataagatacattcatgattgactctagtgcaagtgggagactgttagtgatatgccctagaggcaatcatagagatgattgtatcacatactatgtttacatatttatccgacattgttccttgaaatagataactccttattggttaatgaatatgtgattctttcatgagactctttatgttgtttgttactatttctaaaggatccctgatcaaatatcatatgtggaataaatatgtttatattatcagcacatgtattaattgatgatcatgtctcatggatcatggtatagagataccaaattaataatgtggacacatgttggtgaacatgttgttggatagacccaacatgagacactgcaagagccatatgtgttgtgtcatcagtgatctcatttagtgttggtgttgaatccttagacctgagattatcatggttctcaacatttgtagtagcttacttagggactgctaaacgctactgcgtaattgcgtagttataaaagtagttttcgggtatgctatgaaacatgtagtgggatatgaataattaagatgggatttgcccctcctatggagagatatctctgggcccctcgatgttgtagattatggaagtgcatggccatgcgaaaggtgaatgaggagtcaatcacaagttatataatctattaacaggttcgagtgaatgattgagctattagaggatgtcacatatctagccttgagcttaatcgatatcgtgaggcaaatggattcatacaagtatacactagaggttcagccgatatgatcattatgtatgtccggtgggtcaatacgttctgctaggggccgctgttgatgtgtggaccgaaaaggagtttttggtttacagccgagtatacatgaacctacagggtcgcacgcttaatgggccggaataaggcgattggatggagatccaatataagcttaattcggatagggatccgaataggagtcctacaggccttggaggcccgagtgatggatcctatatattcgtaaggggtgcgaacgacggagatattgcatcacgtgagaaacctaagccgtcacttccctccccacacaaaaccctagccgcgcgcgggtgctagcacatctccgtgcggcgttctgtgtccctgtacgtgtggataccggtagaggcgccactggtttgcggtgctgatcggtgtgggagtacggtgaggagaacgcacgaggaggagaaggtcgagccggtgcgatcgactacttcctctacatcgacgcgcgctacttcgcgagagttccttcgactttgcagcgtcttcttccgctgcgcagcgcgtcgagtggtaacgatctatgatctaatacttgcatggttcctggtttacgcgatagaaaattttgatttatgctattgtagcctacgcgtatcccaacacaaatatccagagatatgttcgcctttgcctcctataggttttttatcagagctgtagattataaaaatgctcaaccatgatgaccgtgtctccttgcgagtgcacctattcaaaccctcgaagaagaatagaggaggagaactcatctagtctcttatatgaatgaaattgtgagctacgtaaatcactaatcaactgcgtaaatggaatcttagcagatgcgcttcaccatgccattgaccggctgacctcatcaccgcttcaatcctcgaccatgtcggcagttctccctccgatatttttctagtgaaccaattcaaaccctcgtaagaacgaagcgatgtgggagaagagaaagaaagcacaacctgatttttttcccgtgtagatatgatcgatgcctaggtagatttacattctctagcgttgtggagtttatggataccccatacctacacggcatgtatagtctgactgggtatggggtgtcatgtatagatagaatatatttaaaaggactcgggttaaattccaaacttgtatgtcaaggaaatatctgagatcctagttggttacgattgtattttatctgtaactacatattccgttagggatatggactgtattttgtaatacggactccttctcctatataaggaggggtccgggtgcctctaggggcacgattttcacccagatcatacgatcaataatacactcggcggatcaatccccggacaggagtagcgtattacttcttgattaagaaggcctgaacctgtataaaattccttgtctctaaacccatccacttttccagcttgatagccacccccttttagtattgctgaaatcttgtttcgacagttggcgcgccagctaggggtagcgtcaagttcttcgccgactagtgcgatgggtttcatttctggcatcgacgacttcgtcttccctcccgggcaggcgttccgtttcggcagcctcgacttcattaccaacgacttcggtaagatttctctcctcgactcggattcgaaccagtcgggaagaggccagatctccgctccgttcggcatcccgaactcggccatggtctaccccaagatcaactctaccgagttggcttcaaaccacttggacgagatccaatctacttcaacacgacccgatcaagacgattgggcctatccgccaatcctgatgaaactccccgatgatttggctactgtcttcaccacaagggtgtcttctccccataggcctaggcgggatccggcttcagccccggtccggcctagctccagggaagtcggcgtcatactccagccgctcggcacggtttcgacggaacaactggacggctacctcagctcccccggcgtcgactcacgaccaacagagatcgtggagtacgacaacttcggctatcgctacgacaaccgcaacctcgacgacttcgacaagggctttgaagataactacacgcctctctacttcggcatcttcatggctgacaacgagacgggggaacagcgcaaagcccgagaagcagaagagctacgcgtacaacaggaagccgaacgacgccgactggaagaggagcgccaagcacaagagcgagaacggcggcagcgtgagcaacaggaacgcgaacgggctgcaaaggaggctgaggaccgacgacaacgggccttggacgccgggcgacgagcacgagaacttatcgtgcagcaagacgtcgagggaactgcggtctttcgcacccctcaatagaacgcggttgcagcgatcaccctcctcgacaccctcctcaaggaagacgcactcaaccaagctaatcacgtcgtcaacatcttgaccctgaccaagaccatgatcgttgcctcggtcccggttaactccgcaagcgtccgcacgccgactggcagccgagttccccatcttcgatctcaagactatcaccagccgagccttcagcatcgccggcgcaggatccaatcgcaggagcaggggtcacgacgggcgatctgtccactcgcctcccgaacgacacagggagcaccgagttgaacggccacgctccccacctcgcaggcgccccgtcgatcttcgcgatacaatcaaccagtgccacgcggcacgaggctacgtcccccaccattcaccggatcacgacgacgatgtggatggagtcgctgtctaacccagagtggattggccagccggtttcaagccgactggaatcgagaagtatgacggcaccactaacccagagtcctggctcaccgtctacggtctcgcaattcacgtagcaggaggagacaacaaagccatggcaaactacttgcctgtggctctaccgaattctgcccggtcctggcttcatgggttaccccgtggcacaatcggatcatgggcggagcttcgtgaccacttcatcgccaacttccagggcacatttgaacgccctgatacacattttgatctctacaacgtcattcagaagtctggagaatcccttcgggattacatccgatgcttttctgagcaacgcaacaagatctccgacattaccgacgacgttatcatcgccgccttcaccaagggaattcgtcacgaagatctagtcggcaagttcgggcgcaagcctcccaagacggtcaaacagatgtttgaaaaagccaacgagtatgccaaagccgaagatgccattatcgcgtccaagcagtcgggcaccacttagaagccaaagaaagatacgccgactacagaagggagtggaagtgccaatcacaaggatcgcaagcgtaagcccgaggaacttgtgacaactacaacaccatccttctgacaacgttcgcgtgtcaacacttttgacaagatcatgaactcccaatgtccgcatcatcccaattccaatcatgtggcaaaagattgtttcatctacaaacagtttgcagaacaatacgccaagaacgcacgtaaggcctccgacggagatcaaagcacgtcgaagaagaaggacgatgacgatgatgccccgactggttttcaagaccatcacaaggaactcaaccacatctttggcggacccctggcttatgaatctaagagtaagcaaaagctgaccgaatgagagatcaacgctgctcagcccgatacgccccaatttctttggtggtcggagacaacaatgaagtttgaccgctccgatcatcctgaccgagtggtctacccggggcggtaccccctggtactagacctagtggttcgcaacgtcaagcttcgcagatccctcatcgatggtggcagtgcactcaacatccttttcaccaaaaccctggacgacatgcagatccctcgcacggaattaaagccgagtaatgcgccctttcacggagtcattccagggctatccgctacaccactcggccagatcactcttccggttacttttggcactcgggagaacttccgcacagaaaatgtttgcttcaaagttgctgatttcaagacagcgtatcatgccatactcagacgcccggcgttagccaagtttatggctgtcccgcactatacctacatgatgatgaagatgcctggtcctcgaggagtcatatcccttcgaagtgacatcaaacaagccgtcacatgcgacaaggaaagctgtgagatggcctagacccgcgagatcacgatcgcccgagaagaaatccgactggctgcgtccacagcaagcgaaggagaagtgcctgcaaccaagatgccaaagagtggaaaaagcgacgccaagaccaagaaaattcctctagatccctctgatcctactaagactgctgtaataggcactgagttagattgtaaataggaaagcgcgctcgtcacctttcttcaaaataataaagatatctttgcatgaaaacaatctgatatgcctagtattcctagagaggtgattgagcactctttacatgttaaggaagacgctaaaccaatcaagcaacgactccgccgcttcgcacaggataggaaggatgcgatcaaggaggaattgaccaagctgttagcagcaggcttcatcaaggaagttctccatcccgactggctggctaacccagtcttagttcggaagaagacgggacaatggcgcatgtgtgttgattacaccgacctcaacaaatcttgccccaaagatccctttgggttacctcgcattgaccaggtagttgactcaacggccgactgcgagctactcagttttttggattgctactcaggatatcatcagatccgactgaaagaatccgactgcttaaagacttcattcatcacgcccttcggggcctactgctacatcaccatgccctttggattaaagaacgcaggagcaacttatcaatgcatgatccagagatgtttttcaactcagatgagccgcaatgttgaagcttatgtggatgatgtagtcgtcaagaccaaacagaaggatgatttgatcacgtatctagaagaaacctttgcgagcatccgcgcttttaggatgaaactaaaccctgaaaagtgcatcttcagagtaccatcaaggaagctgcttggatttatggtgtctcatagaggcatacaagccaacccggggaaaatcaatgccatcctcaacatgaagccgccaagttcccagaaagatgttcaaaagctgactggttgcatggcggcgctcaactggtttgtttcgcgactcggcgagcgggggatgccctttttcaagctgttgaagaaaacagacaatttccagtggggacccgaagcacaaaaagcctttgaagacttcaaacaacttctcactactccaccagtcctagcttcaccacatccgagagccgctgttgttatatgtgtcggcgacttcccaggttgtaagcacagtcctggttgttgagcgtgaagaagaaggccatgtccaaaaagtccaacgactaatttacttcgttagcgaggttttggctaattccaagacaagatatcctcaggttcaaaagctattatatggtgttttaattactatcaagaaactatctcactactttcaaggtcactcggtcacggtggtcacatcgtttccactcggggatatacgtcataatcgcgaagcaaatgggcggatcgcaaagtgggccttataattgatgtccttggatatatctttcaagccgcgaacttcgatcaagtcccaagctttagccgacttcatcgacgagtggactgagtgccaagaagacatgcctgagaagaagatggagtattggaccatgcattttaacgggtcgaagaggctctcaaacactggagcgggggttgttctaatttccccgactggagaaagactgagctacgtattttggatacatttttctgtgtctcacaacgtgactaaggattgtgatttctttgggaatccggcgtctgatagttcatggagactctcagctggttgttaatcaagtcatgaaagagtggtcctgccttgattataacatgaccgcctaccgacaggaggtacgcaagttggaagacaaattcgacggacttgaactcacccatgttcttcgacataataatgaggcagccaacagactggctaattttggttcaaaacgagaagcagctccttccgacgtatttgttgaacatctttacgaaccaaccgtaccgaggaaagaaacaattgaagccacggacactcaagacgtaagtatgattgaagccgactggagggagcccctcataagatttttgaccaaacaaaaactctctcaagacaaagatgaagccgagcggatctctaggtacagcagactctatgtcattcatgagaccgggttgtacaagaaaagtccatcgggaatcctgcaacgctgtgtgtctttggaagagggtaggcaattgctaaaagatatacattcaggcatctgtggtaatcacgctaccgcacgaaccatcgttggcaaggcttatcggcagggttttttctggcccacagctgtggccgacgccgataaaattgtgcggacatgtgagggttgtcaatttttcgcctgacaaactcatctaccagctcaagagttgcaggccatcccgttgtcttcgccatttgcggtttaggggcttgacatggtcggcccatttaaaaaggcagtcggtggttatactcacctctttgtggctgttgacaaattttctaagtggattgaagctaaaccggtcatcactatcatggcagacaaggctagagatttcttcatcaatattgtgcaccggttcggggtacccaatcggatcatcactgttaacgacactcaatttactggcggagtatttaaagacttttgtgaagacttcggcatcaagatttgttacgcctccgtagcgcatcccatgagtaatggacaagttgaacgcgccaatgtcatggtacttcaagggataaaagcgcgagttttcgaccgactgcatccctatgccggcaagtgggtagaacagctgccatctgtactttggtccctgtgcaccactcccagtcgggccacgggccagtcgacgttttttctagtttatggagcggaagcgatgttgcccaatgaggtggaatttgaatctttacgttttcgtaacttcaacgaagagcgctacggagataactgagtagatgatctcaatcgactggaagaagcccgcgaagcagctttaattcagtcggctcggtacttgcaagggttgcgccgttatcataatcgcaatgttcaatcacgagcctttttagtcggcgacctggttctgagaaaaactacacgggatcgacacaagttatctcccttgtgggaaggaccattcataatttccgaagtcactcggccaggttcttaccgactcaagcgtgaagatggtactaccatcgacaattcttggaatatcgaacatcttcgtcaattttatgcttaggcattacttttgtatttccctctttgactgataacatcatgtttttccttgagttatcagtcgagggctactataataataatagagtatgatttttatcaattcaatttgcttacttgatttatcattgccttgtttgattttttggcttagtcaatgaggactgaaagtttttaataacttttgcgggttttaggctcaataaggtttgacaaaagcttttaagaaatcaggagctaagtttgaaatatcaagcacagcataaattcatcagtattgtacaaattgtgcctccatcatcttcatcatcagaatcattgttataatacaacatcagtcggtgtcagtttttttatcattggaattatcagatccagtcggccgaaggtcgttgtcctagaatctctcaactacatcaacggct

SEQ ID NO: 29691 - DNA, 19960 bp, Oryza sativa
gggtataaagacttggtcattgccaacgccaggcttgctcccatacttccagcttccttgatattcttaaagtatgtatccggagcaattctcagcttgtcgaaaatctcagaagcatcaaatgtactcggaccattgttattgaaaaacatggcttggatgagtggggtagcagcgttggcgacttcatccctagccccttcaagcctcttgattttgttgaccaagacattaaattgagcctaagactttattttgcgatctgcataaatagatttatatcaacgagtgggcataaagaaaggaatggtttttggagtattagtcaccagtaccttcaacgtctttccgagccgagtccctttgtctcgccaattcggccttgtcattctccagagcttggatccgcttttccaattcaaatatcttggcagcttgcactgtattcttcttgttaattgatattacaaggatggtagcataagtaggttggatagaggttgtatttaccttttcatgaaccgctcagttcaaagttggagtcttgcagctcggcaatccgatcccttagatcatgctcagttttcctagcaagctctttagcttcgtgcagctggtttctggtggcctcaatggttccaagatggggaactagcctttcaagagtcgcagtcttcgcctcgttcctgagatggattctctgcaaggcgagtttgtcggcatttgtgcaaagcggcaaacaggatggttgaagctgcgtatagggagacttacgtttacgatacgagtagcttgcccgagtgcctttttcagcagacatacttcctcgtcttccttttgcttgtttatcatgattccctgaggttgcatgtcgtcatcccaccacttgacttgaatgggtgggcgagaatcttcagccgatcgtatctgaaggacctcttcttcatcaccaatcattggcccttgtatattcatgaataaaggtgaaacaatcgaagaaagcctgtcagatcaaaatgggttcagaggatgtgtttacctataataatttccggtcagggacgagcaggctcttgtactttaacaggagagctggaccctggatcagcactagtatcctttctaggagggctggccatttgagcttctacttcagggacatctttatttagttctgcacccgactggtttccagccgggggctcctgattagcaccgactctagcttcggctgactggtttccagtcaggggctcgttgctgggttctacattgtcggttgccgactgattgtcattcggatgatcttctgcagccggcccgtttcttttgaaggacccatctccatgtcagttggctcagagtcttttccagaaggatctatgtcagatggcttcctacgaatttgagttatgctatcagtgctatttcaataatgaagtgcgcatcaatacaaggataatggctaaatgatttgtacctggagaacttcctgatttttggcataggacgactggatgttttcttcttcgggttagcttgccttgttgattttccggtcaccctcttgctgccagctttttcagagtcatcattttggtcgtcactcagaaccaatttcctctttcggaagtctgattggttggccgattgagtggtgctgggttgagagtcagatcggatttttggtcctccgttagcttgactagtttgccgacggggtgagtggcgttgagcagttggggggtctgacttcatcaaggcgaattcctgggcatgatgatccaagttttccatcaactttgtagatgataaaagcatgcttttgagaaaggctgggattttaaatacatatcggtggaggggggttgaaggcattgtatggcaccactggcagcaagtgcgaatagctgactgcgattgcatttgagaagatcttatacattctctccttcataaccttgaattcaagagattcaggatcttcacggttagggtcatgtttgccgtcgaattcgaaggccgtgcgagatctttctttgattggggccagccggctcttgataaaatgccgggtgatctgttctccttgcagaccttgctccttcagcttcagcatatggtccatcagggcaagcgcctgggcggcttcttctcccattggtagtgaattccaagtgtcctgataaactggaggatgacaggagtactcagggagtgcaggctcggggttttgtacatagaaccaatttgcatgccagcctttgtttgaggttttgaagggcatggagaaatacttttggctcagagttcccctaagttgaaatccagctcccccaactacgcatggcttgcttttgttcggttggggcttgaggaagaagatgcgacggaatagggcaaaatgtggcctgatgcccaaaaaagcttcgcaggcatgtatgaagttggcaatacgaactatggagttcgggtttaggtgatgtaaactaatcccgtagaaatccaaaattccccggaagaatcttgaggttggaagagaaaatcctccatagaagaaatgagaaaataccacgacttcatgtgtgtcgggggtcgggaatgcttcgccgaatgctggacgccatccaatgatctccttcgccggaagaacaccgtgcgccaccatctccttcaggttttcctctgttacatcggagggcgcccactgacactcgaagctttctttctcttctgccatgaatacgaattggatggtgtgatttggtccaagatatggctggagatggatggggaatcgatgcggtggttgcgcggaaggtttttgtggagctcaggaggatggatcggagaggatttgttaaccctagcttccgccagtgtagtttacactgtagcagagaatggggaaaatggcgagagttttggcagggaagacgaaacgacgctctgacttcggcgtttattttgctagggtttcaggagtggtgatggacctgggcctatacagtacttcagcccaatgctattgccagcgtggctagttgtgatccttagggacttaggcatttttgctttggcaaattttgctcacaacagtatggcccaatgatgttaaaatcctttttgacgcagttagatgattccttggaattactatgatgcaaataaaaaaggtactcgacagaaaggtgttatactaattttgtaggccttattaggctgcaaaggctgtttgggttttattgggatgactggttttaatacagtcattcactcggcatgttatatgcttatttttatggtgagagtcatagcctaggctatttagactcatcacttgttgtgttatcacatttacatcacgtttgatggatctttttaagagtttttactcggattcttatcaagtgtgtgaatttatggatctttagagtgtttttcactcaggccttttcatatctccatttttggtatattaaagctaaaagcagtcggctggatgttttattgaacgccgcatatgctttactatatgatattcggttgtcaaaccactcggttgaatgtagtttgcatcttgactatatgtttagttttttaactaatcacgtagtcgggggctacacctaattatgtgcatctagtcgatgcacccggttttttctatttttagaccttcacagtctttgatttttggtactcgggagatcagggcagaagaagtcggagtactcggattatcattctgtgctacgagaagagattgtttcgtcgactgtaaaggtctcaggggctactgtggagtttatggataccccatacctacacggcatgtatagtctgactgggtatggggtgccgtgtatagatagaatgtctttaaaaggactagggttaaattctaaacttgtatgtcaaggaaatatccgagatcctagttggttacgattgtattttatctgtaactacatattccgttagggatatggactgtattttgtaatacggactccttcccctatataaggaggggtccgggtgcctctaggggcacgactttcacccatatcatataatcaataatacactcggcggatcaatccccggacaggagtagggtattacttcttgattaagaaggcctgaacctgtataaaattccttgtctctaaacccatccacttttccagcttgatagccaccccttttagtattgccgaaatcttgtttcgacaagcgtacagtaccgatcaacggagcaaggtattcaattcggcgataatggcaatatttcactagttaattactcctctaccattggttacaatatatttttattccataccttacccctctcttgatcaacggtccacattactccacctcttaataactgtaagtacatttaataatagttgcatatgtatggtacgtatttgatctagtagggtggagacgagccgatcgagccgctcagtctgtggaagcttgacacaagagaggctagttgatttgcttatgaccaccacttacaaggtaatactgctataaaaaccctcatagggaccggtcttataggtgccccttaatttaaaaccatcacctaagggccgtttctcaccgccacacgctgagaaaaataaagaacatgtacctttaagaactataggtaccggttctagaggaaaaaccggcactaaactgtaggtaacggttttctaaaattgaccgagccaagacgatcgatcagtgcgccaaccacataaaaaaactcgcccaaatcttattctctacccggcgtgctatatccctttcctcctcctccttcctacaacccccctgcctcctttatctgtcctcttcctctctgtatgcacacagtggcaatgccctcccctccgccagatccagcgggaggagaggaagtgggcggcggcagcgccccattcggcagatccggtcgtgggcggctgcagcgtcttcccctccgccagatccaacgggaggggaggtggcggcaggggcagtgggctccccactaggaggcagtggtgggagcgcagcgccctcccttctccgccggcaaggaagcagaaggtggagcaaagaagcccggtggccagccctcgccctcccctcccctccaatccccagtctcttttgtaaatgtttttgtgaattattttgttgttgagtatgttcattctgtgatgtcaatagatcatggtcacaatttaattttgatttggggatttcaatttgatttggggatggcgcggtgtcaaacgttggtgagttcggctcgattcgagctggctctctttttcttttctggctcatgctaatctataggtgccagttctaattttcgcataggtgccgtatgctaacctatgtaatgttctgtagccgtgtaattagtttatgccccatgctttgctgcaggatatgtagatgaatgcatgttatacgttataggaatgatagatgtatatgtttaaataatatgaaaatgatgtggagataataatttgacattgcttgcatattgagttctaaaaatataacaaaattgtaaatgatatgttatgttggcatgatatttaaaatattctagataataattactagtgggtgatgatgtgtcaaacttgcatgtgatttaaaatactctagataataattgctagtgggtgatgatctgtcacacttgcatgtgatttaaaatactctagataataattgctagtggatgataatgtgttacacttgcatgtggagctttagtagttagtgggcatcaactttatagtaagatatgatttgacacattaaaagaaaactaaattctattttaccacctaagttgtttcttatcagtttaatattccctccattttagaacataaggtgttttggttttatcctgtattaaactttctgtaagtttaacccagcttataggaaaatatagaaacaaattgttaacgccaaaatttggtaagccccgaggtcatcatcggcctaggaaccgtatcggcttcagagttctagaatcggctaatgggaaatgtcactcgccagcggtcagattcttagtggattcggggcatggcaattacaggaagattatcgagaacagaccaagtttaaagagtatgcggcatggcaatttttgtattaactagatagagtcagttagttccttttatttttaggaaatattgtttagagtctgatcaggacttgtatattttactttatctttaggaaagtttgtgtctttttccagcaaggactaatatctacccatgtgtataaatatgtacatcccgtatccttgtaatatatctctcgatcaatacaattatggcgcatcccaccctttttatttccttctttctcaacgagttcttgtttcaagttaggtttcattggcgtcgatctccgatgaggggtaaggcttgttaaggatgtttgatcggcagggctagggcctcgatactataatcttgtcgatgtaaacatctattcattatatatcttagttaatttaagtcaatgtctgaatttacctgtatcgactagatcttttctagggttttattggtattagttaaattgtttcatcgatctagattagttaaggtatccaccaccctgaaaatcagtcaaaggccttattgtttagacttaatgctgcatcaattgggtttgacctacaaagtcgtgcttagaatcataaaagctaatctgcctttgattgacaataagggtttcattggtattttagccgatgagttatatagacgttgcatcggcttacaaggattacatacaagttggttttagccaattgcaacaaaggtttcactaattatctaatcttgtggaattatttgacattgaaatatcagctgatgtatgctttaaacatcaaatcggcatttattctatcattcaatttttggtcgattggtttctattggattatattactgttttattacattgtgatcaattgattgtctttatatcattatttactcaagtatcataatctagattggacatatagccggttgctcaaaaccatatcgacatcagctggtattggcattggctagcattgctatcaacttattggccgagtggttctctgatcttcatttcatacgtcttgtcagttgcaggataaaactgattggaatgcctacatctcatcaatattttggacctgcactggagttaagcagatctcccaggctattgtgttcgttgagttagttcgcgccaatacagatctggcaccatcggccgagcgcggatttttcatcaacacatatacaacaccaacattaaattaatttaataaaataaatctactattgtatagtattcatgtttcaggttaaaatgttaattattatggttttaatagaaacttgctcaaacatggagaaatttgacttagaaaaaccaaaacatcttcattttaaaatagtggttgtactatatgacaaccattatatctagacaatttacacccactaccaaaaaaattcatttttcctgggagccaaaaccggtcctggcatgcggttggccagcacgcatgcacgaaaatgtctgcaaaaatcactattttcgcatgcgctcacccttaatgcagcacatacaataatcgatctttgcatgcaactgggttaagtggcccgcatgcaaagatcggttttcgcatgcagacaagttaggccggccgcatgctccatgaggcccattcccaaactgggcatttgggaagatcgtgtctcgtatgtaatacaacatttcccgcaatttcataatcgaaatttgaaattctacgcataggagctaaccaagttgtcattctaactacaatattgcattgacatgtaaatagtcttagaataaataacacaaaacatttatggacgtgtcatacatatattacaaataaacaacagtttcatcacgaacaaaaatattatattttcactatatatgttcttcctcccactctcctagtgggttgaatatgtcttttattgcgatttgactctccttttcgtagaatagcccaagtgcattgtaggcatcatgatgggtgaaacggcagtgctcagcgcacatgttccatataattgtgtcgtcgaaccgatttgctacgtaagggattgacgggatctatggacaaagtggacaataaatgttacaaagtaattttcgacagaataccctgtatggagtgcaatatccggacttacttcatcactgtttgttgtgtacctcttattgactctaaccatctcgcacatgtattatttacatagggaagtctgtggggttgtttaaaacactgtgaacataataataagagaccggtcaatactaacaagtaaggattctacgaaaaattgtgttaatatcatttgtcagtactgacaagcctgtcttggcgtgtagattattccttgtcggctcttttactggcccacctcttttgcggtaatacatatgtgtgttgttcgaacaaaacatttgttatagttacttagaaatttcataatagcaattatgcacatatggattattacattacttacaaaatcagaatagtgaggaactccatgaacgtttccttgtcgtagtgtgttgggtccaatgctacgaacaaatggtcctttggatatactaggaatagtatatagtgatcgctgcaaacaagaaagatgaattagagacatcaattgttaaaaaggatgtattactgcggaaaaaaaatacttagatttacgagcggctgcttatgtaaaagcataagggactgttatgacatttttgtcggcatgcactaattaacatcgctagtgccaagtatgttcctcaaggcgctaagtattgcattagcggcttgagcattcctgtgctcgttctcgtcgtcctccttcgtgggatcctcgggtttctacaaaacatagcctttttcgactattctccaaatagatgggttaatagacttcaaatgcatcttcatcttatgtttccaagcgacatagcgcgtatcgttgaagtacggagctttgccgctataggtactcacataagaagtagatgtggatggatagtcataaggaaacgtatctcccttatcaccatctttgccatcccccgtttggcccgacatgatctctccaagcagttaaggctaattaggagattaggctctgataccagttgaaagggtcaattaggcctagagggggggtgaataggctaatttaaaactttatgcagaagctaaaactgaattagggtcggaaagtttgatccacagccagactatccgaaaataatagatagtctgatgttggatcagactgtctaatctactaaagagtcacaacaagaagatctagcacacaaacaagagtatagcgcaaacagcgactagatctatagcagcacaattaagcaaagctaaagagaggatgaagagagatcaccaacgatgaagttcatggagttgttcccggagttcaaatccttgaggggattctactctccgttgaggagctcactaagagccgggtctttgctaaccctttcctcaagaggttgcactaagcactcctccttctactaaggggtatctctgtccttgcggagatgagatccggccttcacaaacttctcccggccaaccacacgcagagcggtggctcgggagtgacacctagccgtctaggagtcctcaacctccaagagtaaaagacaccacacaactcttggtcaaaccctagtgctcaagatcgagtgaaacacacactaggccctcaaacaccaaatccacaaccacatggatccaccacacaaagaacgaggagggagaaagagctcaaagatccaaagcaccttagcaccaagctcaacccaaagtgaatgagaatgaatgagttgggtaaccctagaaaagggttaggtgaggggtatttatagattcccccaaaatgtggccgttgagagagaatcttttcatcccacctcggaaagtccaaggtgacatcagatagtccgatgttttgacccccaagcaagccacagatagagaacgaaattctggagaatttcgggcaatccgatcgatcggatagtccgatgtcatatcggatattccgttatttttgaagcaagaatttcatcctcttacagagactcaagttccattgaatttcggagtctctgggtcatcggatactctgatcacatcggataatctgatttcaaaatcactcaagaggaaaaaaacaattcaaaacagagagtgaagttctgagaaatttcagatagtccgatgtatcagacaatccgaccttatatcggatagtccgatattttttcgccaacactcagaccaaagacagagagcaaagttctatgaaatttcggatagtctgagcatcggatagtccgatcaggatcggatagtctcacaagaataaaacaagaacacttcaaacaaaggattttgagcactagtgttctaccaattatatgcatgtggtatccctcttaatagtacggcatcctaatactcaagaacacaagatatacatggattagaagacgattaccacaaaacatgctgcaatgcttttaaactcaagttccactcctttttatccttgcattcatctcaacaaaaagcattagtgaacctctaattgtgttgtcattaacaccaaaacaattgaggggtcctagatgcactttcagcagtgaagcttgaactgtaggcggagagggaggagtcggcgcttgagcaggagatgcgggtgatgacctcactagagttggggaaggtggactagtgttgacgcgaaaaacacacactagcctaggagatctgcttagctctagtgtaggtccaaaggttgatgagatgcgggcgtgccagtcagtttgatcctgcaactgacaagatatgtaaacaatagatcaaagagccgatcggctggcaagccgatggagtgattccgaccgatgtcgatacaagccgatagcaatagggtttttgaactatcggctataattctgatgtagaatccgacacttgaagcaaataacaatataaaggtaatcggctgatgatagtaaaatataacaataatataatccaatagaaaccaatcggctaataatgatatgatagaataagcactgatctgaaagttaaagcatacatcggctggaggaccgatgtcattaaatccacaagattagataaacagtgaagcttttgttgcaatcggctaaatccaacttgtatgtaatccttgtaagccgatgcaatgtctagataacttatcggctagcaccccgataaaacactccctaatgatggttaaggggctcttcggacaaggtcttataaatatacctcacttcactcacttgaacgcacacttccaagcttgagctgaattataagagactctattgtactatattgtatactagaataggaagagagtagagtagaagaagttagaagaattccggagttgtcggtaatcttctctcatttctttaattctgtttattactctgatttcaatataatattctccctgagtaatttaaatttatcttgtgagaattatctcttgtttagttcctaaatagcatacaggattattgttcactataatcaactaaaatatagtgattgctttggtgagttgtaaacactaaagtagatattaattgcttagacgtggtgtttaggtaattattatacagtaattgctgtgtatcccacggtatgtttgaggtaggtgtagaggtggtgacagccctcgagatcacttaagtcctccctgtccgggtacgtagtagagcgacatctgggaacagcaggttaccagtgcccgaagtattgcattaggattaaacttaagctttccctagacattgtttctcactagtaaatcctctctatccttgcctatcctttgcttggtgtccttagatgaaccagaggaagatctgatcacacacgttcccttggattcgataccctttcgaatactccgtagggggaagtgctacatcggtatatccatgcgcttgcggatttctatctgtgactgtaagaattacctaacagtcagtcagtttgatcctgcaactgacaaggtatgtaaacagcagataaaacagccgatcggctaacaagccgatggagtaattccagccgatagccgacattagccgatgccgattctagccgatgtcgatagggttttgagcaatcggctatatgtccaacatagataatgatacaaagacaatcgactgatgataataagatataataataatataatccaatagaaaccagtcggctaataataatatgataggataagtactgatccgatggttaaaacatacatcggctaaaagtctgatgtcataaaatccaattgatttagataaacagtgaaacctttagtttgtttagtttgtctaatgtgatggatataataaatctatttataacagcattgtgattgtagagatatatcggctaagacagtagatcgggcctaaccaagacagtcccatctaaatcgatgcatctctaaacacaatgcaattagagatagaattgagatatcaggtaggcaaatatatcaaccaaaccagagcaattcaagagatcgaagtgatgtagccttgaacaacaccaatgtagctgatagattcaccagggccgacggaacgtaggacttacccctccgccagagatcgaactgaactgatgctgccccgcgtcaggtgccaaattccgccggttgataagtaaaacctcagaaaagagggtggcgatacgccgagagtagtattgattgagagatagtttacaatgacctcggtgtacatatttatgcccatcggtagatactagtccttgtaggtcaagaaagaaactttcctaaagataaaaggaaacataaagtccttattgaacactaaacacactttcctaaagataaaaggaaactaatagactattcttaattaatagataaacttgccatgacgtatcctccttgaactcggtcacttctggataagcttccctaatagatttatttccttaaccgaatatagcaagaatccgactattagcgacttgataattctcgtcggccgattccaggacaatgaagccaatactgactctaggtcgatgataacttcgggacttaccaaatttccctgttaacaggaaagtggtgttggagcaacaactgtcgttggttgcgatggagctgggtgttgacagtcgttaagtaccactttcgactgccaactagcacaattaataaagggaaattataatttcctacatgtatactaataaaaaataatgtagttgtattgcaattggagaattaacctggatgcaagaattctatatcaaagtgaaggagaaatgcggctagcattgttggtattttttacgatcacagataaatccgcaagcgtacagaataccattgtagcacttcacccatgagtattcccaaagatatcgtattaatatttccacagggaggcggcggtatgaagacatacttatatatatttaatcaatctataattaattcaccatagtctagacaggggttaggataatgatttatagggtagtagacacatacaagagattcacctctaaaagagtgcctagtagtaaatagctaaggatactatgatacaactatacttctaaactaatcatgtctagtacatacttaatatatacatgcttacaacatagaacttagttccaagcacccaagtactaccgagagaccactccctgctggtttgccagcgtggttatggcatttacgcactcttacatcaaacctagacgtggagaaatacaaaggatggacaaggttgtcaccacctgccgcctacatcactttccataggatacacccacatccaacgatatttatctagcctaaacaccacgtttatgctagtaaacaatatcactaactcccctaggactcttacccttcggaagaacaagttggagctagcgcaacctataaaggtcattggaccattaccatagcatggatcgactaccctaggatgaagtagatatacgaagtatatactactcataacaaatatactcaataaagaattatataaaatatgagcataaataaataaagaaaataattatattaattcgactatagtcttacacaaagaagagagtactagagacatattcagaactctgagaagactataggactgaggctcctaagcttatttcctactagaaactatagagaataaagtggaagagagaattgatccttgatgtgtgtgttacaaagtgaagagagctccatttatagcctctcaatagcagttgtatgacggttattggtctgctaaccatgcataaccaccatcaggagttgctgtagagtcaccatgcactacaccatgtcctaaacttagctacatcccttctgtcggcaaatgccacctctagcatcggtggcgggggcaccaagcctggttcggctgaaccctagccaccacctttgatgggaggatgacatgtgggcccctatgacggttccttgtagtttggtctgatccaaagtcggtttgcgctgacttgtggacccattaatcctcttgctcgcacgtgatccaatttttcataaaaaatttttcacattatctcacataaaaaaattcacattacgacagaaaaaatcacataaatataacatatgaaatattcacattatctcacataacaagttttcacattatatcacaaaaaaatttcacattattcacattatctcacataaaatgttttcacattatcagctaaaaatcacataaaataacacttataatcttacattttcgcaaaaactggaggacggtggaaaagaagtccccgagaccgcctacgtggaagatgacctggagaggaggattgccgccccccaggaaggaagtggaaactaaagctgcaaccaacgccgatcaagagacgaccatggggcgctcaacgaaaaggtgcgatggtcgtagagtccgacgaagaggcgacatctggcaacaaagaggtcgcagcctatggcgtgtacaaggcaacctacgcagataggaaagggacaacaaggaggcagtcagtgcggtgagcgacggggacgaggcgatgcaaggtgaggcagcgacagcggcatgggtaatttcagcagcctggcggctagggttcacgggctccaagacttggaagtcttccaagccccgcacccgcctatatagagctagatcatcgcatgcggtccacctaaggatctgcatgcgaatatgatcgttccatgtaggcggcggaaaggaccatatggaatgattattttcacatgcaactgattaagccgacatcttgcacaaagattatctttccatgcgaccacatgcgggtaccacatcaccatggaggaatatttttctacgcacgctcggatgaatctaggtcaacaacctcagtaccaaaggacatgtttctctctttgtaccgacttgtttcacatgttgggcaaccgtccaagtctgcaaattccttatggtacaatacatagtgatttagacaagcgtgaatcttttggacacctagagataatggaaatatgagtttcttcagttgatacgtgttggatgacaaaaagttaggcttaggaagcaaaactctcaagagactcatcaaatcattaaaactactatcggaccatccatgctttgccttccaagtaagtagtttaagcaccgaacgcaacactgtgatgtccttaccacatccattggattcatcgtaaagaagatcttttgatgacttctttaatgactcccaattctctaaacctcgtgctctacgtagtagtagctctggttcaatgtgccatagcatgtcctccagatcgaaaacggcctcaaaatcatcattaccggtggaaccatctacatccatcctttctcaggagacatatatatccatgattgcaaaattatgtctcatccatctggaaattgaactcttcaccgtcatcttcaggagtaggaagtccccttgatagggccaaaccttgtagttgtacatgaatccatgctccactatgtgtgccaataatttctgattcttgcaatcaaagcatggccaaaaactttgcctcatattctccttaaagcatgtgcctttgccaaggcaaaaaaatttggatgcttcattcacgaatgtcggatgagttcttcgaatctcgtacatccatgcccgatccatttatgaaaaatcaaaatcgcagtacgaataaaaatatagcacatgtatttgaaaaaaaaacatgaaaatacatgtatctcctcaaaattaatgcagcattacgattaagtagtatgtaatagcgcttacatcaacaattcgctcatcgaaacattctattcgagctagattttgcaaaaaaaaaaaaaaactcacataaaaatgagaaatttgccgcattgcactgatgaaatttaaaataaatggagataaatgaagaaggaaagcaagtgcgttaccttctatatcaaattcaagcaaagatttcgagttgatatcccccccccctttttgttgcttggtttaggagagagaaactttgagttcaaatgggtgtagcttgaggtaggtggtgatatatgggccatcattgcctgcatgtggtcggcttaagcagacgtatgggataatagtattatggtagtggctgcttaagctgaccatatgcgataatagccgcattatcgcatgcggcatcacatgcggtcccttaggaatgccgcatgcaataatgtggccaatatcgcatgcggaccgtcaaccggcccatggtggggcatgtttttataggcacagctacttataatcacctgcaacctactggggtcttatatggaaaaaacttttatgtagtagtgaccttttactacaaaatcagacaaaaaaaaactcttttaaaggcaatttaattaaaccagttttaataaaagtttttgcaaagctgacatccaaatcatttgtgtactttaattttgatacggcaaccatatactccatccaaactaaaatatatatatagctatttctcatgagtggcatatcaaagatagaataactaagaaaaacatgaataagattgaacgtacagagacatatgtacatcactagctaggactgcgcgcgggtacactgaggcgtcattttataattaagtgcctccggatcctgtgaaactataattttttaatgttttcttaagttgtcacagtgcagattaatattactaatttacatttttactgatgtagatataatagaagaaagcttgctgccggctgactttactgaaaaaaaaatcatattccgtggagtcacctcccagaccactcaagcggccggccgggttccatatcaccggccgcgcgtctccatttgctgattgccggatgtgtgttcagaaattaaacaaggttggtaattgaaaaatgtcattatagtcgtctagatttatcggtgtatttggcttcgccactctggatatgcatagagtggtattaatttaatttagcttaaaaggcagccccatgtatataaggggctaattaattatctctagatataccctaatagtatagccaactactagatccaatttatctatagccaatctaatagctcattcatacaatagttatatactacactattaatacctggtcccacctgtcatacacacactgcgtcttggagtccgtgctagaactggctacaaatctatagcccgctgctcttctttttcctcatttatctccttaaaatatgtttgcagctagcttatagcttgctattgtacctgctctaaacaacatccggaacaagtgtagccacacttataattatgttatccgagtggacttaaatatttaatgctaaatcaagaccttccaccgtggtttacgtcagtaccactagtcactcatatggacgtacacatcaaaaaacatcccttttaaatgatgagattgtcgtagaactatttttttattaagttcattttactcactaaactacatttgccacagaatttaacccggaaccctagctaactattttcaaactcgtaaagtactaaattaagttggcttactttacttcctgtgtcaatatgtttctttatttttgttactgtttgtacatgcaaacatatacgacaacataatgatccaattaagtagtagacgggctaagtgtcaccaaaacaaacataattgcctaaattttatgacgagtaacaatcaatactacaaaatcaatttttgcataagatcaaaatcgattttcgcagatgaccagacggtccacctacaccaggtgtacgtgtatgcgaaaatcccatttttttgcatgcagctagcgtaaccacatgtgagacatgtggtcacctataccgaccgcttgtgaaaataatttcaaaacaccaaatcggctaccctagaccaccaccactagtgtcatcgtgcttgccatagtctaccgccgccgttgtcaacctgctattcgtggttttaggcctgtgatgacaacggcgattttcgcagaggcctgcaatggtcttaagcggccgtccgtgatagtgcatttcgcaggcggccctataaccaatcccgaggggagtaattttttcatgcaggagcagttaatacctgcctgcaacctattgggactagggagccttgtctgcaaaaatctttttatttgatgatatctggtttatatgtatcacgctatacgatatttgtggcagaaagaatgaaaatgcacgaaaaacaccaaaaaaaatgacattgcaaaaaagatgattttagaactaacttaaggatgggtttcattatattttattttcctagagatgaacttctttaattatatactgctggatatggtagcttgatttgaacttctgctagttagtgtgacgaccaaatttggccttactttagatttggaataaatttgaagaaaatttggaaagggttaaagtcttcgtgtaaaggctggtgtgttcagaggtcagaatgggcaattaactgctatctgactgcaggtattaattcgaaatagtgagacatttgatcacaatttaggtattttcgtgtttacttgcttagaggcctgggtttttcgagtctaatacatcacagcctaataggaaatgcattaattaggctctgtttaattaacgaagttccagaaatgtttgaaccatccataaatcgttaaaattaatctattacccctacatctatctcttatttatcatttttcattcatgtcttactcgttgtctcttgcctctacactgttagagacatcttacttgcccctactgagtttaggacaaatcaacgtcgtgcacagtccctagcatatccctctcgtgcacactacttatttcttagttatgtatggtaaacaatttcaaacaaagttctttaattttgttttcgaaaaacaaaggtgatatctgttcatatgcttggcagaacaatatatattcctctatcccattcaccacttgcatgcatattagtcctggactcctagctatagaatccttcagtttagttgtgggccaaaaacaccggcgccaattagctagtcgcctatcagtgtgcacaagctgcaacaggatgtgagcggaacatatatggtcccatttatcaacttatcttgttctattattcgcaagtccaaactcaagtcactttc

SEQ ID NO: 29692 - DNA, 10658 bp, Oryza sativa
tccaccgccgccgtctgccgcggcgggagatgagggcaacggcgagcgtgatgaagatggcgaacacggtggcgaccatcgcggtgaggatccagacgcgcatcttcctatgttggccacataaaagttctatacaaatttccatgttgtgtaaggaggccacataaaagtttttatgtttttttgaaacttctagtgagataaaggttattttgggtatttttggaaagaaggctcaacccaatgttgtattatagaacaattgataaaatcgccggtatattataaaaagggacaatgtcaatggtaaattgttgaactcgaacaaactcagtggtatagaatagattttctccttttttttatacattgaatactacaggtttcggttgtggggtaagaaccggcacgtataatctctatcggtgtcgattccaaaactggcacatataccggacataggtgccaatatatcggtgtcggttgggaaaccgacacctaaggccagttcccaaccggcaactatggaggttaccgtactagtgaaattagcaaaaccaaagtgctaaattaaaattcatccacaccatcatcaaattgttagtttgatgtggttttgcaagaggacaatgaaaaggggcatcatgcatggtaccggaccaccaattttagaaaataaatattcaaattcacctgacattaaatactctctccggtttttaatagatgataccgttgactttggacatgacgtttgaccatatgtcgtattaaaaaaaataaatttgatttattttgttttgaactgtcttatcattaaagaaactttaattatgaaggtaataattttaaaagtcaatcgtgttatctattaaaaaatgaaggtaataattttattttttactgtttctttgtgtgtgtagatttcagaggttaaatgatatgaaaattttgacatatttgccctttcggaaaacttatttagactatcttagattatattgaatgacctatatatgaaaagtagagctgaatgggccggccctctagattgcttcaaacaaattaaaataccttagattatattgaatgacctatatatgtatcacctcccaaacaaactactattataaataaattgagttggattgtgaagtgatttgactaatatattaattgcaaatgtaacttcaacccaaccatccatatatagaacaacacaataataagaatgaaatggtgttcattaaaaaaagatgaaatggtacctatccccacgcaaatttttaccaattttaattacttgtggattatgagaattcatctccacaacctcctccacagctgaactggtacctcatccttttatggtttagggaaagtggcatcaagaggaccatgaccagttagggatagagtgcaatcctatatgctcaagccctaacagctctaggcttgtctctctaatccgttttaatcgtattaagaagtaatgaaaaatcgttaacacaaagcaagatcttatacgcatagcttaatttctaggaattagttctgatatatcacaccaataattacaaggattatacagacattgcacaaaagtacctaatcacttgaaaaaggcgtttataatttcaaacttcaattcaaaataacatttttgtgaactatggccagtaaacaatatcactgaaaaaaactgcagcctatttgctgtacatacacagtgaatttcccttaatcacatgagataggagtgacctaaaactaacagttaattaattaattagctaattgctccacttttagccacctttttgcacccctcttctgaccagacgaaaggtcaagctcatcatcctcgactttttttttcttctctgacacgagggcatctccagcgccgtcggctcgctgatcggatggcccaaggctccccttctcttggaatgttccaccgatgttctatggttggaggcgctgtgattccccgggccccacactacccattcccaatgacaccacccgctgggccccaccttagccgatcgccctggacacgaatccgaacagtagcagccgtcttcttcgtcgccactgtatataagctagccactacctctcccttctccttgcaccaccaccattgctgagctccaaagcttctagctgtgatcaagcaaagaagaattgaaaaaaaacatatatatattatatatatggcaggggtgtgggtgtttgaggatgggatggtgaggagggcagatagcgaggcgccgtcgaaagggctcggtgtctgtggtggaggtgggggagggaaggtgcttgtgcacgtgccgagcagcgaggtggtgacgagctacgaggttctggagaggcggctgcgggagctcgggtgggagaggtacctcaacgacccgtgcctcctccagttccaccagcgctccaccgtccacctcatctccgtgccccgcgacttctcccgcctcaagctcgtccacatgtacgacgtcgtcgtcaagacccgcaacgtcttcgaggtccgtgacgccgccaccactgcttccccgccatgatcgcatcgatgtctatgctttgatcatcatcgatatgaccttcctcgactccgggctcaggccagacacgccgccatggcgcctacaatcgtatgtgtgtattgtatgaatctcaattcaggtaatgaatgattgtatatcatatgatttgtaattctgtacaggtataacgtatgcgtatatacgtacgtgtgcgatcgatcgggtgtgtgtgatatatattaaaataagcgtggctggtttaattgcaagtgagtgtttagttatttaattatacgagagccatgagcacgtgtgtagctagctttggagtcttgtactttgtggtttggagccattgcttgactgattccgtggcacgaatcaatcatccatgcgttatgcagtgacaataaataattagttttgtcacaattaattaatagtatgttgtttgctgtattgattatttatatttccatatgattatgtgtgtgtttctcagatattgtccattcttgtcccacttcacttttctttctttgttagatggcggcgtcagctcaatttgggatcgaacctagtattgaattcatgatattgcctgctacatgctcatgagagagattgaatgacagtgacaatttcaattaatgtaaaatctaatctgatgaggggccggcttattcgatcgtaccaatcaagctagccaatagaaattgtgattctctattattaagttatttcaattcgtcatctattgtgaaaataacactgatgaatgatcatggaaatatttccatttattgtgttaaaggccaaataacaactaggaatattgaaggggtaagatttataaaaactatttattgtaattaaactaatatatccgatataacgtttggtcgcaaatgtaaattattttgatcttatactaaatcacatacacacacacacagggtcatattcgaattttttttctttttgtgatactgcatgtatcatgtatgtgatattcctaattacaaaatcaatacacaaattaaattaatacacacaaaaggataatctaaagcatttttttattaatttctggacttcgcatatagaagaacagattttgctatgcggtggcagataagagaaaatatgagctattcaagataattgcttaaacctttcgttcaaacctaactatattactctacaaactaacttagataggtaatacgtacttagcacaaaaccatgggttcatttttttttcttttgttgcaatatttgtagtagaaaatcaaggcatgacacactttgatactttcatggtctatagattccactgtccaatttcataacactgatatttttcacaatctttaagtacttatatatatatgtggatgcatatatatgtttctccttctatatatttgcattaactaatgtaatttctaacaaaagaagaaattaatatgatgttgttaatggactttctgatgctggggtatatatgagacaaggagaggctaggtctatacatctcagacattcatggaggctgcgtcatgatctctacatgcatattacatatttttctaccaccaaatacagaacatttactcacattatcactgtttagttaatgcataatttgagacagaatgcatatttgtggatatgttgcattgtcaagcacaagaggattagaaatattaatttggattctgcattatttaattatttaaatttgtatttgcataatccttgtaatagagaatcacagatttcattaggacattgagtgcaaacacaagatgaatctgccccttattcgccacagtaattgtcaatctactaaaatcttttttttaacgactcgcacaagacggtgcgaagttctattgatagagcaggagaaaaattacaaaattacaaccctggaaggtcgtaaccaggaaaaggaaaaaaagtatatcaccaccacaaaccgacagcgccaacacacaaaaccagaagaaggctagcaccagcccgacgctaatcgtgactgaccgccgctaggccaacaaagaaacacagccgagatcatccaaaaacccaaccctcacaatcaacacaaggtctcgctctatccaaatcttaagagttagggagagagggtgagagaaaagaatgcaacttctctccccccctaggccctccgacgtggccaacttgtagagactaggacaccgccacaagaggatgaaatctagagtgagcttgcaccaattggttggaggatttcggctaggggatgcgtaaacgatgtcaccaaggagagaagcgacgaaaaaaccgtcgccaccgtctgtcaagatcacagagaggaccgagactaggctttcgcccggcatccacacatgagggatgagtcggcacgacaacgccctcacgagggcaatgatgcttcgagcatgccgggctgggttttcacccgccgctcaccacctccgagtccacgactggcgccccaaagctccaccaccgtacaacttctgctgacatgtgggaccactgcaccgataccccccgccggctagccttagtgcgccgcagaccacaccgcacccaccggcagttcctccacctcgcaccttgcccgcttccgtcactgccggtcgcgcctcgtcgcgccatgctggcctcctccgccgctgcccgcgcctcctcgcgccaagccggcctctcgccgccggccgcgcctcctcgcgtcgtgccggcctccgctgccaccggccgcgcctctacgcgccgatctggcctacgagcactcctcctgctactcccacgccagccaaatgcggtcgtctgccacacctccccggctatccacccatggccgtcaatgcctcgatctccaccggccgacgctcccgcctccgcatccgccaccgtcaccagctgccaccgccgccaccaccacggcggctacatcgccatcttccagcagcagcgaaccgccgccgccgtcagccacagcagccgccaccacggctgctgcctcgccgaccgccagcagcatccagccgccgccgtcactgccaccgtcggcagccgccgccagccatgacctccgcgtcgtccagatctgaccagaggcgtcgccaccaccatcaccgccaactactacaccgccagcgccaccaccggctttggcggcaccccactgcctcacatcgtcagccgcacctccgtgcgtggctaggggagccagctccggccgcaccacccactaggtcgtcgccgcccctgacccgtcgccaaacaccgccgccgagcgctccatgtcaccgccacccctgacacgccgccgaaccccccccccccctcccgggcctgccaggtcgccaccgcccgtcgctgagctctccgccgccgggagcatcagatccagccatggggaaccagatccaggctccatggcactggatctggacgccgtcagaccgtcggtcgcttctcctcggtgccggcaccataccctaagctccagtcttgctggtgtcccgatcgtcttgaccgcgagcgagagagagagccccgccgctgctgtccttgcagccgcctagctttgccggcggcggctcgggcggcggtgaggctttggaggggagaagaagggcgggggcggtgcagcttgttcgcctcccgcgtcgccccgggacagagtgaccgggcgtgaatgtttttcctcaaatctactaaattctgaagtcacacatttttttctgggaattctgaagtcaactcatttgacgattgtgatcagaatgtacagtaatattgagtacgcttgtaaacattttatttagtgttgtggcaagggaacatgtaaaccagtagatccattacctatagaaaagtgtacgggagatcgaaacaaataaaaaactactacctagcaaattgtactgtacatatactagagcttgttgatgagaatttcgaaatgaactgttttgggaaaaagaaaacagaaaggactcaattttcgctttagacactaaccaaaacgcccattgagattgacaaagacagctagctcgaacaacgttttgcgttatgtggctagaatatattagctgactaggataattggacggcgcttggggcatgcttcaaaatcataggatagtgacactagtgacttttttcccaagttgttgcagtgatataaagcgctttaattttcttttcaatatacattaagcaaatgagacatatttagtattgaattaactgaaattttgattcttctgcaattttctttttgcatatatagtgactacaattcttttagaagtgttggtactttgtgatacctccttaaatatgtgccacaaaagttttatttatctgaatttaaaatattccgtctttatgaagaaaaaataatgcctcttgtgaatccattccatatcataatatgtaacaaaattgcacaacatttgctatgttcttattgtctaacaaggagcatatattgaagtcatatgaaataagcagtttgaggagacattcctgtagctacaagaaattaaattagcaccctccactgcaatgggtgtaatatattgtcaaggtacttccaatgctaagcatcaacagttgatgctaattaattaaggtgccataggatcaaaggaatccaaacgtgacaaaataaacttatacgtacgtgagatatacgacatgggaaacatggtatgtctggctttaaattcttaaaagcagctgattaaaatcaagagaatcaatagaatctagaaaaaaatagcttaaaaaaatgagggagctttttgttctataactacagattcggtttctcagaatataaaatataactacagattcggtttctaaatgctactaaaactgatttttgcatttggccggccgcgggtccttaacccgaccgcatgcaaaaacaaaaatatcaccaaaaaaatcaaaaaacccaaaatgcccaccgccggcatcagccagatccatgcggcggcgccgccgccatcgcttgccctcgtcctcgtccttatgagactcatctgtgaaaatcgatttttcatacgggtctcttaaggagtcgtatgcgaaaatggaagctgatttcacagccgctgtcacttacggtccatctataatttaagtagtgtattgatatctacagcacacccattagccaaatatgtataatcacagccataaatacaattgcgcatgaggacccattatgtatgtgcacaattccagtgtgaaccttatatctggcttgagcaaagacgactaattaagcatgtttctctaattatatttgtaaggtgaagcaaagccagcagaaattctctaattatacaaagttgaagcaatatttataacaccaaattaattgtattaaatccatcggttaaataattttgtaatatattttttgtgctacaaattaatactactatattttttcataaacaggtcaaattaatttaattaaaagagtttgatttaagataaatttaaaattgcttgcagggagtatcatatgtgtttgattggatctgtgtgaaggtgcggtgcatgataccataccatgagagcgagacggcaatttcaaatcgttctctcttactcactaaatccagaatccagctagctaaggcactgatgacacacaggacatgcatgcatgtgtagcacgccatatatacatgtgtccatgtgcagtgttcgtcgtgtatttaaatatatcttcttaatttgttgttattaccatcttaattacttgttcattagctcaattaatactcgcacacagtaatattacatgtctgttcatgcagtgctagtctcccaggctcccagcagtgcatggtcacataccccacttgagactctacttgtatggaccagcatgcataggaggctagctacacttaggtcattccgaacccaaaacactagacatgattttcataaactccacattatcaagaaactagtattagaaaccactcttccaatgcaaacactactattccatatttaaatttaatgctccttatctcacatgatatcttggatgttgtgtagaaaccatatctcatacaagacatggtttccttctctttcctcatttattcatttgccatatcattttttatttcaggtggcaccttatttaatatttaatgctatggacactatcttaatcattgggttagaaatggccttagtagaagccaggtgtgtggatttcagtaagctaaagcacatgggaagttgcacaatatgcatattatctatgtcttgtggtccattcgattcactagcttaattagcacatatagccttggggatccattgccataaaaagggtcatctctgactgtacgtactgcgagctagaaaagtatcgacgaccaaattaatttgatatgattctaaattaatttggaatgaatttgggcaaaattaaccatcttaatattcagtacaaatctgaacatctagagtactagaggaggcgctgaacctaaatcagctgaagtaatctgttttttattccaagattaaaatctgaatggaattctggaaagtttccgaattcgtttccgtttccaagaaaaaaaatctgaattcatttatgctttcaaaagtttctagaaaaattccaaccaatttttttgtgcttctgaaagtacgtttggaaatcggtaactttccgaaccattttcattcctacgtgtgtcccctcccgtctccacaccacacagcttgcctccataccaccaccatggatcgcgctcctatgacgtaaagtcaaagggactttgtcactgacatatgggtcccacatgtccttgtgggtcccacatatcagtgacaaagtccttctgactttacgtcatagaagactcatcccgccaccataggtgcacatgaggcatccccgttccatgttgcggaccactccccgcttgggttggcgttcaaacaaacactagagattcatgtttgtgtactaatgtctagcattccatccgttcccagatatgatacagcatctgctttttaatatacaacatcattgattttttaacaacgtttaacgattcatcttattcaatttttttttaaatataaaacaaattaaatcatgctagaagaacatttaatgttgaattaagtcacataaataaatgataattacataatttttttcagatgaatagtcaaacgtatctcaaaaaatcaatggtgtcatatattaaaaaacggagggagtaacttccaatatttaggtcctaaattttcttcacctgcattatcattctaacccatcacaacctttcatattttattttccccactacttactcttctctaccaatcacaatgtttcctccatttttttcatctagttattttacacctatatccaatactaaattatactccattcatttcatatatactataagtcatttgattttttccttaatcaaagttatttaagttttacaaagcttataaacaaatatactcaatgcaacacaaacatattatcaaaattatatttaatgttagatttaatgaaactaattagttgttgtagatgttattaatttttttaaaaaattaatttggtcaaacctaaagaactttgacaaaaaaaaatcaaaccacttataatttgaaactgatgtattattttgtgagggccacatgcgtaaaaatactcgcatcctatgatcattctccctagattaacctgaatatcaatggatgacaaactaatcaatcatattatccctccgtttgacaatataagttattatagcatttttcacattcatattgatactaatgaatctatcgtgcaccgaattgtatccgcttagttttccgcaagatatcacgggggattccataaggataacgccttgacgagaccatggcatcctctccacccaggtgtccgccgcacgccacgcccggcgcgagagcgcacacagacacgcccgcccgccaccgtacaaaacggtcgccgtcccagccgaaacc

SEQ ID NO: 29693 - DNA, 596 bp, Oryza sativa
gagtaattaagatcaatggtgatcacctggaggtagggcttgaggatggaccagccggtgccgatgaggatgatgacggtgaagagcaggacgcgcttgaagaagccgaagacgtagaacgccacgtcccagccgtgcggcgtgccggtgcgctccacgtaccacgagtcctccgccgcgcacgccatcttgagcgccttgaacagcagcagcgcgcccatgacggcgtggatccgctccaccgtcgcgcggtgccgcacgcacacgcacgcccacagcgccaggaacgcgaagtacacctccgacacgaccgtgtagatggtcggcagcggccgcaggcccacgggtaggtagtccctgggcccgtcggagatgccgtcccgcacgttgtacatctcggtgtacacgtcgacggtgacctccacgccgtcctggcagttgctgaacacgacggcgtactggtctgggtcgtcgatgctcacggtggtggtgaacgccccgggcgggacgtcgccgagccggagcaccgggagggcgtactcgctcgtcagcacgcagtaactgcccccgccgtcgtcgccgttgtcccccgggtc

SEQ ID NO: 29694 - DNA, 20719 bp, Oryza sativa
agatgggtttcattttattgtataatttggttaattcatttctcatagttatgcaatggcttagtttttgttatacaaggattccatatattagagacatacggtgtgactcggcaaatttagcgattaatcaaattaacatgtttgtatgatactgcataaaagattatgcaatctaattattttttctacgacttggtcatgtctatattcaaattcgtagaaaaaaattactatattttgatgacacattagtagatattcatagatgacagcagacaagatatttatgcagtgatgcgcgcccataaggcatggaagtttctagacagttggtgtatgagccgtgctatagctaggatggtgcaaaccaagatgtgcatggtcataatacgttggagtcttgttgcgacgtgctagatgggctacggttatcataacgaggtcagatagtagcaatgatatgtctgtgtcctgttgtattttctgtttcatttgttatttaccacggtgaagaacccatttctcaaaacctcctcgaccaagctagcactacccaaaaaagaggtaagcaatgccggttggaaaactctctaccagtcttcccaaccggtactcaataagcggcacaacagtattaactcactactactacgtcaacgatttattcgtatagtcaaaatcaattttgcagcgggtgggtggttcacctacacccaggtgtctgtgaaagtatcaaaattttgtatacgggtagggcattcacatatgggcacttaagccatccaactgctaaaaaaaaaaaaaaaaaaaaaaaaaaaatttcaaaaccctagaatgtatcaccgatgcgacgcctggatcgactatcgtcgtcatcgtgcctggatccactatcgtcgctgctgctgccaccgtcatcgtcattggagaggcggcgaggtcagcacgggagggggaggaggtgctggatccggcactactgttgccgccgtcgacgggattcgcatggttgcaagccaccgccaccacccgagctctcgcttgagactgccgcccttgcccgctggacccaccatcgccgctctcatccgagaccgccgttgccgggggtggcactactacaaaatcgattttacctaacgagaacccctctaagttgtaggcagaccataattgccctcacatgcaaagatcgctcccctgaggacgcttcaaggaccgcatgcagaaatcaattttcgcgggcgggcatcttaacatgcctaactgcgaaatagacatatttttgcgggcaggcctgttaagaggcccacctaccactagccctccaggtcgagctcctccttaaaatgcataagtcctttcctcatcctcgtcctctactatcctctcctccacttcctttcttcttcaccttatctccctcacctcagcctcctctatctctctctcggcagaagctcggcgtcgacgacagtgcgatgtagaggtgagttcagcagtgaggcacatgttaatgttggtgacaggggtgaccatcggcctcgatggatctaccgttactggtgataggagggtcagatatgcctccactagcctcagatgagcagcaggcctccctagcttctccatttccatcatcgatctagcggatgcggcctcaagaggtgcggatccactgccgttgaactcgggaggggctggcctccctcgcctctccttctccatcgtccatccggcggcggcggcctcaagagggccagatccaccaccggcgcccttgggagcttcatatgcatccagtcaagctggggacggtgggagcagaggcaacgagttcggttgcgatggcgacaatgacgatggcaagtaggacgtcgctgagcagcaaagaccagtccatccactccagcgagggaagcagagaagcgtgctttagtctgtggtgacgttgatagtgacaccgacgacagcagtatggttgggttggctagggtttctagattttgatattttcggaatttttttgccaaattttgttttttgcaaaattcattttcgcatgcggttcagctaggcgcctcgaaaattactaatcttcatagacatctacgagtgggtgagcgctttgcttgcctgcaaaaatgtgttttgactatttggaaaaagggtatatgtagtagtgtggggagaggagagggagagatgccggacttgagtggaggggagacttgaagtgggggagagagagagagaggggaggggagaaaaaagagtgccaagagagaggggtatttttttgatgagggtggacctgttaagacacccggatgcgaaaattgattttcgtaagctgtccttgaacgatccgagggggagcgatttttgcatacggtgataattatagtctgcctacaacctaaaagcggtctcatctgaaaaattgattcggtagtagtgagtaaatcggcacatatgtgatttctgtgagaaaaggtaaattttatagaattatatctaagttactgttggtatttcttaacgacattactagaaatattcattctcagcaatggcgccagaaattgtcctggtatatttatggttacagaagtaatccgcaagcgcacggatataccattgtagcattttacccggaagtattccacggtattgtatttttaatcccaagggaagataataagagtggactatgctaatacactttatacatatgttacttgtaattgtcaaagcctaagcaggggttaattttcatataggggtagaatgacacgaagcaaagctaatcaaatcctcataataaagtaattctaactaagtggaagaagaattagaaagcattcaattcctatacttctagtatacactcaaatcctagtttacatctgctagtatacaatcgtgtggccaataccccctaacagtgccctcctggtacttcgagagaccaccccgggttgctgagttccttacgacaacctatcatgaccgtccaaccggggctaaatacggaggagtaccctccccagaaatttgtcttaggaatatgtactaacgtggaggaatacctgtactgagcaaacacgatttgagtagattgaacctatcttgttcgcttcagcagggtcttgtttggcccaagccaatgacggttactaccgacctcccaatgacggttgtaccggttttggtgcccccaaccgtcattctcaagctataataggacctcccctccttcattttaacacacaccaagaaggattcaagaagaaaaagttctcttagtttactcactttgctctagtgctagtaggattagaattagaatagtcttccttagttcttcgagtctccggagaattcgggtatggcccttgtaagactttatccagtaataaaatattcttctttatatagttttggtccttgttggtatttcttaacgacattactagaaatatgaattcccagcaatgacgccagaaatggtcctagtatatatatggttatagaaggaatcggcaagcgcacggatataccattgtagcatttcacctgggagtattccaaggtatcgtatttatttaatgccaagggaacattgtaagagagaactatgctaataatgtatatatgctacttgtatgatcagagtctaagcaggggttgatatattcataacggtagagtgacacgaagcaaagaactcatatctctcattaaacaatcctacactatgtggaagaagaaatagaaaagcaatcaattcctatacttctatacactcaatcttagtttacatctgctagtatacaactatgtagccaataccccctaacagtgccctcctggtgtttcgagagaccaccccgggttgccgagttccttacgacaacctatcatgaccgtccaaccggggctaaatacggagtagtaccctccccaggaatttctcttaggaatatgtactaacgtggaggaatacctgcattgagctgtcaccatcagaggcccacctctactatcccgcagcatatatccctaattaatgatatttaataatctaagtaccgtgcttacattactaaatactactctacacccgtgcacatgacatagaaactgataaatcagacattaaacccgcaccattgcacctctctggatggctacccacaaaatcggtacaacacagatataaggtaagaacagtactcagactaaacaaagtaccgaagatatataaagaagaatatttcattaaaattgaaagtattacagaaaagaatacaagagctgctagagccataccgaaactctttcgaagactccgaggactccgaatactattctattctactccacttagcactaaaatactaatactaaagtatgaagaggaatttgagctaacttgagtgtgttgagagagtgaatgagctcctccttttatagggccggtatgacggttgtaccaatgcgaattgtgcattttaccctcacaaccgtcattaagagtgcatccggatcgtacacgtggagggccaggctgattgggcaccgccagttcggccgaaacctgggctagcccaacaggcctccagcttcggtacagtctttgacaggtgggtcctattgacggttttgtagttaaggcggtttccaggacggttacacctggcttctgagccctctcatccataagcttgcttaggagtgaggttttctccactttctctttattttatttgataaattcctgcaacatattgttctccaagtataagtggaactatattatttgaaaacaaatatgcattgtaagcatagctaattctccattattttagttatattgacggtcaaaatttgtctgtaacgactgtcaacagttacacaaaatcatagggattttggtgcacgacacaaatccacatcattaaccaattttcacgaaaccacatcattaaccaattttacatactcctcaaaattttaaaatgatttagttacatccatgtaaaatttctatgatggattaaaaaaactcataaatttatcaatttaagatgtaattgtagaactcaaaaggatagatcaaagtaaaatgatcaatagtttggttttgtgcaacttagatcacagtacctagggttaagtgagatttacttttaaaagaacacattaagccagtgttggtatttcttaatgtcacagataaaatctgcaagtgcacggaagataccgatgcagcacttcaactggcagtattccaaggtatctatttccatagggaacgtgtgtgttcagttcctcttcaggttcatccaaggacacaaagaaaatgtaggcaaagggtagagatgatttcctagtgagaaacggtgtctacagaaagctcagtttaatcctaatgcgatacttcaggcactggccagctcgctactcccaaatgtcactctactacatacccgtacatggaggactttagtgtacttgagggctatcaccacctctacaccgatctcaaacctactgtgggatacgaaggaatcaccggaaattaattacccagatactgcgtctattcaattaataactactttagtgctagctaaattctaaagcgatcacaataaattaatggactttagtgaacaatgatcccgcatgctaattagaaaataaccaagaattattcacatgaagtaaatcttaattactcaggaagataattctattaaaccagagtaattaacaatgtacaaaaagtaagaggagattaccgacaactccagaactcgtccgatttcttctaccatactctccctattctatgtgtaaaataaatcatacaaagagcctcttataattcagctcaagctacatcttggtgtgagttggaatgaaggatgaggagtggtatttattggtggaggtgccttcggagtgtggagaccctccatggaatcatatgagcatcttcactctcctcaagccaagcgtctatttggatgacagttggagagccgaaaacggtagaaacccacattggggagcggttgctaccgaactcaacttgggcctgggctagtggcctctgtcagggttgggctgaaccctggccggctccgttggccccgtttttcctcctgagcactaatattgggtacctcattctattggtacggtggttgggcccatttggaggtgtttaattgggtttttggtccgaaactccataagtttgaatatgagtttgattctcctccttcatgtatatttcttctcaacttaggtagtttgtcacctacatctaaatatacaccaacactcgtggaaattattagaaatatatcctaccactattttggatattttatactttcagatattttatactttcagttttatgtaggtattgacggcgagaatttggtatttaacagccgtcaacagccagttcactgcttcgtgccggaatttcaattgttcatccacaaattaacacatcacagattcaatttctatcaagcctaaaattttactaaaattagaagaattatcatctttgcatggctgatctaaacttaaaaatttatcagtcatgaagcgaggcttttggttgttcccctgacgcgccctgaactaagctccctttcttttgcgatccatctggttgcgctgatcctcctgacaaatcaacttgtcaaatagcttctcaaaatcagtataatctccatagatgacctggttggttagttcatcattaagaccaaacataaacttctcttgcctcacggcatcggtgcgcacatcaacaggagagtagcgtgtgaggcgatgtttgtagatccttaagtgtcaaatccgactgccaattcctgcaagaaagaaaattaaagaatataaaattgaatactaaacttagaggtagtggatattactaactagttccacaagtcttggtgaatatttgtatgcatgtgaattatggaggaaaaccgtctgacatgcgatgaaatatactaatcagacgtgaatacacagattggatggcccaaaaatcagagtaaaaccaacatatttaaggccatccaccgtacaccatcatgaagacccactaggcagtgacccaggtgcaaggtggcacgaggcggctcgactaggtttggccgaactagggatggctgttgatatttcttaacaacattactaggaacttagtcccaagcaatgttgtcagaaatattaaacggtaatcgtatgggttaaagaaataattccgcaagcacatggatataccgctatagcatttcacccggaagtacgtccaagatatcgtatttatttaatcccaagggaagatatggtaggatagtaatatgctataaattcttatcatacttatgtagatcaaagtcttatgcagggattaatcaattgaggataaggatagatttgacacataaaaggttcagtttagaatactctcactaaattataagtctaggctaaatagagaagaaattagaacaacatcatttatgcacttctagtatatagtcatttagtatacacttactattgtacaactctgtggctaataactccctaactatgccccccctggtatatcgagaaaccgccccatattgtcgggttccttacgacaatccgtcatggctatccaaccggttaaagatacggaggagtacccacagcaagaacctctcttagccctacctacgcacgtggaggaatacccatactgagctgtcaccatcagcggcctacctctacagatccgtggcatatagcaccacttaatgatatctaataatctaagcaccacgcttacaatactaaatattactctacatctctacagatgacatagagcaactatataaatagacacttagacaatactattgcatatctctggtaagctaactacatatttaatacgagacaagtatgagctaaagttcgtactcgaataattatgcaagtatagtaaaggaccaaaactagataaagaaaagtatttcattatcggataaagtcttacaagagagggaacagatactagatccatacccgaaatctccggaagacttgaagaactagagaagactattataattctaatttctactagcactggagcaaagtaagtaaactagagagcttcttcacctgaatcattcatggtgtgtgttgaaatggaggaggtgaggaccttttatagctgatcaatgacggttaggagcgacaataccggtcacaaccactatagaaaagtcagtagtaccgtaatagccggttgtggctgggccgggacatgccggggtcagcagaacctagaggtccgccgacccctggccagcccccctggctgtggacttcctcttgggccctgacattttactccttggcccagtggcatggtggttgggcccatttgaagatgttctaatgagtttgtggatccatccatccatgtctgccacatgttgggctctgattggttgaacggtgaatttccatcatttctccatttatgaagtaatctactgtattcaaatactttgccaagtacaagtggacttggattatttctaagtaaatatgcatccaagcattgctagttctccattatttccggaagtattaacggtcgaaattggtctataatgactgtcaacaatggctgccctcgtgctcagcttccatgtggtgacagttatcactatcccgaagtcggtggcacaaggctcaacgcaagaaactgccatccaatgacggctggaggacatgtggaggtttgagaggagttggaggagaatatttccatagcatctccactctctcaagtcgtatccacattataagtagcccctctactcctcacttcaaatttgcaccaacaagcagactacaacttcacttatatacataggcattgctctttaagggtaggaatagaatggggaagctcggaaaggagtgcaccaaatttcagacatctctccggggttccggagaagtgccggatatgttggcattcttctaggggagttctggaggagtgccggagtcctgaagatgccggtactccctccgatcttgtacctcgatggatgcttcttttataagtaagtatttgtgatctcctttggtatttaattttatttagttttatcactctgcttaggtagactaccttaatcttctctgtgacgttgggattaggatagtaatcaatagcacagacacgatgtctaggctagagattacctttgtttgatgtgtgctccacgggttgtagaggtagttaacaggtggtgacagtattcgggtacatcatagagccatagccagagtctccttggcagaccaggggtaagccgatgcttgaagcaattgatagagttttatcttaacttgattaagataattaacccataggaatcctctctattcttggcctaccatatagttatttcccttggaagaatctcgttcttagattatacacatacgttgcctgtggatactatatcctggaatactcttggggtgaaggctacgactgtatttgtgcgcttgcggattattctgtcgtcgtaataaataataataggcggttgaactcgtgtaggtactctatagctatcttgtttccctaatgaagcgcatggaactccctcttattttgtgctacagtcccatcgggaacctatgccttcctgaagctacggcaaaattccgcccaagtgacatatgtcacagctgagcgggtgaccatgtagttgtcccaccaagcagaagcgggaccttgaagtttgtacgtggcaaagacaaccttctcctagtcgttccaccggaggaggttcatcttcttctcaatggcatgaagccagtcattggcttccattgggttgatggtgctggagaaagtgggtggcctgacatggagaaactaaagtagtttggactaatgtggtggtggtggaccaaactgctgattcagctgctgcagtgcctgatggtgcatcatctgctattgcatatattggtgttgtttttgcatctgctgcatatcattgtatgatatgcgtctaattggccaacacctgagcgattgttgaattctctagcggtggaggtggaccattgctagttgcaccactggtattggctcctccagtctattcctcactgctgctaccatcacctgttgcatggtcgccattccttgtgttcaccatctgaatggggatggacagaaaaagggggaaaggaaagaatatagactgctaaaaaacctaagctttattacattataatttaagtgcaattgtctaatctgaattaaaacaactacaaagaaaacaattcaactcctaattaaggtagtcataccgcaaccactgttgacggtcgttgtcgatcagtttcgaccatcaatattaccaaattaagagagaactagtgatgcttgcaatgcatatgtttgttagaataataatattccactagtattaggtatattaatcctttgtagagaatgacactaaagtggaggagaatcggcatcaacatagacgataaatcaatcggacaatgtcgagaaccagacttatgtatgaatgggaaaagaactcagaattgacacgatgaattaggccaaaattcacaagtctacgaagtgaagcaatagaggatccccaggcgaagatgggctggtttgggccagcccatggttcggccgaaccagggagttcggccgaacccccatctccactgttgaggccagggtttggcatggacgtccaagattgcaccccaatgacggttggagggtacttcggacaattcctcttccacaaccgtcataaccacctctagataaaggcttcactctcttaacttcaacacacacctcaagcaatagctctctcatttctcttaagtttagtttagtagtacctagctggtggaatagaaatagaataggagtcaggattccgtaagccttcggaagagttcgggtatggctctagtagcttttctcttctcttttgtatgctttgtacttttattagaatactcttctatatatatttatggtattgaaatattctccgagtatatgagtacctactttatattatgttcttattatactaaatatacggctagcttatctaggagatgctttggtgcggatatagtgtttgcttatgcaattactctaggtcatgacgatgatattagagtggtcatgacgatgatattagagtagtatcgggtagtttagacgtggtgtctagattacgggatatcattatttggggttatatattgcggatgagaggtgggccgctgatggcgacagctcaatacgggtattcctccgcgcctatatataatcctaagttaatttcctggggagggtattcctccgtatttagccccggttgtatggtcatgacgggctgtcgtaaggaactcggcagtcaggggtgccttcttgaagtaccaggagggcatcggataaagggtattagctagtatatcagttaactagaatgtatgtatactatatatattagacgtataggaatagatttcctttctcttttctttccacttagcttagatgatatattatgaggatgagtagttaatgcttgtgtgtcactctaccctttgattatcttaacccctgcttaaaatatgattatcacaagtaatatataaattattagttgagttctctctacatgatcttcccacgggataaaataaatacgataccattggaatactctaaggtgaaatgctacaatggtatatccatgcgcttgcggatgaactctgtaaccataatataccagaaatatttctgcgccattgttgggaattatatttcttgtaatgccgttaagaaataccaacaagcaattctggcgccgttggcggggaagattcataatagagattacttgaactaatactttatatttacctctgtataatcatttcctttgcaggctaaccttggttgttttcactttttgttgtgaaaacagagtagtgcatgactggtttcaacttgccggaaaactttaaagaaaatccaaaagctttcttccggagcgttaggccgcgagtcgttgctccgcagaaaactctactgacaaagaaaccagccgtaccagcgccactgaccttcaagacaatagcctgcaagactcttcacgagttcagtactccctctgctgataatgtggccatcgggccgcaagtcaacataggagatgtggatttcgatttgaagtccagcctcatcacgatggcgtaggctagcccgttctgtgccaagcctaatgaggatgccaatgctcatatgcaacagttcctagagatttgtagcacgtacattatcaagggcgtcagtcccgatgccgtcaggctgcggctgtttccgttctcccttctcgagagagcgaagcagtggttctatgccaaccgtgctgctgtcaacacctgggacaaatgctttacggcattcctctcgaaattcttcccgatgggcaaaaccaatgctcttgtggaaggatttccagtttccagcatacaagggacgagtctattccggaagcatgggaacgactgcaggagtatgtggccgcctgtcttcatcatgggatggacgactggctgatcctgcagaatttttacaatggactcaccccaaagtcccgcgatcacctggacgcggcagctagaggagccttcttctctaaaacagttcaaggagccgttgaattaatagagaagatggtctccaatatgggttggagcgaggaacgactccagacccgtcagcgaggcatgtaaaccttcaaggagacggaattacttgctgccaagctgtacctcctcatgaaacgcttggacgaccacgagaaaaggccacaaggcaccgtcaaggccttggactctcacatcacgtgtgaggtctgtggcggcacggatcattctgggaacgactgtccggaaacctgtgaggaggcgatgtacatgggcaacaacaccgggtaccgtccacaaggaggtcaggggtggaaccaaccacgcccatattatcaatgaggtaaaaacaacggtaacttctctaaccagccctccttgaaggatcttgtttttgcgcaagatgaaaccaccgatgcactaagcaaaaagcttgctgctaccgataagatcctagagaacataaaattcaaattagatggctttgcctacgcatttcaaaactagatgagctttaataagatgaaagaaacccagttagctcagttagcatccttagtccctgcaactgaaactgggaggattcttgggcaacccgactcctccattgaaaatgttaaggcaatcacgacgaggggaggtaagtccactcgtgatccgccgtatcctaaccttgcaggaactaatgggatatcaaaagaagcgtcatctaatgactcggctgacaaggagattcagccagaaaagaccgtgccgcaggagtactgcgacacgcggttgctgctgtttccccaacggattaggaaaccgtcagtagacgagcagtttgctcgttttgttgaagtaatccaaaagattcacatcaacatgccattgttggacgctatgcaaatgccgacatacacccgttatctcaaggacatactcaacaacaagagaccgctcccaacaacggaggtggtgaagctgacagaacaatgcagcaacgtcgtactccacaagctcccggagaagaagaaagatccgaggtgtcccatgatcacctgctcgattagggcacaacaattcgaccaggccttgtgcgatcttggagctagcgtcagcgtcatgccaaaagccgtcttcgacaagcttaacttcatggtgttgtcaccgacaccgatgcgcctccaactggctgactcgttagtccgttacccggcaaaatattcatgtggtcgaagtggagccacccaagacggacagcctggtgaaattcatgcaaaacttcctggagaaggaaacaacaatgcctaggaaccgctattggaggacgtcggtaaaatcacctgtaccggccaagaagttagagcagccggctcagaagaagccatcttccgcaccaaaatcaaagaaggtgtggaaggaaaagccgaaaacgcccgctccatcacctccagagacgggtagaaaatccgtgaactaaaccgaaaggaggtacggtcttgcacgtcggactttaaatgacgcgaccttcgccaacaggtaaattggtatgtatccgcatatttgctttcaacaatttgaatttttgcatcatcacatatttgaatttcatatttgcatttaggatttttgaattttgaggaaattcttcaaatgaatttttcaaagcaaacaaaaaataaaattttcaacaaaaattgactgtgccacgacaacactgaccgttggaatccaacggccgaaagtggggccggttgggcccaccaggggttcggccgaaccggccaggcaacggtcggctgcctcactttttgaggcaacagctagtgggccccacaggtcagttttgaccgttgtgggtgcactacttaagccaaccgaccgggagaagggacttcaccccatttcaacacattttcatcccctctccaaagtttgctatcaagttcattcaagctttgatagtttccctcaaattcaaaatagtttagttgcatatataaaagttgctttggtgaaactaaccggcgggtgaaactcttatcattcctaacccccgccgagtttgcatatgcaattactctatgttatgacgatgatattatagtagtatctggtagtttaggcgtggtgtctagattacgggatatcattatttggggttatatattgcggatgagaggtgggccgctgatggtgacagctcattacgggtattcctccacaccggtatataatcctaagttaattccctggggagggtatttctccgtatttagccctggttgtatggtcatgacgggctgtcgtaaggaactcgacagtctggggtggcttctcgaagtaccaggagggcatcggatagagggtattagctagtatatcggttaaccagaatgtatgtataccatgtatattagaagtatagaaatagattatatttctcttttctgtccacttagcttagataatatattatgagaatgagtagctaaaacttgtgtgtcactctacccttgtattatcttaaccactgcttagaatatgattatcacaagtaatatataaattatttgtcaagttctctacatgatcttcccatgggataaaataaatacgatacccttggaatactctcggttgaaatgctacaatggtatatccgtgcgcttgcgaatgaactctgtaaccataatatactagaagtattactgcgcaattgctgggaattatatttatagtaatgttaagaaataccaacaacgggcagcgacatgcaaccaccggcgatgggtgctggcgatgcacgagcaatggcgggaggtgcggggcatggtggcgcacgcgggatgctgcggctcatgtagaaacaaaaggggagaggggaaagaggaagtcctgtccagggaaacagcggtgaccagcgcagagcgcgggacgatggcaacgttatgccaaggagcagacgggctacggcgagccgtagaggaggagatgagaagggtcaagaagaagatcacttgcaattgaagaagagtgggttccggcgacggggagcgatgaccgaacggtggccgaggggcagacaggctcgacggtggtggcgacgcagctaggtggtgaccctagcgctgtctagtggacaactggaggagagcgatgagtagtggagctctctcgatccggagtttgaatctcttcattctcgacggacggctgctcaggaaccttttcatcaatcgagctagcagaagtggatggttgagcgagtggcttcatcgttagaggttcctctatcttggacactgatgccttcgactggttttcattggtttgcgtcatgaaggaagtattttctagaatgcgatccaacattattcttccttctgacggtgttttgtgcatgaacgatcctccagtggttatgtgcagatagaatgcagactccttatccaaacccgtatggaaatgttgcataagcacatactcgagtaaggacagggttggtacggactgcactaaattagtgaatctggaccaggctgcactgattgattcgttttcgatctgcttgaaactgagaatttctactcgtagggcagtaatacgggtaactgggaaaaaggcaagacagaatctgtctcgcaacttttcccaactaccgtttacacatccaacggtagaggtgtaccattgctttgctctctcttgaagagagaacgggaacaatttcgaccgcccagtttcttgtttcatgccacgaatcttaaggcatgagcagacttgttcaaagtctcgcagatgattgtagggattttctagatcaaagccagaaaaaggattttccctaaccatactgattagttgtgtaaatgggctccaataaaggaggtggctcatagaattcgccccgaggagcagacagctcaaaaagaggttgctccatggtcgagaagagtgacaggaatacttctctagtatagcaggagcgaaggtagaaataaaaaaaataaaaaggatatgaggatgaactaggttcagaaatgatcagcaaccgttccccggcaacggcgtcagaaatgcttgttggtatttaatacggtcacagataaaatccgcaagcgcacggatataccgatgtagcactttccctacggagtattccaagggtatcgaatccaagggaacgtgtgtggtcaaatctttcttcggttcatccaaggacaccaagcaaatgataggctaggatagagaggatttactagtgagaaacagtgtctagggaaagcttaactttaatcctaatgcaatacttcaggcactggcaacccgctgtttccagatgtcgctctactacgtacccggacagggaggacttaagtgatctcgagggctgtcatcacctctacacccacctcaaacgttctgtgggacatgcagcaattactggataacaattacctaaacaccacatctaagcaattactatctactttagtgtttataactcaccaaagcaatcactatattttagttgattacagtgaacaataatcttgtatgctatttaggaactaaccaagagataattctcacaagataaatctaaatttctcaggaagaatattatattgaattcagagtaataaacagaataaaagaaataggagaagattaccgacaactctggaattcttccgacttcttctactctactttcttcctattctagtatcaatatagtacaatagagcctcttataattcagctcaagcttggagtgtgtgagtgaagtgaagaggtgatgtccttttatagggcagtaatgacggttgtgagaaggggaaatgtccgaactgccccgcaaccgtcattggagagcatttggagcgtccacgccaaaccccagcttggatggttgagattgtggctcggccgaaccccctggttcggccgaacctgggctgggcccaactggcctagctcttggcccatcttctcccctggacctcctctatccatttctcggagttttgggttgatttactggtatttggatcaagttcacaacccctccttgtatagatacatgattctcctcactgtagtctgattttcctcccaacatcggcgtttatcgtctgcatacaaatatataccaacacttgtggaatatatgagagtaagcacctatcactctgttggatgttttattatctgaactttatgcagatgttggcggtatagaattgacatttaacagccgccaacaaggtgatcgatagatgcctactccttattgtcgaccagtcggttgtagaccagttacgtagcagtccccgcgatttgaggtacgactacaactggtcatcgatcagcggcgtaatgattctcccactacgtctgcaatttgttgagtacaactacacactcggtcttcgccttgtgtggtagtcacctcatcaacccatgtcgttcaaattatgtaagtgtttgtatgtgcaatatttgtccgttgatccccttttcttatatcgccctatcttgaagtcgatcctatcattcctttacactattgtcatatgcaaattcaatttattttcaattttcaaattcatattatatcatgttacccttgagcgttcactcgggggctatttgtatctaacaatctattatgtgttttgatttcaggaaagtcagacttcaagactttgtcgcagactctacaactactcgattactcgagaacggttgctggagtttgacaaggattacggaataaagcgatggtgtacctgccgagacgaaatttcttgacttcaatccaaattcttgattacggcaagataaagaattaagtcgtatactccgcaccttctcggtcatccgagaatgtcaagcgagcacggcaattgttattccaaggtcttcggtcgagaacatcaactcattcatttgcattgaagtcaggagctactgttagggttatggataccacatatccaatagtaatcgactaagctcggaagggcccaccatatatcaaatcatatatggaatcatacctcgtatataaaagaagttctagataaggaaggacgagtagagttctatatggaaacaataaggactactcgaatcgtatccatacttgtctccctagttctacttggacaaggggacatctatgggtataaatacacaaccccctatgaggagggaagacaaaaaacagagacaccagtcagaataaacaccaacacacggcgccaaacatcgatattggagatagcctagatggactcaatatggtgcctgcggaggccgacaagaggaatctagtgctatataggatctcgacgagttcgtactcgaggaggaagactaccctatcgtcgactacgtgttggtgatccatgccgccaagttgacgacagctagataggttatcccaattattgtactttgtgtgattcaaatgaataaagagcaacatcggcttcgaccaactggagtagggtcgttaccttcgtgtgaaagggcccgaacctacataaaaatccttatctctatttcttttacctcgacctcgcatataccctggtaccaacgatccccataccatgcaaataccttagttgtgacccaaaacgtcgacagctactttatataaatctgtgatccgttagatcattggtttctcttctttggaacccacctaatgataactatcatgtgttccctttctatgggcaattaggattgctttatatatatatccgggtgaatcatagacccaaaagtgcacacgggtgaatttattcggcctcagtgcatcggcaaaactagccatattaaaatcacattgcctataataaggtttttggattcatatattgatttaatttatttcataaataaatcatgacattacatatgtaaactagcataatcatatcatacaatctttggaagatcggttgcacaacaggaatgactcgcggtatcgggcattgacgacaacaagcaacacccgagagaagaggaagaagagccattgtggaggaacagcaaccagtcacgcaaagcgcttgcaaaaacattattgtcatcttctcctggtgcaggacgtcgaaggcgaaggttctggagagttgctctctcgattgccggtgcacgccagcgagcgggatggagtagactacaagtgacggtgcaatactgaggaggaggcaaaccctatattgattttgtgtgtgttacgtggaggtggcggcgcctgcataatcttcactccgctcctcgcaccagattattcactgtgtttctaaaaacaaaaccgaattttgtgcagcaaaacaaaattacaaaagaatactgtatctgtgcaaaagtgagggaccaattttgacgaaccattcgacacgcatgtcaccacgtatgcgccgcgcttgtgtattcccgttgttctctccacctcacacggtggcggccccagggttttaaacttgtgtattagaaatggggagaggaaaattttttgttcatacacctaaaaacctaataactagcttgtatagtatcacacactaataattatataatatatagcgtatataacataaaattgagtattagttcacacattgatagaattgatcatcatgtgaaattgtttaacatatagaaatactaataataaacatatcaaagtgccaacatatggaatagaaaaatgatagaaaatgataaattgggaagaaatcttactacagttctacaaactaggcaaaaacaattctacaaactaagcaagcaagcaagtacactaaatcaatcaattgcagttttcaatcataagggtaccgagctcgaa

SEQ ID NO: 29695 - DNA, 8611 bp, Oryza sativa
gttcctggtctggaggttatatttgttcaactggggttggttgttcaaatgtggctgggcctatgcaacatgggtatgttgtatgctgtttgtttaatattgattaattattcaactgttttactattctcttaaatatttgttaaatgctgttttctgcaaatgaactatactatgccatcctttgttatcctgtgcacttgcatatttgctgtgtggcttgttgagtatgttatatgctcattcttgcaatattcattcatcagaagaggagtacttcagtgaaggtgatgatctggaggattaggcttgttctcggtcaagttgcctgtggagtggagtcgccatagccgttccgtcgtttgttttagttttatctttccactgcgtagaatgtttttctttgagaggaactatccacctctgtaataatttattatttgcgagtattaaatagttatttatttgtactctattatgaatattgtcattgtgtgcctcggttgattcctggacgagggtttaacatacatgtaagcgtttggaattttggatagaaattccgggcgtgacatatttccattgatctatttcacctttgggcattaatgtgtaataattgactaagttttttcggttaatagtaattacacaactcatgctctaaatccatatataaatcatctgagctccgttttaacccattcaagttgtaatgaattcgctaaaatgtctagaatccattaaaattggtttattttgttgtttcagtagactttttgcatgtattgttgtatgctttgtttgtcgtttagaatccggcagttccaacactccgattttctacgaagtggtcaccgaggttcctatggctcaagagcaaggcaagtcatacatacaacattgatcttgttgaagctattttataaaatccccgcttttctattaaattgtattattttataatgccatgtgggatggatgcctgtcgtactcaacgttttgttaccttgtgccattgataacttggtatataaatgactagatgattggtttaagaatgctgaggtcaattaatttacaatggggttcactttaaattagtccttaattacattatgatgatgtaccaccatggtaatggtttaattaactaaaatatgctttaatggtgggttgtgggtgcatggtgttgcaagtcgtacccatagcaattaaggaccggttcttgcgaatccctgaagatatacacgtacttaccacatgctagcatgggctccaggctgaatctagagtgtatcttaacctcgtcaatatatcatggcaagggtagaggagatggtgcagttcggacctagctctggtctctgttgttttcggatttacctaggcatgagtggggactacccgctgcctgtttaggagtgggggtaaaacctgaggtgggtatgcttggttagggagagttatgcaaaggattttgtcatgatttccccctttgcagtgccgtggtggtacttcgaggcatggtaacatgtgtggaatcgtgtcttgtgggtaaagttgtatacctctgatcaaagtaaaactattcgaatagccgtgcctgcagttatcgggtggacaactagctcaccgtgattagtatctgttaacgaccaaatttggtaaatcataaattggatttggagtcaaaaccgaagccgatttggaaggagtttgtttctcaggaacatagtacgcataggctacgggttgcatcggttactgtctgcattggctgatactgaatcggacaaggagaagccaatgtagccgattttagtaagatgattctagaatcattgtcgggatcggttgaggtgtttaacaagtattgccatgtatggattaagtccaaagaaggcaattgaatctattaattaggatattctggtagtttccttagagatattatcggtaagagtccgattaagggacttgttcgtatttttgagttgtaatagagatagaatcgtgtccagcaaggacatatcatgtatgttgggtacaaatatgatctgagaccttgtaaatagatgacgaacagttcaataacactttcggcgcatcaccatgtcgcgaccgagaaaattgccttttcccgaacgctagtgtattaatccccgtcccaggaaaagacggggtacaccaaacaaacatggtacaaaaggcacatctttattatatcaataatatttacattattacaaaggcacttcaggcctgacaataaaaaataaacagcagcggactagcgggcctacggctccatcttcacaggcgctcaactggggtataagccaggactccacctaagacttcttctccaaagcttctcttactgaagggggggaatgattgagcaagaatgagtacaaccacagtactcagcaagtcccaccgggagatgcatgattaatgcgagggagtacaaggggtaataatataggggttaagttttgcagtaaacagcatttaaaagtcacttagttgcccaaagctattttgtaaacacgatcctagagctatacaatattattaatcaaggccgtggacccacacgaacctgccttaacccaaggcctacgatgattcagaccgaactggcaacccgaccctgggtcccagctcatcccaagccaacccaggccaaccattccacattttagttgttaagcaggttttaagaattaaaacactaacttgggtacattgctaggcttgcccataaccgagggcgcggctattcgaatagattatactctgatcagaggtgtacatctttacccacaagacacatcttcctcacatgtaaccacgtgccacatacccccacggcatacggacggaagacatgatatagtttctaacccatcctagccatagacaagagtaccgacccaaccccacctacggccggaacctccgggacaggtaggcaggactgagcccctagcaacagacaccagccctgtgccatgacatctcgactaccgggccgcagctcgtgtagccttcatttgtcctagagatgtccatcgacccccgacttcgtccatctccatccgtgtacttttgtttataaccagactgagccacaaactaagccttacccactagacatgtggaagtacggtagtgcttttcaacagaggcccgaagaccggtccttatgtggccgaggtgctactagcaaaaccatgcaccccgagcccagcctaaaatcattttgagggttttgaatagagggggagatgtgcgtccaattccacaataatccaaccattccatagtgtccaagtgatatgaatattcccaaagtctagagttataaaaccacctaatgttgcctaaataattagcgaagcatctacctaaattcatactagtggaaccatgaaaagagtacccactagttggggtttggtttattctagggtgaacaaggtaataataacaatagcaataataataaggtcataacaaaggtaaataggcatggctaaataaaacagtgataacatgggaatttaaataaagcgataatgcattaatttaaatcaaaataatttcacaaagtgggatccaatatgttcaaagatgatgtgacttgccttgctcagagagaatggcctgctgaaccttcggcgacgaccgcgaaccacgcttcgagaacctccggaacgacagaagctacgcgaagcacaccagcaaagctaaaccctataaagaagcaataacaatacataaaaagaaagcacagggttctttaggttataacaaacattaggagacttgaacgggtcgattcagagttcgtatgaccaagatatgatcatccgaagtttaatgctgttatatagagatttgcggattattataattaggtttttcaactataaaacatgtgtaagcgctagcctggaaaagacaggaaggctgcgctgttgacatgcggaccccacatgtcaacctaaaggactgcggtagaccgagtacacagagacggtccacgggtcgacggaagcggaccccgtgtgtcaaccgaggcgagtggccgacaaacggactccactagacaccacgcgggctgcacatgtggaaacaacgcggctaccgagcgggcacactaacacggacactacacggtcaccacccgcacacgtgaacgactaccgacaccggtacacaggtaccagggtcaacaaccgcacaacgggtacggggcgacaccgaaaggacgaggacagggcagcaagaggagagatccttaccaccacgcgacgaggcgtgggaacgacaacgacgaacgggcgcggcggagacggccgggaacgtcggagacgaacggcgaggggacgacttcggcggcgatccttggacgaagttgcgacgcggccggcacgaggcttgacgacgcggagccgaggacaaagacgatgacggggctgcagcggctcacttgacggaacgcggacgacgaacgcgaacggcttgacggagggacgaacgccacgacgatgaggacgacgagaggaggacgacgacgacgacgactggggccggcgaggaggcgacgagggcagccggtagcggctgcacggagacgaggacggcgcggaacacgccgttacgatgatgacgagggaggcggcgccgcgagacgacgagccggcgaggaggagcggccgaccgaagggacgtcggcgacgacgaggatggagaggaggcgatgccgcggacgacgtcaccggctcgccgctgcgatgccggaggtggtggtggcgcggccgacggcgcacgggtggaggaagggccgaccggggaaattccggcgaggtggatggagaggccggcgcggcacgacggtgttccggcgaaaccgaggagtggctggggaaggagacgatgccacggtatcgaaggagacggcggcgtcgatcggcataccagcgacgaacaggagccggccggagacagcacagtggcgccaacaccactggttgccggcgggggcacgccttcgggggtctccgcgggaaacggagggcaggccgggaaaggggaggcgactgcgacaccgagggaggcgacggcacgggcgaccggcgcgcgggcgaggcggaaggggcgactggagatggccagcggcacgggagagagaggaggacggtggggagaggtggtgcggccacgggagagcgcgggagggggctaaaacgatagaacgcaaagagtgggttccattttataggggaggagagggagccagccacgggagaggcagggaacggcggcggaatttgtggccggcggcaatggaaggtggccggggttggcgcgtccgttcccggcgattgggggcacgattcaagggggaaattagggggaattgatgaggaatcaatgaggattaaaaccccctaatcaatttggaaatagccggcttgaatggggcggatttggaggaggaacggcgctaggttttgcacgggagagagaagaggccgagcgggaggaggaagacgcgcctggcaggcgggtcccacgcggggcacgcggtcagcgcgcgtgcggcgcgcgtgaggggggggccggctcgggaggctgggtggggcggcttgggccgggaggcggcccaggcgggaggggaggaaaagggagctgggccgaggggaaggggaggcccaagagaaggagggagagaaggagagggagagaaagagaggactttggccgcaggccgagagagagagggggaggactttgggccagacttggcccaaagggaggaaggaggatttatttttagtttttattttcagtaaactttgttaattgttgttgttgcttaataaatattttcggtgctctgaaaattcaagtaaaatttgagggctccttttagaccaaggagaatttaacaaaaatctccggactacattcgaatttttcttgtatgtattttagtgtttaccaatttcttttcgaattttaattaattctattattccttttagagaatgatttttaattttgggatgaatttatcaggacgtgacacgccacccttttctattttcattatttcgacgagttcttgcttttgagttggactgcatcggtttcgttctccgacgaaaaggtaaagcttgttatggtagcttgcgttctcgggattagtgcttacatctctatgacactctaatcctgtttatgtaaatcgtcgaattatcatatatgctatataatctagatcgatattgctatctaacctcatcggctagcctctattgtcgaaaactgccgatagggttagatactgacttcgaattagattatatagtatatctatcatcatgaaaagtttgtcatcagcttgtttagatcttatgtttctctctgtgcttaatgctgcattagttaagtttgatttattaagtaatatttagaaccataatatctagcttgtttgatgattgctaatttaaatagcatcggagtttcagccgatcttacctgatttagttatcttgttccttatatgttacttgatatgctaaatctgtcctttatattgagatctaacttcgatgaaatatattaagcctattatcagtctgttaggttatcctgatgttagattgattcctgtttagtatatttcatctatattaatatcttagtataaagtagtatcggagtaatagccgatacatgttagatttgctttatcggctatgctatgaatatatataatttttaatttaaagtaattttagacataagtgatttatactgtctcggcatgctgtccgatctatagcaatcacttggtttaaacatatttcgatgtatagattatatattattgatatctacaaccaatcaggtagatctaactatttccatgatttatatttcatttgacgatcttatacatgttgcatcgacttaatattgaacgatacgtcatcggctatcgttgatatatttaaatttgcttctctttgtctattgttagttgtaggatcaaccaactggcacgccttgaacccgaaagcaaatctttggacctgcactagagtaaagcaaatctctcaggccagtgtgtgtttttcgcatcgacagtctcatactaaataatatgacttaatgaactagtgtagttcaggtggtttggttgggccggttgcaacgtggtttagcgttgggcagtgatatttaatattgcttaactatatctactattttattgtattcaaactatgttttataaatgctacttttatgcaaatatcctatagcctttcatttgtgaatatcttgcaccatacctttccattggtatgacttgttgagtacagtggttggtactcagtcttactttatttttctccaatcccagagacaaagaattattcaaatggagaatattttgaggattaggcttgatctggatattgaggatgcctgtggatttggaagaagctacgtttttgttgagaagatcttcgttttgagttttcttttattttattccgctgcatttgtaagacttatttattacttttgtaagatgtggatctgtgtatcagtttgtcatttgtgtactctggttggtcctggacatagatttttctacacattctgcttgaaattcgggttagcgaatttctgggcgtgacaagagggcacttcaaatcctagcctttccactccttttataggctcaagggtggttgaaaccctaactcagccgaaatctgagccgttcattgatccttaccttttaaggaaacatcggagatttcacctatccttttataggcttaagggtggccactgaaaccctaactcaaccgaaatctgagccgttcgttgatccttacctcttaaggaaatatctgagatttcagccacgtagttggccacagatccaatctcccacagagaatccacaccgatccacgcgcactcttccgtgcagcccaattcgcagctgccacgtatcctggcttctccgcgcgctcgtcagccctggcccacctaacagtgagacaaagcggcgacctccccgtgctcgttccatctgtggcaccgcaatctagagtgacttcctccgcgccaatcacgagcctgtattttatatatacaaactttacatgaataaattcgataagaatttaatttataaaatttcaaaaccaacacaaattgcttatatggtcagcaaggcccatgtgcatggattctcccctcccttgtatttggcatggtcaaaaaggcaaagaagatgggctatgcccgaaatggaaacaaggcaaaaaatggaaattttgaccaatcactggtggagaaaccatctttggtcggtcggccgaaatccacaatagttccgaatccatttaaaaccgggactaaagatgatctttagtcccggttagtggctacaacgggcatatgagatctttagtcccggttggtaacaccaactgggattaaagatcatctttagttccggttgtagagatgtcagacgttgtcagggcccccgggatctttagtc

SEQ ID NO: 29696 - DNA, 4235 bp, Oryza sativa
ctaaagatcccccctttatatatgccttcttcctcctccagctcgagagcaagcttcaaaatttctcaaagaaagaggggaggtcatgccaaaatttcttgtgaaatttttttagtgattatatacaaatcggaggtgtctaaaaggttagtaacttcatcctccaatgtttttgttgttatattacttttggagctatgtttcacacattttttttgtctccaaaactttgttgtaagttgatgagagagaaaatttgtgtggggaagaagaatatatagaaattttattctcatagattaaaatatgatgaaaattaatcttaaaaaatagaaaacaaactaaattgaaaattaagataagtacaacattaatattagtttagatcttcaaaaattgttaataagaattgcttgtcgaaagagtttttaattattttatcattactgtttgactgtcattattgtacgaaaatttatttatgtacgattttttttcatttcatgtagatggatcggcaatggatgtacgctgaccggcggtccaaagagtttatcgagggcgtgcattatttttttagagtggccgaagataacaagcgtaacggttttatttgttgtccatgcaacaagtgtaagaaccagaagaagtattctgcatccaggactattcatttccacttgtttgagtcggggttcatgccaagctataattgtttgagtcggggttcatgccaagctataattgttggataccactctggagttcttgcaatggaaggcaaaaggtggtgttagtgacaaggcatttggcgatttattgaaacttgtcaagaacattcttccggagggaaacaaattgcctgagacaacgtatgaggctaagaagatagtctgccctctaggactagaagttcagaagattcacgcatgtccgaatgattgtatcctatatcgtggtgaggagtacgagaacctagaagcatgccctgtttgtaaagcactacgatacaagattagacgagaggatccatgtgtagttgacgggcagccaacaaagaagagaattcctgctaagatgatgtggtatttccctataataccatggctaaggcgtttgttcaggaacaaggggaatactagaatgatgcgttggcacgctgaagaacgtcaacaggacaggatgttgagacaccccgccgatggttcgctgtggcaaaacatcgacagaaaatttaaagactttggaaaggacgcacgaaacatacggtttggtttaagtacggatggcatgaatccttttggagagatgagcagcggccatagcacttggcccgttacgatgtgtatctacatcctccccccttggctatgcatgaagaggaagtacataatgatgccgattattattcaaggccccaagcaacctggtaacgacatcgatgtgtacctaagaccattggtcgatgatcttaaactgttgtggaaaaaggaaggtgtccccgtgtgggacgaggacaaacaggaggagtttaacctatgagcgctgttgttcgtaaccatcaacgattggcctgcacttagcaacctttccgggcagtccaacaaggggtacaaggcttgcactcactgtatggataaaacataaagtatgtatcttaagcactgtacatgggtcatcgtcgattccttgctgcaaaccactcggttcggaagaaaggcaagcactttgaacataaggcggaccaccgtatgaagcctaaacatcgcagcgggaaaaaaatgtttgctatggttaatgatctgaaagtagtgtttggaatggggcctggaagccagcctataaagagcgaagatggtcacgcggcgatgtggaaaaagaactctatattttgggagttaccctattgggaattcttggacgtccgccacgcaatcgacgtgatgcacctcactaagaacctttgcgtaaaccttattggcttcctaggtgtatatggaaagtcgaagatacactggaagcacgtaatgatctgaagcatatggaacaacgtggcgaccttcacccggaaccaaaggagaaaggaagccattacttgagtccagccagctacactcttagcaaggcagagaaggaaagtatgtttgaatgcttggagagcataaaggtaccatctggatactccacaaatataaagcgaataataagcacgaaggagaagaagttcacaaacctaatgtctcataactgtcacgtgttgatgacacaactgctaccagttgtaataaggggtatccttccagacaatgtccgggcaacaataacaaagctaggtgctttcatgaacgcaatttcgcagaaggtcatcgatccggatagattagaagcccttcagaatgatgtggtgcaatgtcttgtcagttttgagttgatatttccaccttcatttttcaatataatgacgcatctgctttgtcaccttgtcaaagagattggtattctcgagcctgtgtacctacacaacatgtttcctttcgagaggtacatgggcgttttgaagaagtatgttcgttaccgtgctcgtccagaggcaagcatcgccaaggggtatggaacagaggaggtcatcgacttctgtgtagaatttattgaagaccttcgcccaatcggggtacctgaatcacgccatgaagggagactacggggaaaggggactctcggatggaaagcaataatgacggtagacaacaatttattccgtaaagcccatttcacggttctacaacaatcttcattggtggctccttacatcgaggagcacttggctccaattcgcgccagaaacatcggtaagtccgatgcatggattacacggcatcacattgatactttccctgcgtggctacgacaacatctcatgggtaacgagacgattaaccaataactggccttcctggcgaggggaccatttggctcgatcaagacattccagggatatgagatcaatgggtacacattctacacgagagcccaagacatgaagagcacgaaccaaaacagggatgttcgtatcaatgccatgggacacgatggaacaactggcacgtattatggtgccatcgaggacatatgggaacttgactatggtcttctcaaggtccctctgttccggtgccaaagggttaggtttactggtggaggcgtaacgattgatgacagtgcaatgacaacggttgaccttaacaaggttggatactcggacgaaccttttgtccttgccaatgatgtaacgcaagtcttttacgtgaaggacatgtctagcaaaggaaagaagagcaaagggcctgacgagtcgaagcgccatgtggttctcccaggcaaaagaaaaatcgtaggagtagaggacaagactgacgaggattacgatcagttggatgggcaaccccctttcacggtgacgattgaccctagcatcctcctatcaaatgaagacaccccttactcacgtagcgatcacaaggaaggaacaacagtgaggagaaagtacgtgcggtcaaccgtcaccgccaatgtattgtcgtaattattgtgtacacgatgtaaactattttagatgtattgaatatccctataaatcaattgttgtatggcatatgttaattatgtatgtttattagatttttcaacaattttaaatcatgcatatgctaattatatatgattattagaatttttaacaagtttaaatcattcatgtggtatttacgtatgttaattagaatttttaacaattttaaatcatgcatatgctatttatatatgattattagaatttttattaattttaaatcatgcatgtggtatttacatatgttaattagaatttttaacaatttaatatcatgcatatgctaattatatatgattattcgaatttttaacaaatttaaatcattcatgtgcttattacgtattatccacttaatttactacagacaacaataatttttcaaaataattgtcattaattttttgactttaaacaattttaatgcattatttactattttagaaacacatatgtaatgaaattcaatattcagtgctattatctgtagtcccggttcttaacactaaccgggtttaaaaagaatttgaaaatagcaggaaaatatctttagtcccggttggtgagaacaaccgggactaaatatatctttactcccgattcgtaa

SEQ ID NO: 29697 - DNA, 6410 bp, Oryza sativa
ccgggactaaagatctaggggcatatatattccccatgcgcgcccttgtcttctccaccaacacttaaaagtttttttccccgatctcggcttctccttcgccgccactgcctagggcatccccgcgccgacgccgccgtcgtatctcgccatcgtctcgcgggcgtcgtcgtcgccgccttcgccgccgccgcatctctagggtgagccgccgccgcctccctctctctcttgacctcgatctctctctctctctccaaaccgccgccgcctcgttgccgacgccgcagccgacgtcgacgcggccgaccccgactccgcctcccgtcgatgccggccccgacctcgatgcagccgccaccgccgacgatgtcacgctggccctgccgacgacgccgacgccactgccacgccgccgtgccacgcccccaggccacgccacgccgccgcaacgcgacgccaccgctgcgacacgccgccgccgcgccgccgccgtgccacgccaatgccgcgccgccacgccgccgctccgctgctgccactgccgccccgtcagtgaacgaaacgtgaacgaacgtacgtgaacgaaacgtgaacttaacgagaacgcgaacgtgaacgaaacgtgaacttaacgtgaacgcgaacattaacgaacgtgaacgaaacgcgaacttgaacaaaatttaatgaaatgcgaacgaacgtgaatgaaacgtgaatgaaacgtgaaagaacgtgaatgaaacatgaacgaaacgttaatgaacgtgaacgaaacgtgaacaaacgtgaatgaaacgcgaacgaacgtgaacgaaacgtgaatgaaacgtgaactaacatgaatgaaatatgaacggtcgcctttacgacactacgtgaaatacaatatatgttactttgcgtttagactaatacatttttttgtatgttgcagaaaagacgtcgtcgtcgtcgtccctcaagccggagtggtagctagccctcgaaggaattcgcgcaggcaagtgatgtaaagatatgattgttagatttttaatataatttaagattattagattattagacttactaaatgtgagtgttagagattattattagagttttagacttagcataggtgagttagcatatatgattatttgagttctaatatacgacacttagacttagcatatatgattgttagaatttataagattattagatttttaatataggactaataatataagactattagatttttaatataagattattagagttttaatacaaggttattagagttttaatataagattattagatttgtaattagacttagcatatatgattatctagggttctaatatacgacacttagatttagcatatatgattgttagagttttaatagaagattagtacaattttaatgattatctagggttctaatatacgacacttagacttagcatatatgattgttaaagaaaatgtgacctatagacttagcaaatatttcttgtatgaacagatggctgatcgcgatgaggaacagatattgtacgatacaatcgcaaagggaaacagccagtactggaacgaagaagaggggaacgaggatccaaatcagtacttgaacgaggaagggaacgtggagagggatgcggagaggaacgaggaggggaatgtggagagggatgcggaggggaacgaggaggaggaggctagtggaagtcaaccctccgctggacagaagagggcacgcggacaatgaggtgccgcgaagaagctacagggtcgacacatcataacggaagtggacgaagacggccgacctagtgccccagcagaagcagccaagaactacgtacgatacagcggttgggttgtgcaggataacgtgcctgttagtacggtgtactggcgcagaacaagggcacgcggagatcatgagagctttgtcccagattcggagaaagagatgctgtggaccacaatgctcgagacattcacccttcccgcgggtacagagaacatagtgaaaaggtggactctaaagaaaatggcagacaatttcagaacttcaagggagatctgtaccagaaatacatcctgaaggggcagacaccaaacttcaacacattcccgaagctaagggatcactgggacgaattcgttgcttacaagacaagtcaacaaggggaggcgatgatggaaagaaacaaagaaaatgccgccaagaagaagtaccatcaccacttggggtcaggcggctatagcgtcacgatgccaaagtgggaggagatggaggcaagcttgcttgagaggggtatcgaaccggccaccgcttaatggccggatcgatcgaagttctgttactatgctcacggtggaacgttcaacccagtggatggctccctggtctttagcgatcagatacgcgagggtgcgagtcgactaacggacgcagtggaagcctcttctcagggcacgttccgacccgacagagagaaggacgagctgtcactcgccctgcagactcccgagcatccaggacgaacacgagggaaaggggtgattccttggaagattggattcaaggaggacatccacacgtacaggagtcagatgaggagcaagagagatatcgaggcgaagattgcagatcttgagtacagggtatcgagctatgagctcagcatgcaagaggaggtggcaaggaaggtggatgaacgcatggccgcacatcggtcccaggatccccagccgtacattcctcctgcaatggtcagcccatcaggcaatcgtagcagctgcgcctcaacggggcaggtaggatcactcagcggacaccatgtgagctgcatattcccttcaagaacttatcaatcaaggtaagctcgtagtttatagattttagacttgtccattccgcaagttgctgcttatatatgttgattactaatagataatctctcaccaaatgaaggtggcgtcgggcatgaccatcccaacggaaccttcagggacttccactgcaggccgattccagcaggatactccaaggtcgaagttgagtttgtggaagccgcgtatgaggacctctagttggactaccctggaggagacggtgagacgcatctacgagacacaagccacgccattatactatggcgcaagtggtacatcatcctccctgggctacaagcggcgtctcgtgcaccatctcctcctcaggctcctgcaccgtctcctcctcatgctctagcaccatctccacctcaggctcctgcaccgactccttctcaggctcctacaccgactcctcctcaagctcctcgtctggtaccttccaaagtcaagggccccccaagctccaccgcctgcccccacaagggcaacgaagaaggcgaaagttgacgccaccaaaaataaggacccagggtacgattgcacgcaagaggagcttgacgcttatgtggcatcagaagtcaggagacaattgaagcctcgaagtccagaaaagaagattcctatagacctgagtgttaggaacttcttcaagagtatgtctgcacctgccaaggaggccataaagctatcggactatgggcgaacacttaagaaagcatattctgcaaagtccaaaccagtccctcagcttggagagcaaccaaaccaggaggtcgagccgttggtgaccggtgaagaaattggaataaaagaatttatttctgacaccgggctaactacggatcaattgctacgaggcgcaccaatcccaaaggcggaagtgaaatacaagtacgaactcggtaaaccgcttgtcaagcctgagcaactgcagtccctatagacacagatgtacaaattccatcaactgtacatggaaatgagcgccaccggtagagagatgatcagagcgaggatcgacgtctctattatgagttgttggattttgtaagtatcgttcagttagatttcttattacgtttccattaattaattaggtccttgtatataagtacaccatatataatatatacttccttttatcgctgtagaatggagattcaaagggcccgacggcggggggttttcgatactggtttcatcgaccctcggaaaataaacatcgcaatgatcgacaagtatccgcaagccacagaggacaatctcgtccatctcctgaaggcgcaacattacaagatgttcatactattgccgtacaacacacaattagtttttactgtcttcctaccaaatttcattcccgtacgtacatgctaagtgtttcatatgtcatgcatccgacgcacattgcagattccacggggtccttttactcttcgacttggaggcctgcgtagtcattgtatatgactcaatggataaaaaagagtctacgtttgaccaggtttttaaacatatagacaggtaatgtcataagttccaatgttatttctaattttgatataattaattgctactacgaatcatagctttaaactccacgtagggcttggtatcggttccgtcatttggtccgcggcaattggaaagaaaaacttaggcggaagtttaaatttcatgtgagtacacatgcattacatttatattgaatctccaattcaaatacaagcatatatttattagatctctcaccgtttgtcatgtatatatagtgcgcaaagcaagaccagggaactaacttgtgcggctactacgtgtgcgagtattgccactgccttgtagaccaaatcatcaccacaagagagctcaatgtacgtacaaataaattcaaaatttcattgcgtacgtatcgatttgttgtttactaattaatttcatatattcataggttatttgcatgagggataacctcacacacaaggaatttatcccggcggttcaagaacaactcatgtgattcatcaacgaacaagtccttgatcccgagggtgaattctactacgatggaaatacaattcatagctcattagcttctgagataacgactactacgtcgaaatcgtagctagctaggacataatgaattgtaattaatacatgtctatttttctatatgtacacatttactttagtgtaaatatatattttggtcatatatatgcacataaaatgttagtgctttaatatatatatatgcatttgcatacatatatgtataaatacatatatattatgcatgtatatgtattgaaacatataatatatatatatatatatacatatatataatatacatatatacttgtataatataatataatatatatatatatatatatatatatatatatatcatgcagcaacagggccatgcaaataaaaaaaaagggcagctcgatctttagtccagaactacagggggttacgaaccgagactaataagggtttctccaccagtgaatcgtgctcgtgaacagtcaacgaccgctcgcccattagctttctcctcctctctgattgcctcgactagactctcacatcgccgccctggagatatgcgtgttgcactgtgttttgctcgcgtgatgtcgattcgggatggcagctgtcacagccctagtgtatttttttctctcaagctatttgatgctttgactttctttctagggtgcatgattttttttctattcatcagtagtgcatgctgcatcaaattgaaccaaaactacactttaatcggtatgttgggaaaactgttaaatgtgcacaaaatttcatagcagtttagagatgttttaatttattcaaacaaattaatcaggtttgaaccctgtaagattcaaacaaatctcagcctgcgatgtattttattattatgtactaaaagtccattaaacttcttcaaaacactctcacgtcgccacttggcgctctaataaattagtgaaagtactcctagtaattctaagcaaaaggcaaaacatcaagccattgatttttatttaaactagtgaacacataattttgcatcgttagattagattaatctccggggcccctctcctaccaaagccctctctaggaacctgcggcacatagctgccacctcctgtacgcccctatttctttttcttttcctttttattggttgttaagatatttaatggcctattttatatagaaacttaaataaattcacacttctctttttttaacgtgaaggatgagatcggactatgcaccgcttgcatccatgcacttggcatgcatttgtggtttatactttttgagttggtccttttaaaaataaataaacagtatttttagtggttacagcttttaaattgtatataaccaatttgtgatcgatttgaaccattcggtatttctttacttaaacgatttcagctgcattgaactatatttcagaatacaagacaaatatt

SEQ ID NO: 29698 - DNA, 25483 bp, Oryza sativa
ggaaaaaggggcgatcaattccggtcaaaccggcggatcaactccgatcaaaccgatcgacattgatttgagggtaacttttaattccgctataaatttggtttttggtactataaccattcaccgccttttttttgttggcttagttattgctgtttgatcctacaaacacctggtgacagcttgccctcacaaaatacaagatttcgtgaccaggtgacagaaatttgatgatttgatgactgaatgctgtcaccaaatctctttgtgaccgcctttgggcttttggtgatggtgaggggtagtcgccaaaaaaccattctctggtagtgaacgacgtactatactatacctaccgtttgatgtttcaacgagcacactttgatttttttatgggcgaaccggcgaagtcaaacgtgtgaacatgtgagctagtcatcccagtatatgcatgatcacaaattcaactgctgagcaacctctaccacttggaaggtagaattcaaagtgtgaacaatttcgtcgcatacaacgtccacaccatatacagactacatcaatattgtaggagatgaacaaatttcgtcgcaataaaacgtgggaacatgtgacctagtcacctagaattaatcccagtatatgcatgaccacaactactgagcaacctctatccacttggaaggtagaaggttcagcgttgtactatgctacacttgttatagctagttgccagtagtatattaattattgtatgagttgctgatcgtgtaacttctgtagtacgttacgactgtcatggtgtatatataaagatcgagaggggataattgtatttcaacaaatacaacatacgacccagcgtgcatccaagtatgatcagggtgctgatcctcctcaccctaggcttcctagaagcaattgctgagaaaccagcagcacagcagccgacggaactccaaggctgccccgcccccgatatgtgcggcaacatcaccataccccatcccttcggcatcaaacctggctgctacctcgccggcttcgaggtcatctgcgaccgcacgttcaacccgccgcgagccttcctcgcaggcgacccgccattgttcggcgacaagttgccgccgaacgttaatagcagtaaaccattcacggtgacggccaatttctactactctggcacagatgcaggcatgcccagcgaaatggtcaactacacccgagggcctctcgagctcctcgacatctcggttaatcagagcaagctacgtgtttatgcagccatcaactccgactgcagcacgaatgaaacacaccatatcctatttgagcagtcaatcaagcttcagccgtcaggtccattcaccctgtcggcaaatgataattccctagttggcgtcggccaaaacgtcatcgcgatgttcgcggattcatacgccggagaagaatactcgacgatttgcctgtctttcctcagttcagtgtccaaggcgaggaatggaccgtgcgagaatgccacggggcttggctgctgccagcagacactgcctcctggcgtcaacacgactcttgtgagattccagcacaggaacaacagcaagtggagaacctatccatgctcatatgccatgctggtggagaagtcatggtacaatttctctacagaagatctgtttgagtaccctgcttttcccaacaagtaccccaggggtgtactaccggacaagtatcctacgggtgtaccccttgtgcttgactttgctatcaggaatgggtcctgcccacaggaaaatcgtggcccacctggaaaagactatgcttgtgtcagcggcaacagctcttgcctcgatgcaggaaagggccgaggatataaatgcgagtgcaaagagggctacaatggtaatccttatatgcctaatggatgccaaggtatgcatacgacactacttctctctccatcttacaatagctattgttttaggttatttagcacagagtagtatttgattaaaaaatgactaatacctcttattagatgatgtatggttataactgggtaagtggttaaggctagaacttgaagagatttaaatgagaggtgattgatgggttaagtaatacactattatgataattatcttaggataaattttaaatccatataattattttgggaaggagacagtagtaaacatgacagctagctcatcacatgcacagttaattttaaataattttgctatctatttatcgacataaattcagaaataatttagcggatttttgaccgctaattagattttcttcaagattcatgcaacaggcactcctactgaaccccctacaggtgacggctcataggtgtcggttcaattggaactagcttgcacaaaaaaccatcacctatagtttagttgttggttcttaacctaaaaccggcacatatagttaggaatagctgtcagttatttaggcacctatacggaggaaagtataggtactgattccagctccaaaatcagacctataatatattataggtattaggtttttctaagaaatgggtaaccatacaaaaccatccaagctgaataaccgatacccatccatcattatattccacaccaccgcacgccacaccgtatccatccatcctcatccccacaccacacaggctccttgcctccatcgcatgcttctcgcccacctgcgtgcttcccccatccacctccccgtctgctagctagtctacctcctcatcgatccccctcccctgatgcgttggtctacgcaggccgctgtggccacacagcggtctacctcctgtggccgctgctagccacggcgacggtggtagctgggtagcccttccgcatgaagcagcggtgtgatgaggagcagtgcctcaaggtggcgcgcgggcatgtgaagtgcttcgatgaggacccgcgtcaccgtctacgatgtctccgagctcgatgtttgcacctgtcctcgtcctccccttccggtcaccatgctcccctctaccaccatctcattggcgcccacgcagaggactgaggcaaaatgggagcacgagatggagatggaggcagtggtggtggctagaagcgacgcgtagggccaacagcagcactgctgttggtggcagtatggctgtgggccgtctccttcctcgatctcgctccccttgtgcccccgcccctgctctatctgcgttcacggtcacgttcttcgagatcactaggagggctgccatgtcggggcgggaagcggtcgtcctcgaaagaggcacagtgatgagttgtgcaagaacgctggcgtcatcatcccgtgacaactctgtcggtggtccaggtacgccgactgctctgcgcgtctcgactcactctcccccctcctctctgtcctccccctcctctgggcagcggtagcgtcttcctactagagctccacctgacagcagtggcacctcccctagcccatatttttttataattctgaagattattggtgttggttatatatattgaactgccacatggaatctctataggtgctggttctacaaacgacacctatgcggttgggtaaaggtgccggcaaagtgatgccggctgggaaaccgacacctatagtaaggggagcccgattacaagcgaattatacaatagttaaatgcgagttaattataatgaagtacacttataattatactgtatttgtattgagagacaatttgtggataaatggatggatggctcttttcagcctccggactatgggcatttggcctaactgtttgtatagagtatagatatatagtccctagtttaatacgaagagtacatagcttataacttaaacaatctcgatcataaatatatatatgattggaactaatcctaccataccataacaactggattagtaacgttggatgctcacatgctataacaaataacgacggtcctttgtaccgtaacatattctcttctatgtacacaagctttctatgcacactggtgcacatcaactagcaaatgttacgaaaaattctaaaacaaattaaacatttattcttaatatattatacatatatgcaaagtcttgtattcaaatttattataatttagccgtaacaaaaaaagtgaaaaatctgacagttttgagggtaaaaataatctgccagaattttatctttttaaggctaaaatataatgaatttgaagatgagaattcacacgtaggtgtagaactattagaaatatgtgtccaatttttttagaattttctgtgacatttgctagttggtgtacactttatatacacgggaagcatacgtgcatacgatatgttcccaatgaagtaggaggagtaccaaactctacacgttaatgtttttgatgtttttgaactatcatgtatgggcttaggctgagttctaaattctaaacgttaattggcaactttcttgttttccattaccacattttccacataaaagttttattagaaaattcgaataaattagttaatttatgatacgctaattagccaagccattgtacgtgccgctaataagctcaaccaaatctcagtatacaactacacaaaaactcattggtaccggttccaaagaccttataggtgccggttttgggcccagcaccaattggtcgacacatattcctaaaattataggtgccggtaaatcactaataaccggcacctatgagacatatgcgaaacaaaaaaatgcccgccggccgccacctcgctttccaccaccctagcaatcaccagaatatgagaaaacaaagtcaaaatcaaaccaaaaggggatgaagaggaagaggaggagaaggagaagcgggaaaggaaatgtaccgccttcctcaccaccgacggccatactggctgctgtctttgttgacagcgaccaaaccgtcgacctcgtccacccctccctcggagtccgcaaactgcacgctgttgtcgccgaccgggtgagccttgtaccacagcagatcttggcctcgctcgcgcgcccccgccgcgcgcgccgcgtcccccacaacgaggggactgacctcaccgccaccatcgcgcgcgagggcttcgacagctacgtcctcgccgtcctccgccgctcccaccgcgagtgccgcggtggccgctcccgccccgggaagaaggcggtggctgcgacagcgggggaccgagcccggcatcctgaagcgcctccccccgatggatctggcctccctggcctcgaccccctcgcaggcggcggtgcgagctagataagtgaacgtgagtggacacgagggatggataaggttgaggcgtgacgaggagataaggctgaggatgcgaggtggcaacgtgcgctgtgcggctcggctccggccagtttttttataggtgccttttttcgaaggaaccgacaactatggctactattataaaaattaaaattaaagatgtttttctgatactttgttatgtcattcttatttgagtcggtttttaagtttattcaatttcggaaatacagatgcatgtttgagtcaatttttaagttcgttcgttttacgaaatacataaggagttgtataagaaatctctttaaaaatactcgcatgctaatttgagttgatcggactcctaattgcagctcttgattttgtaaacaaaaatatacaagcgaattccagcaatcaatttcacctaagctaaactgtagcacagtaataacattaaaatagccttcacccgttgcaatgcacgaatatttttttctagtatataaaaaaaccaacatctataatattagtaccttttttcactagaaccgacacttataatgtaagtataggtgctggttcttttaaaaaatcagtacctctactatttgtacctatagttcttaaagatgccggttcttatttttttcatcgtgcggaggtagaaatatgccgataggtgtcggttttaaatgaaccggcacctataagactggtgcctacgagggttttgtagtagtggtatcgaatggggtagtgacaatagcctagcctacattaaacaatatattcgaaaaccaaagaacttattatccggttaatattccttttaaaaatataaattatcctatggataactcagtgtatattaacacgtataattcttactttgcagatatagatgagtgcgctcttccgggtattatgagcaattgctcctttaatagcgtatgcgtaaacagaccaggaggctttgattgtccatgcaaacgaggaatgacgggcgacggcaaaagaggaacatgcaccgagaatttcccaccagcagcaaaagccgctgtcggtaagctagtcggcacgcatttaaatttggatttaactaataataagtcatcaacttgttctttcataggctagagtgttgcataatatttgtttgctctaataattcacaaaaaaagttgataccaaattcggaagatgattgttgtcagtctttttctacatttcaatcttgaatttcataagttaaaatgttccccaagacctagtcatcttaaaacaagctaccggtgtttcaggaatatacaagtgtcaactccttctgcaaacatgttggaatttctcctcataatatcatttatgtcctttgttatgaaatttaaaatcttacagagaaacataatatataagtcataattttatcctcatgtggattctgaaaaaaagttcaatctagctagagatattcattttgcttttatcttgcatatatagtattattgacgacttgactggtatgttaattaaggattgctgaactgtcaaataaaattgtttaattactaatgctgacctattttccaatctcacgtgcaggcctttcttccttcattgttttcatcgtcctaatttttatggtgaaacaacacctaaaacttaagaagttctacgaacaaaatggtggtccggtattgaaaggtgtgagaaatataaagatctacacaaagaaagaactgaaacaaataacgagtaactatagcagcgacattggagaaggagcctctggtaaagtttatatggggactcttaagggcggacaacaagtggctataaagaagtccaaaaaagttgatgaagaaagaaaaagtgaattcactcaagaggtcatactccaatctgaaatgaagcacaagaatataatccagctctttggttgttgccttgaagttgatgttcctatgttagtgtatgagtttaccgtgaaaggaagtttacatgatgtcctcttcaaatgtgatgagaatatgaaagggaatttacatgacgttctacccaaatacaatgataacaagaaagggaaagggaaagggaaagggaaagtacacgacgcactcgttgaatgtgatggtaacaaaaatgtgagtttgcatgatgtcctcttcaaatgcggggataaaattgcaatagatacacttctggagatcgctattggatcagctgaaggactaacttatatgcatacagcacgggagactcccatccgtcatggtgatctcaaatctggtaatatacttatagacaataatttcgtccctaaaatttcagactttggaacatcaagatcactggttgcaggtcataaatttaggcctgataaattcattcctgcggacatgaattatatagatccagtatatatggaagatggaatgctcacggagaaaagtgacatctatagctttggaattgttcttattgaacttgttacaaggaagcccgcaaaatatgatgacgacaggagctatgttcgaaacttcattcaggcctaccttgataaaagagaaagggaaaaatgccataaagagattacaccagatgtggaaattaatattcttgaaatggttagtgaagttgctgtggcatgtttagaacctgtccaggataaacgccctgatatgatagaagtagaacggcagctccatcgaattagacacattgcaggccaaaggatagaggaaaaaaaagaggaatttcaacgtgcattccctagaacgggatcggttatctcaaacgggtttaaagcctcgtctctttcaggtagggtccctgtcactaagcaaaggtcactaatgtgagaacatatctcaatcaggcacaaggccgtcacggatgaaagtcatctcaatcaagccaacaacaaagcccgtcacagataagattgaccaagcaacccgagtcaaaccaggcaaggaaagagcccgtcacggatgaccaatcttaatcgggcacactactaagcccgtcacggatgactagtcatctcaatcgggcattaagggaaaggccgtcaccgacaggttgacccacttgttgagtcaaaatagtcacgggccggaggaattatctctatcgggcttatagtaatagcccatcacagatgactatatctctatcggtctttgttggagcctatcacagatggctctatctcttttgggcctagttgaaatgcccatcagagatgagtatatcagcaaaaaaaataaaatttgttttttttgctagactcaggcttttgctagtcatgcctgctgcaaaaatgatagaagcaatatgtatagtcccattcccagcatccattcacatattccatcacaacattgacatattccataacaccattcacatattcacatatttgcatcccattcacaaaatcaaacatatgcacattcacatccacaaacccattcacatatatatgtcattcacatcctatgtgctctacaaaccgccgatatgcatcaaaacctgcaaaaccgagttataaatttgaataagtttatatgtaattttaaatgcaaaaatttacataacatcgtggcaaattgtattagaaagaatatttacataaatccaatgttagtcgcaagcattgtaaatgttcaaccattcagagacgagctagctagaccttaactttaaatattccttgggctgacaagatatcatctagtatgaatcgtgctatttcctctctaatgatatcgatgttgttttccgggatccttgaaagtttttcctgcatgtaaggcgccaagttagtatatatacttggaaagttgtcgtcctatgtctatagtaatcaattgaagcacacacctcaaggtcgagcaatgtcaccttgtctgcgaagctcctcatgttatggctgtaacaccccaggtaaccatgtacctagagtgccacaccaaaataaactcaaaccactaactcccaaaattattagaaatttcggcagaatcttccctgtaaatacgaacatcaacgacaggcaattataagttaaactaataacaatatccttcccacaatacgatccatccttataatccatggggaagaaactattagaaatctaaaacattattacaagaccgaacgatgatatagtttaagtatcattatggacctaggcaatatagtttgatattgtgcagataaatgtgtatataagggtgctacttcccgcccatgcatgtcggtctcaatatgtacctaaaaccaaataaaacacaagagtgagtttaaaaatactcagcaaagtacaatatggaactagaaaacacatatacacatcattggcaataaagcatgaacacaaggctttctttctttgataggaaacacattttcaaacaccaagtcaaagaagatagtagttcccatcccgggcaggcatgaattgaaatagtagtttccatcccgaacaatagtgaatacatcctagcattgccggcaaatccgagtaagcgtgatcagcgcttacccatagaaacttgaataaagatccaaattgcactcccatgactacgcatggtacttgaataattgaaaccggaatcaaagaaccaaactgaaaccatattgcacaattatttaaccagatccaaaatacggaatattgaaataagaataacatcgtaaacataagatgaactcaaaatgtaaatagcgtgaacaataatctgaacataagtagtcacgtataacatagaaatatgtcggaaataaatagatagagtaaataatccatgaatcacacaattagttcgtcatacacttgcctccaacgaagaatcagtatcatgcacgatctgatgggccaccacctaatcataaacaaaacctcagcaaacacattcaaacatgtgtataaaacaatgaaaaaagtgaacctactgccccatcccatcaaaacgcaataacaaggaacgccgcttggactatacacaagactgctgcttcaaacctttatatcttgaaatatgaaaagtctatgattgaaaatatatacattttgaaattctacagaacagtaactacaactttgatgtagaaagcatatttttattctacaatttatatggtctaatttgcgcttgaaagtacgcatcagaatctgtctagaatttcagactgtccacactaaaacaaccataactggagttctactcgcccaatcagggtgtactttaccaatatggaaagctaagaaaaacctctacaactttgtctataggcggcctggctgatttcactgtttatcccctccaaaaacagtttaatctactactatccagattatgacacaaaaacaacagtcatactaaaaaaaattatatctcctaaaccacttgatataaaatctcgccctttggtcagaagatagatccaaacattatctacaacttttatatggacactttgatcagaataaatcattttgaccatgaaattaatggaaaacagaggcgctataaatctgcccacgcccagaactaccaatccgaatcacaacgtccaaaacgcttctctaaccctcctcaaccacgaattaaaccactagaaccaccctagaacaactcatacaataaggggataagcctcaccttgggttcctttagagaacttgtgaggagacaataggggagactccggtgtaacccctccttgtactcctctcctcctccttgttccgtttttccactttacttcttgatccaagctatgaagatggagatctagggagagcaatttgctctagagggggagagatgcaaacacaggaggagaggaggaaggaggcgccggccagggagaggggtggcggcaccacgaggggaggtgggatttgattcccctctctctaggttttaagggagaactaatgggctaggtttgtgggccttctcatgttggcccacttctaaagatatttttcttttatttatttttgttaacatctttattttaacaagtcaacccaaactaaaaaaacctaaatatttttttaatatacggggtattacattgctccccccttcaatcgaattcgcccactgtagagcttgagaaaccgtaagaaggaaaggaatacacaaaacatacatataaagtagttagtactctcaagcaatttcgaggaaatctcctatattcgcaacactgcttgcttctaggtatggtagataataattaactagcataagaaagtatggtagccaacaattcaaaaacagctaataaaccaactcagacctactagacaggaatattggcttgccaaacaagcgcaatgcacatactaaaacacccaattgggagatattcaaaaatcattggaacacatcgtgaagaatcttactacaaagcaatggaacaatttgtgaaaacaacctttacgctcaagggaatcgggaatacaacataagctttaacttaaaatttaaagaaataaacactcacacccatcacatcttattagtatgttgctccccttcaacaactaaaagtctatctttgattgccaattatttagaggtaataaacaatatctaagaagtcagtctcaaggaccataggccacacctgttccacctagaggtaactagaacaaaagcattatcctcaaaaactgctctgaacatcagtagatcttgaattttctaagaaactcaaacattccaaagtaaatgaattaaatccactcaataaaaaacaatttgttgggtgcgtttaattgaaaagaaataatcgaatatgaaaggtcaagcaacaaaacaaacaacataaaaaaatgaatatttagtctcaaacgcggttttcttaagaaatctgagatcaggataatgactacctataataatttcaagaatcacacgtaaagacaatggaaatatttagaacatggaccgagtataaaaccactttttgaagaaaatgcgtagaaggaagcatcctcttcaacttgattttttttaaaaaaaaacgaaaaggaaattttttttaccataaactcatgaactgaaaatcaaagttttgaagtttgtttgtcacctcaaactgcgaatccggacgctattctattaaaaaattcaaataaagattaataatcaaataagtgtgaacttcaatccaagaatatcaatactgcacacagttgtgagccatgtaatgaaaataaatcacttggtaaagaaattcagatttaatacaagttctccataacaagatttaaattagtattttcaaatagtattgtgcatatcaataatttataatttatcagcacaaaacaatcagacaacacttatgtttgaataaccaagcgaatgaaagcaacaaaagtgaaactaaaataaatatttagtgttaattcctttctgaaagtaaaaaacaaaattagaaatcaggagaatatttgtcaccaagtgatgattgcaaagtcaaatgttttccttttggaagtatttcagaacgtgtaccacgaatgagaaattttttttttcatttcctcaaccatagtcacataacagaattcacaaaaaagaaactaataagccatatcacccttgaatctcaagtctgaaaaatagtacatcctcttttttttcttaccttttttctttgcttttcgggtgaagacatcactaccttgatgcgtcaggcataacacatagacacatcacaccagtgtaagaaaagaatagaatgagtagatgtcatgggggccaatccatcccgtacccaaactattaactcggtacagtgatagatgtatcacgacctaacactcacactcggacaacctcacttggcattgggaaaaaaaataaagagtaaaagttccctcctctaaccactttgcattgcctatatggaagaaaatttacctattcttaaaggatcattaagtcttatagcatacaacattaattacttctataaaagagattaacacaagttagatgcagaacattaattacacaatacggatagtccggtgaagttcgtgcagaatttcctggagaaggaaataaagatgcccaggaaccgttattggaaggcgccggtcaaatcaagcacaccggccaagaagctagagcagtcggctgcgaggaagccgtcctccgcaccaaaaccaaagaaggtgtggaacgaaaagccaaagacgctcgctgcatcacctccggagatgagtagaaattcgcgaactaaactggaaggaggtacggtcttgcacatcggacctaaaatgacgcgaccttcgccaacaggtaaattggtatgtatcctcgtatttgtttttcagcaatttaaatttttgcatcaacacatgtttgaatttcaaaattgcatttaggtttgaggaaattcttcaaatgaatttttcagagcaaattgcccaccaggtgtatacttaaatcaagtgattgagatagatcggtctccatgccgagacaatataaatcacttagattgtaatatatattaataacataactatatatgtttatagcatagccgatcaaatatatctagcatgtatcggctagtactccgatacgactctatgttaagatgttaaaacaagcagaatataccaaacagaagcttaattgtcacgcccggaatttctatccaaaattccaaacgcttacatgtgtgtaaaccctcgtccaggaatcagccgaggcacacaataacaaattgataatagagtacaattattactctaattattaagcgtataaaatgtcattacagaggtagatagttcctctcaatcaataaagatctaagcagcggaaaaaaaaaataaacagcgcagacggctccactccacaggcagcttgaccaaggctacacctaatcctccacaccatcagcttcaccgtagaactcttcttctgatgaacgattgcaaggtgagtatatgacatactcagcaagccacgcagcaaatatgcaaatgcacaggataacaaaggaaggcataatagggtttcatttgcaaaaagcagcatttagcaaacatttgagaatttaaaatagttaagtattaattaagcaatattaagccaacgctatacaacataccctgttgcataggcccaaccattctgaacaaccatcccggctgtacagttctatctccaaaccaggaatattccattccaaaccaggagctaaccaaattattaccagttatagcattatttactatggtgagaagggtgagactaatcacgaaagacattgttagacccgcccataaccgcgggcacggctattcgaatagttttactctgatcagaggtgtaccactgtacccacaagacacaaccccacatcatgtcgccatgtgcctcaatatcaccacgatacctcggaaaggagttgtgacaatacccctcgcataacacaatccactgcagtgcaccttcctggatcataatcacccccttataaacaaggcatggactccccagcgacccccgtgggcttatctccgccacttctcagtctggtgctccgcaatgaaccatactacacaaaagataaagccgttgcccatgctggcttgtggttggcacggttaatgtttcacaaccgaaactcgtgaaccggtccttaattgtcatgagcacgaccatcaaaaccatgtgctcacaacccaccattatcaggttttagttggcacattaattaattaactaatcacgattgaccatcgtgaactaacattaagccatcatgaaataatagtgaatcattagttatcccaatagtgagctaatgtttctaagcagggctaagcaattatatctactatctagttgaaccagtataaataaagctcaaccagtcaaattataataacccaaggtatcaaagaataaggtaaacaagaaaaaggggctataacaaagaataggttatttccacccaatgacattcgaaaataaatgcagaagttgaatgaaaacaatagctttaaataggatcaacatgctcaaagggttgtttgggatctatgtgacttgccttgttggccttggaactcttcaaactcttctccggcgaaaacggactctccggaaacgacggaatctaagcaaaaagaagcaaaatcaccaaaacagcacataaacaagcatgaacagtacatgtggatatttttaatgtgtagatctcaattttagaaaaatttagagacttgaaccaactaaattggagctaagatgaattagttatgaatttttaaagattaaatcgggttaaaacacttaaatcggttaaaattgaattatgacgcaatattgaattatttttgaaaaggaaaagagggtttattgcgtcagcggctagggtttgggtggaccgggcgcacgggcggtggttcacgcgaacggacggccgagattgatccaatccaaatcggacggccgagattgattgggtccacggcggttcacggcggacggacccgatgacgccagcgatgacgtcaccgacggcggcagcggctcggcgggcggggacggctcgggcggcacacgcttgccggcgaacggcggcgcgaggacgcacacggagggcaccaatgggtagcggacggcacgacgaactcaccgatgaccacaacggcggcggagaagcaacggacggcgccggcgacgaggaggaaacggcggggctcttcgggttgacgacggcgacgatgctccagtggtctccgacggcggcgaaggggcggacgaggacggcgacgcgacggcgaacacgacggcggccttcccgagcgacggcgacggctggaacgacggcggcgcacggctggagcggcggcggcggcagcgaagctagggcgcatggcgctaggacgactccggcgacgagaggcgaagacgagggtggcgacggaaagagaagagcacggggatccttttaaaggggctcggaggcgacggcggaggcccacggcgacggcaacggcgaaggaaactcgcggcttggagaggaagaaaaccgatccgaatcgaactcgattccaaagctttccaaagcgattcaaccgacgattccaaagggaaaaaggtagaggagatcccggagagtatttcccctcaaccaattcggccggagaaggaaagggacggccggatttggaagggaaacggcggcggcgcgggctagggttttcggcggcggcggccgaaggaggacgaaggagaggagagagagaaggttttgggccgactttcggcccaaagccaaaagaagacttttttaaaatctttttcaatttaaattatttcttaaatgcaattccatttattaaaagtacttccttagctcaaataaatcccagaaaaatctaggaagtatagaattaagcaaagtatttaatgaaattttatctggccacttttatattggaatttatttattaaaatttgattttcttttcaagcctttttaaaataaattctagaaattccatttaaacaacaatttatatttttttgaatttttagggtgtgacattaatatacttagatgcaataatatcttgatataaagggcagatctaacatatcaatgaagcatgtagagcaaatatagttaaatcagagaagatcggctgaaactccgatgctaccctaatcggtaatgagaaggcatgctagagattgatattctaagcacgacttaatagatcaaactcaactgatgcagcattaagtatgaaaagaagaacaatatctagacaatcaagccgctggaagtttcatagagtggtagatatcttatataatctgaaccaacgtcgatatttaacctaatcggctgccctctatcaccagatgttagccgattgtaggttagatggcgatattgttagagattatgtaagatatatgataactcgacgaattacgtaaacaagattagagtatcataaagatggaagcattaatcccgagaacacaagccgtcataacaagttttacctcttgttgaagatcgaaaccgatgcagctcaacctgaaagcaagaactcgtcgaaataaaactaaagcaaaagggtgacgatgcgctgaaattgtattgaacgtgtgtgttaataattacatagggctcgggttctatttatacccgagaattacaagatatgtccataccggacacgactattatctctaataaactctaagatatcataagtctttgcggcagacttttgcccatatttatctctaaggaatttacataaaatatcctaattaatagatacaattgccttcccatgactctatccatgtatggcaatcatcttgaagcacgtcaactcaaacccgatgtcggatacaagtcgtattgtcagaatcagctgtatcacttaacccagtcctactcggacccagccgatcctaatcgtagccgatttggattccagtcgattcttgctctgttctcgaatcgatctccgccttcgactccacttcgatctaattctcttttccgatgctgatattaccaaatttggtcgttaacacaaaccaaaacaaaattttcaacgaaaattcattgtgccacgaccacactgaccgttggaatccaacggccgaaagtggggccggttgggcccaccaggggttcgcccgaactagccatataacagctacctgccacttttggcaggtaacagctagtgggtcccacatgtcatttctgaccgttgtgggtaccctattaaagccagacgaccgagagagggaattcaaccccatttcaacacattttcattccctccccgaagtttgctctcaagttcattcaagcttggatagttttccctcaaattcaaacacttagctgcatatatacaagttgctttggtgaaactaaccggcgggtgaaacttgtgctatttctaacccccgccgagatagtccgttctagctccattgtgcagaatgaggaggcaactgccttgtctgttcaagcagtccggctcttcatcaagtcatcatgacgagtctagtactggttcattagctgatgtctcaatggatgatgtcgacgctccgcgacgtctcctgaacgacgccgacctcgaccttgtcgatgatcgggaaagacaagcctactacatgctgagtgaccgagagtatgctcacacgcgagaatactctccggagctgttgaaaaggataggtatgtgtcgacgggggatacccgtagaccggatatagagggtattggggtacgctggtataaggatctacgtagtacgacatcgagcaatcaaaagacaagaattatactggttcaggccccttgataggtaatagccctaatccaattgatatgggattatatagtggaaaacacagattacaaaggaaaagacggaactcaagggatttggcgagattgtagtcgagatgattcgactttctctcgtcgacttggctccttgcaggctctgacttcgtaggctgtgtgggttgtgttggctctgagattcgatgatctatgcccttcccggggggtcccttttataccgcaggttgggtgctctccgagtaggactcgaacataccagacttggtacgatacgtgggtaacccaattcttttccaagaaggtctctcctcgtccattgacttcacgaagagtttccttagatgtcaaaggaactatccgtgtacgcgtggatatgctatgtcgatacgtgatgtatatcgaggggtagagggtatgcctgacccgtaaccctgacagtagcccccgacttctgttcaaaaatgaactcgtgcgaccatttgcaacttcaggtgtcgagaacgttgtcattccaggtgcgagaaccacggagatgacgtgtagtcgagcataccgatacgtgatgtatatcgaggggtagagggtatgcctgacccgtaaccctgacagtagcccccgacttctgttcaaaaatgaactcgtgcgaccatttgcaacttcaggtgtcgagaacgttgtcattccaggtgcgagaaccacggagatgacgtgtagtcgagcataccgtttgaatcccaacggtcacgagtgaattttgaactgaagaccaaaaaccaccttgcgcaacggacctagaaatttccggcggggatttctcttaattccttggaattcgcaccgtcgggagtgcgcttatttaatgggattttgggtgcgcgttttgaagtccgcctacttcgttaagcaaacactgctcattaacgctcctcgccttcttcgccaccgcaaagaaccctatcttcgccaatcttcgtccatctccggtgatcctccggcggcgatggatcttggcaagtcgacttccaccagcgcgaccctgaagaagctccaagaggagggcgcccttcctggccgcgaaaaggcggagagggaagcagcaggtactaatccacagcccctcttaggtcgcatggttgcgatcgaatattatgttgtctgcgggtttcttcctcccccttctgaattcctcctgctagtcttgaatttctaagggctttcacttttgcatttgaaccccaactccattgctttccttagcgtctttgtgcatttttgtgaggcctacattggggtagaaccttttcttgatctgttccgtttttactacgaattgcgctggatggaacccaatagggtgtctggttgcgtcgggttccgacctcgtgatggaatgaagtcgcgctatgtccccctccagtgtccctcttctcgcagtaaatggcggaacaggtggttttatcttgaaatcaaggattcgaatccggtcctcgttgttcctgaggagcaaccggacaagattccgatttggaccgccaagccccctttgaccccctctctccaatcgtttatcgacatcatcgatgatctccgagaacagggcttatcgggatatgaagtcgttgcagacttcgtcagtaggcgaatccagccgctccaggcacaggcccacccggcatataactattccgggccagatgaagcgacccgggtttctccttggggtagccttcttgcattcattttgatatgcctgtactcgcgttacttttcgacttatcaaaaattaattctttcttgacaggtctgagtagcgacggcgtggagcggcgcgttggtcaagtgatgatcagcggcccgacaaccgtgtcacatcctgattttcgtttcaggatttataaattatttaataaattattattagaatttatattaaatgttcattaatttacaagagaagttaaatgtgggaaataaaatttcctaaatataaagcatggatggatttaatttttattaaattctctatggttaattatactctctggaattttctcggatttttcggagctcaattcctaattttaatcatacaaagaacattttagtaattatccacatattaaattaatcattaaatggtctgattataattttgttaagtactttgagtgtccaagtattttcaggatttttcttgaaattatttgagcattggaagtatttttaacaattcaaagatcattttagtgattattttaattgaaaaagtttttaaatccctccctaaagtcgttcggccgaatccggcccaacactcctctctctcccgtgcggccgagccggcccagccacagccgcccgccccctcctcctctagccaccgacaggtgggccccacctgtcggaggcatcttcctcctccagccatccggccgagccggccgaccgagcccgagtcggccgtttgccgcaccgtttcctccacaatctctccctttttgttccgattgtttgagggattttgatccccacatcttcctctatgtgtaccccaaaaatcggagcaaattgttgggtattttatccgaatcgaactcattttcgaatttatctccaaaaccgagtttttgatttcccagatcgatttcttgcgggaggagtccgatctcttcaatccaaggctataaataggaccccctagtcctgctctttcgtttgccccttttcccgagctctctagtgccccggagctccggcgccaccgccggccgagccgccgccgccgtccacctcgtcgtcggccaccgtcgttcgtcgtttggctcgagggtgagtaccgttgggttcgtctcgtcgtcctctacgtgtacatgtcctccaaagtcgcagccgaccatccaatctccggcgaggtcgccatcttggtccggccattatgatgtcatcatgatgtcatcatctcctctttttcagtttttctttaatagattaaatagattaaaacttcggaaattcataactaaataaccgtagatccgattcgagtggttcaagttgctaaatttttctaaaatcaagatctacatgttaaaaatatccacatgtactgtttatgcttgtttttgtactgtttttttgatttttgtttaattgctttagtttccgatgttccggaggagagtgtttctgttgaggaagattccgaagcgtttgcggaagctcaaggcaagtcacacagatcccaaacaaccctttgagcatgttgaacccgtttaaagctattattttatttcaacttatgcattattttttaatgtcatcgggtggtgaaccttttcccgaataattaatggccgaagatgaccttattttcctatgggttataatttgattagcatgaaccttatatattggattggttcagctaaatgttatatgtattttgcttagccatgcttagaaacataagctaactaaaggggttaaatataaattatattatattattcttattaattatggttatatttaatggtagctcacgatggttaatcgtgtgatgttaatcaattgataattaaaacctggttaaggtgggttgtgagcatatggttttgattgttgtgctcatgacaattaaggactggttcgcgagctactgttgtgaaacatttaccgtaccaaccacaagccagcgtgggcaacggctttaccttttgtatagcatgattcattatggtgtgccagactgtgaagcggcgagaagttcgtgggggtcgctggggagtccattgcctctggttttgagggggagattatgatgcaggaacggtgcactgtggtgagttgtgttgtgcagagggtattgtcatagcctctattcgggtactttccagtatcgcgacgcatggtagacatgatgttgatgctgtgtcttgtgggtacagtggtacacctctggccagagtaaaactattcgaatagccgtgcccgcagttatgggcgagttgagcaatgtttttcgtgattagtctcacactactcattaatgttaataatgtgataattaatttgactcctggtttggaatggataattcctggtttggaggttagatctgtacgaccggggttggttgttcaggtttggttgggcctgagcagcatgggcgtgctgtttagtgttgattaaaattgatgattaattactctactgttttacttctcttaaatgtttgctaaatgctgcctttgcaaatgagcctatattatgccatcctttggtatccttgtgcacttgcatatttgttgtgtggcttgttgagtatgtcatatgctcattcttacaataatcatcaaacctcagttgaagaaaaaggatccagaaggagaagacgtttggcttataccccagttgagctgcctgtgggagtggagctgaagccatcgttagatcgttatttcgctgctgtttttcttttcttttgtaagtatgtaacgttattattaagatggatttgtatattaaattgtcagtttgtgtacctcagctgattcttggacgagggttttatgcacaaataagttcggaaattactagtgaatttccgggcgtgacaaaccgcaagcgacattcccgcgcccctttgtgaaaggggagcggcagaatgtgacgaagccatcaatgtgagttcatttaataagcgtccgccttccttactcaaaatcggcttatgacgtgatttagcgtaggcccttcccttgactgatgtcatcggtccgctcgcggatcatcaggtggcgacgtctctgaaggagaaggtcgtccaggaggcgtccgacgctgccaccactagtggtggcaaaactccgactaaggcgaggaaattcttgtctgtactcggaaatcgccgcaaggcggaaactcccttggtaatttcctccttgtcgttaggttgtgcagcgaggagaatttgttctcactctatatcggttgtcttgtaggcttccgacgtatttcccccgcctgctcgacgtcaacgtattgtgacggtcggcgagaagtaagtgaaggatttctagactcttatgtcttctgttcgagcggagttttgactcatggcggttaacagggaggcgaagtcgaaggctgctcgcggcaagtccgggggaacgtctagcgcgtccgctgtcacggcgtcaacggatgttgtgcccgtggtcgggagtcgggaggcgacgccaagcggctccgtgggcgatcccgtcggcggccgtggtctgtcagaggccgtcctcacctgggaggagctccatgtcgagatggggcgtcttctcgaggccggtgctcgtggcgttggctgcgaggtctcggaggtgagggcggagacggtagcggccaacgcgcgtgctgagcgtccggcgcgggaactggccgaagcccgtgaagacctcacgaagatgagggagctggtggccggcaacgagtgccagcgcaaagggctcgaggactgcatgtcggaactcgggataacctctccgagatccgaggttcgctgcgggtcacctacaccggtctccaccaactcgccgaggagtgcagcattaagtccacgattccggtgaatcccgacgagttctcgttgacctcttcccttgcggagatggcgacggcgatggggaaattccctccaagcacgcggccaggatcatggaggagacgtctaacggtatctataccgggacatgtcacgtcctcgcatgcgtgaagttgtcgcgtcctgaactcgacctgcgtgaggtcttggatcagggagcggcaagtaacgcacggaaggaggtgatggaggaagtcggtgatctgggggagtctatcctccccctttttgaagagtaggacccatgtattttttctgacttgtaaactttaaattctagttgcctttgcgtgcatgattaccatccttgttcactattgatttcgggaatctctcttgttgattgtagagatgctgatgatgaggatgtctagcagcatgggcagcccgagtcactggcaatgattccggtactcgagtttgaaccacgcgcctctcatgacgtcgaggacgaaactcttgatacggaggtcgaagtaacagcaactgcttcgagtgagtagcctatcaaccttgatgatgttttggggttttccgagttgtcttagtggtcgttacgtgtcacgaccggaaataacccaacgggcgttccttacgtgcgtgcattaatccttgtcccaggaggcaaggtacaccaaaagttgatacaattcagagtttaacaagcagaagcgtaaaatagttaatttattacatgggcgacgaaggcccagcacacacaaagacaaacgagaagcagcggaagactagggcgacgaccacaggcgcttgacggcaggcacgagctagacaccgaagccttcatcaaccaggaactcctcttctggggttgggaaaaattgagcaagactgagtacaaccaccgtactcaacaagacacacccacaagtgcggaataaatgcaagggagtacaaaggagtcatactataaaggggtagggttgcagtaaacagcatttaaagacatttagttgcccaagctattttgtaaacacgattctagtactatacaatgttattaatcaaggccgtgaacccacacgaacctgtattaaaccaaggcctatgatgattcggaccgaactggcaaccc

SEQ ID NO: 29699 - DNA, 6938 bp, Oryza sativa
gaatccgtgggaatgacgggcgcaaaaccggctagggatcgggctccggcggcgcggcggccggaggtaagggaaggacctgacaggtggggccccacctgtcagcctccggaaaagaggggcgcgcgggcgcggaccacggcttgggcccagctgggccgagcgcgggagagagagaaaggagggaggagttgggccgaaatcggcccaacggcctaggaggggagattttgaacttttttgaataaaacaatttgtaaaatgttgtttcaattattaaaaatacttcccttgctcaaataattcccagaaaattctagaaaatagaggagcaagcatagtatttaataaaattttatctagctcatttttatgttggaaattttcctagaaaattagggtttagcttgtaggcttttaaaataatttctaaaaattccaattaaacaccaatttaaatatttaggatttttgggatgtgacatgccatacggtagggtcgcttgtacagaggagtggttcctggagcaagatctatccggaactcaatctctcgcttgggcggcataccgggtagttcttccggaaacacgtctccgaactccctgactatggggatttctgacagtccgatctgatgcagttctgaacttctgacagaagttgggggtgcaaagaaaacaacaggttgttccggccctcggtacagagtgacagtgcgtctcgcgcattccactactccttggaattgagccaaccaattcatcccaaggatcacatccaagttcttggtgtctagcagaatcagatccgaggggaaaggaatcccctgaatttctataggaacggcagggctataatactttgctgtcataacccctccaggagtggtgatgagcagggggttcctaagcctttctacccccaactgatttctccccacgaatggcacagatataaaagagtgggaagctccagagtcgaacaaaatggtagcagggatggaatgaatgaggaacgtaccaactatgacgtctggagttgtcagcacgtcctcggccgtcacatggttcacacgaccccgaatgacatccttcccaccgttgttggagcggggaggcgcttggccttgctgacgcctcggctttgggcatttatccgcaaagtgcccgggctcgaagcagttgtagcacagacgctgcggaccttgagcgtccctgcggccttgaccagactgcacagttggcgtaggaggacggggcgcacgagtcccttgttgattctgctgctgctgcggctgtgggacgcgcaccacgaattgaggtcgaggcgcggagcgaggttgctgctgctgttgttgctgctgcgaggaggatccccctgggtagggattggtgtagcggaccctttggttagcaccctgttgattgcggaaattcgccaagcggcgcttgtgcgactccagctccttgtgcttggcttccaagcggatgctcttgtccaccagacgttggaagtccgggtagtccccggagactagatggacggacagctcagggtccattcctgccaagaacttctcttgcttctcctcatcttcccgcacatcctccggggcataacgggccaggttgttgaactcatgcaaatactccatcacggagcggttgccttgcttcaactctcggaattcccttttcttaagagccacgactccggcgggcacatgggtcctccggaaagcggcggtgaaacgggcccaagtaataggctgcccctctggctgcgtagcctggaaatggtcccaccatagagatgcgggcccctgcagctggtgggcggcgaagatgactttctcctcatcgctgcactgcacggtgtctagctttttccccacggcatgcaaccaaaccaacgcatccacagggttgttggagctagagaaggtgggtgggcggatgcggaggaactcggcgagtttagagtgttggggaggtggtgggggagcattatgttgtggcggattttggaggtggtggaggaaagccgtcatcatgttggcttgctgtgcgaggatttgggtgagaatggcgttggtatctggtggtggtggtggaggcggaggaggaggtggaggtgggttgccctggtggttgtggttgctgccttcgggttggttgccatcaccggtattagcatttctcctggtcgtcaccatctgaaaaccccacacagaccagcaaacagagagagctgacaattaaaactaaccacccacgacttccataattcttgaatttattactgctattaaattggttcattaaagttcaagttgcttaggcaaataaaataaagacaggctccgacatagttatgccacacactggcataaccatgcctcacacaactccaacaagaagacaaacgagaaagaacacacgcgcaagcctactaactgctcgtctaccgctgcgacgggccagggcggaaggtgagcaacagcgcatcctccgtgctaccaacgccggaggcttccccctcctggggaaccacgggcgcgggctcggcacgaggggtctcgacgaagcaagaccacaccagggactgacgaacaagctcgggcctggaggtgctcttgcgggcggtgatcttctggctgcggcagacgcggcgacgcttggggcggcagacctccccctgggcgatcttgagctgatgcagctgcgcctccaccgcgtctaggtccttcttgagctgcaggttctcctgacgcagctctaggattttcaagttgttctcgaccatcccacggcgcaccatctgatggaagtcgatacgagccgcgtcgtacgcctccaccatgcgcgctaggtgcacgatggtagcgtcatcctccgagctagcatcccggaaggtggcgtagtcacgggctcctccgcgacgagggtggtagcggtagggcgagtgctgcaactcgtccaggtagcgctggtgaagagtgccgatggcgaggagtgcggcgctctggcaggcggctgggaaggaatctccacccgcggtgactgccagcgaagtccgctagggagagccagagaggatcactgcagtgacctcccaaccagcatggggctctgcatcgtcaccctcctgctccggaagcggcctggcctggtagtccactccatgtggataccccaggacaatgcacatgccccgcagctccaagacgaagccagtcatgtccaaaccacgatgggtgacgctgccggccatctaaaaaaaacaaaaaagaaaaacaacattttagagatcagattttggcgataaatgaagcagcaagacagagagagactagaggattttcacaaataacaaaggatttttatttcgaaaatactgctaaggcttgggatctacggctcgtcctagggtcaagggggctttgataccaacttgtcacgaccggaaataacccaacgggcgttccttacgtgcgtgcattaatccttgtcccaggaggcaaggtacaccaaaagttgatacaattcagagtttaacaagcggaagcgtaaatagttaatttattacatgggcgacgaaggcacagcacacacaaagacaaacgagaagcagcggaagactagggcgacgaccacaggcgcttgacggcaggcacgagctagacaccgaagccttcatcaaccaggaactcctcttctggggttgggaaaaattgagcaagactgagtacaaccaccgtactcaacaagacacacccacaagtgcggaataaatgcaagggagtacaaaggagtcatactataaaggggtagggttgcagtaaacagcatttaaagacatttagttgcccaagttattttgtaaacacgattctagtactatacaatgttattaatcaaggccgtgaacccacacgaacctgccttaacccaaggcctatgatgattcggaccgaactggcaacccgaccctgggtcccagctcgtcccaagccaacccaggccaaccattccacattttagttgttaagcaagttttaagaattaaaacactaacttgggtacattgctcggcttgcccataaccgagggcgcggctattcgaatagattatactctgatcagaggtgtacatctttacccacaagacacatcttcctcacgtgcaaccacgtgccacataccaccacggtatacagacggaagacgtgacatagtttccaacccatcctggccatagacaagagtaccgaccaaatcccacctacggccggaacccccgggacaggcaggcaggactgagcccctagcagcaggacaccggccctgtgccatgacatctcgactatcgggccacagctcgtgtagccttcatttgccctggagaatgtccatcgacccccgacttcatccatctccatccgtgtacttttgtttataaccagactgagccacaaactaagccttacccactagacatgtggaagtacggtagtgctttgcaacagaggcccgaagaccggtccttatatggtcgaggtgctactatcaaaaccatgcaccccgagcccagcctaaaaccattttggggattttgaatagagggggcggtgtgaagctaattccacagtaaccaaaccattccatagtgaccaggtgatatgaatattcccaaagtctagggttgaaaaaccacctaatgttacctagttaaaagcgaagcatctacctaaaatcatactagggataccataagtagagtgtccactagttggggttttgtttattctagggtgaacaagggaataataacaataacaataataataaggtcataacaaaggtaaataggcatggctaaataaaacagtgataacgcgggaatttaaataaagcgataatgcaataatttaaatcaacataattttacaaactggggttcaatatgttcaaagatgatgtgacttgccttgctcgctttcccaaacgtcggcttcgacttccacgaagagcgggtcttccgaagctgcagcgtctacacgaccaacggaaaagaaaaggctattactctaataaactccatataacaagcagaaacaaagcacaaaaatgggttcttgactccttaaggaaaaattagagacttgaacggtccaattccgagttcaaatggccaagttatggccatttgaagtttatatgctctttaaatggatatttgcgaatttcttcatttaaattttaattaaaaatcggatttattgcgtcagtcgggagagagggcgcgcggaccgggtccacgggagtggggcccacgcggcagcctcacggtccacggtggaccgggtgcacgcgtcttgcgccggccggcggcgtgggtcccacgcgtcagccgcacccgagggcgcgggcggctgacggccgggcccacctggcagccgcggggcgcgcccgaaggcggcctcgccggcacggccgacgggaggcggcgcgcccgcgcccctatggtcgccggcggcggccatatgcacggcggagcggcggccgagagaggggagggaagggggaaacgaaatggcggtcctcggctcaccccgggtcgacggcgacgacgggaacggcgaccgaagcggagagaggcggcggcgcggctcgggtcgacgaggacggcggtgctccggcggtcggcgggcgaaacggaggagtggacgaggtcgacgagaacgcggcgaagccgaaggaggcgatgccgaagcgggaggaggtccggggcgacgacggcggcgaaccggagctcggtggcgacggcggagagagaggacgacggcgcgggctcgattccgacggggagagacagcggcgagtggcggaaacggaggagggaggcacggggagcgtttaaatagggacgggagtgagagagagcgggcggatgagggggaatcggccgcagaagatccggccgccattgatgcgccggcgaagttcgcgggagtaaatccgaacgaatccgagggagagagagagggaaaagtggggggaaagagggagggaatcacggggagtgatttccccctctttatggcgcgcggggacggcgggatgcgacggattcggcggcggcggcggcgctagggcacgggcgggcggcgggagcggcgcgaggtaggggatgacgggtgggccccacccgtcagcgagggtggcgggcgggcccgctcgtcagcggcgcgcgcgcgggggaaggccgatgggccgcgggggagaggagacagagggagggagctgggccgagccggcccaagaagggaaggggggaaaagaagactttttagggtttttttttttataaaaccattttaactttgtttatttcttctcaattattatttgtgctctgaaaattccactaaaatttatttacgcattttaggtttttaggaaatatacaaaaatcctccaagccttatttgacttttaaatttgcacattttaattgttggaggctttcacatggattttaattattctcggcataattttgaggatgtattttagagtcgttttgggacgcgacattacgttcagcagatctcgaggatgcccttgcgacccaagatcgtcgtatccaatattggaagacgaattttgaagtggcggaactcgagagagcaatgctgtccgtaaagaaagatcaagctgtggaaacgctccgaggccgcgaggtgtggttctcgtcttatctgaagagttgttgcacctcgatggccagggtgtgccgggagttagccgtttgagttgtacactctccctagccctcagccttgtcgtcggagggatgtcctcgggtgacaaggcttctggacccttggcctgtcttggttgaataagctctgatcttagcctccagccgtg

SEQ ID NO: 29700 - DNA, 7873 bp, Oryza sativa
taggatatggcggatatcgagtggaatttcctctcctcgtggtgatcacctttacattttctaaggaaggttcgggttgccccgaaatccttcccgtctccttagcaggaactagtgcggctagctgcgcttgctgagtttctatcattttattaaacctcagctggttttggaaagcggcagcaaagccttctaacttaacatttatattttccaggattttatcattggtggcaagcttttttttatggcatccatggttttagcttgcgcaaagactaaatccttcaaggagggctgattaaagttaccgttattgccgttgttgcctccttggtagaaccggggaggggggggggctggttccacccttaacgatagccattgttccccatgaacatggcttcttcacgagtctcggggtagtcattccccatgtgtccggtgtttccgcagacctcgcaagtgatatgtgaatccaatgctttgacggcagcctgtggtttgcctttctcctgattgtctagcttcttcactaggaggtccaactttgtggtcagcatttccgtctccttgacggtatgcatgccacgttgacgggtctggagtcgttcttcgctccagcccatagtcggtaccatcttctcaaaaagatcaatggccgctcggaccgtctttgagaagaatgcaccaccagcatagcatcgaggtgatccctggatgagggagtccattgtagaaactctgtaggatgagccagtcgtccatcccatgatgaggacagcggccacgtattcctgcaaatgttatcatgctacgggaatcgtctcatctctggtctgctggaaacttgatatccttccatgaagggcatttgtcttgcccatcgggaagaactttgagaggaacgcagtggagcatctgtcctatgtgttgactgttgaccagttcacgtagaaccactgcttcgccttttccaagggtgagaaagggaacagacgtagcctaacggcatccggactgacacccttcattgtgtaggtgctgcagatctccaagaattgttgcaaatgagcacttgcgtcctcatttggcttgtcaaagaactggcttgcatgtgccatagtgatcaggctgctttaaaggtcaaagtcggagtcttcgatgttgacagccaggccaacaggtacgttgtcagcaaacggtgcagcgaactcgcgcaatgtcttctcgcccatgttcctgaaactatgtgacgcttggatggctggtttctaggccgagagctttttcttcggagggacaacatgtggtttgacgctctggaagaaagcttctgtgtgttcgttgaagttttcttgcagattgaaactagacatgcattaccctgttttcatgacacaagtgaaaagaatcaattttagcctacaaaggacagcaaccatgcagacgttattatatatgtataattcgctaatagtaatctctttgctaatcttccccggcaacagcgtcagaaatgcttgttgatattccttaacgacattactagaaatattcattcccaataatggcgcagaaacaatcctcgtatatttatggttataaaagtaatccgcaagcgcacggatataccattgtaacatttcacccggaaatattcagaggtatcgtatttattcaatcccaagggaagattgtgaaagagagaaccatgctctctctctctctatatatatatatatatataggacactcatatggggcaccatggtgcccgggcaccatggtttcaaatgcacaaaatcactcaaatttttcaaaattttctaattgtgagtatatacctagttataagaattcgattcgtacctatacctatccatgattacatacctaactaattatatgtatggatgctatatacctagaatcaaaatctaacaaaaataagttcaaattcagttcaaacttgctttgaactagttagtaaaagtagttaatgttaatacctaaataattaaaaaagtttcatactcattcgaattgggtatatactcaatttcaacaatggtgcccgggcaccatggagcaccaaacaaatttactacatatatatatatatatatatatatatgcactaaaccgcaccaagggtgcgctataactaaactactctcctcacatcacccccttccctcccccaaccccctcctcccccccaacattttcaagccttccgcacttcccaccccgcaccttttgaaaataaacgtccaataaaatgattactaagcctctgtatgtgacataatatactgtaagtaaactaattactatgcatacgaatgggatggtgtacccatcccacaccttttcaaaataaacgttcagtaaaatgattactaagctattttatgagacatagaactctataagtaataaaattactattcggggaggaggggttaatatgctcatccccgcaccatttttaaataaaggtccagtaaaataattactaagcctttatatgtgacatagtacacaataagtaaaaagattactcataggtcgttgtcaactctcctcaattgtttcctactcttagtaaatggattactctcatgttgttctcagcccttctcttagtaatttgccagtaaataaattactctcatattgttctcagccctccttttagtaaatatattacttagcatatatagtactactcccaattggttctcgtgccttctcgcagtaaataaattactttaatattaacacattgatattgctgtaagatcaaagtgtgttttgattcttattctttgatgaataattggcatatgtgattattggttttgatatttggagattatcgtcgaagtggttttggagataatcaattttcaggtgatgatcagattcactgttattttatgtgaccggtccgaccgggcggaggttgccggtcagaccggcgctatgtgagcggtcagaccggcttgcccgcggtctgaccggccgacgttgtgtcggtttcagtttcgggttgtttgtttttatatccgtgattgtttcatgattatggcttctagatggatactatacgtatgtaatactgttgtttgctaacaatgagtcaagttggagatagcttggtcttggaatatggtttctttgtttgtttcatgtgtaggtgactcgatgcctcgggagagtatttgcggtgatggaccgggagtcggcttggtggtaagacgatgtccgtggtggtcagatatcatgtgggatactaaggctagagttgatgcacgtggttgacggagattccatatggcatacgatggaggtattgtgtacgtatgggatgcggagtcgaatttggaaggagtccaaatttggtatgattggttatgtaaagtttgtttcttgtactagagggtttcctaaggtgtttaggactcttagtatgagtttggttcgtggctttaggctgccaacatcatgtataaatagagggggagcgtgaggcttcccggtatcgcttttgtatcgcttttgagagcaattgagttgctagtttagttagggtttcgagtttagtcgaaatttttgtaaggagtgctgttggtgcactttgtaaacataaagagaagcaataaagttgtcatctactttaagagttcttcgatttgtgtttcaccgggtttcggcggtctaaccggcaactcaccggcagtcagaccgacggcattgcggtggtcagaccggtgggagcacggtggtcagaccggtggcggcgacagcgagcgacaggcgactttggcggttcgaccaatcgttctacatctgtcagaccagcggcatccactcggttagactgacagatcaatctcggtcagactgatctccgtcgatttcgagggtaacttttatttccactaaaagtttttggtttttgggtataccaaccattcacccccctctggttggcttagttcttgtgattcgatcctacaatcgccacaagatttctcttagtaaataaattactattatcacgttcttaacatactgatcttgcaaaaaaaattataatcatcgtaatataatcaacatcaaggtgatatcatgacaaattgtatatgataacaagaaaacaaatgagaattgagcatgttagctagctagcttagacaaaaagattcagcagctcgggctccctcttgccgccgccgcacatcgtgacggatccatcggagttcatcgatcgacagcgtgctgccccgccggggagccacaggccgaggtcgaacgacagttccgtctggggcgctgccggcggcgccatacacaccggggttcttggtcgtcgtcaaacgcttcgccgtcgagaacatggaggacccgcccacggcgtgcctcgccgtggacgcaaacacatcgcggccaccggcaccggtggcttcgtctcccgccgcgtagccggcatcggtctgatcttgcatgcataggtgcagtgtttgttggtgaaacttgtatgcttaaattgacaaaaccgaaacaaacttttcttgcacaaaaagggttgaaaacgtatatgtcagtgctgtacctagcaagaaacaataactgacttgctgctctcatcatatgactaaatgagttgactggattatatacatgaaaatgatgcaacaaaagttaagatgcaattaagaagggtgttgatcatatatatctacaaaaattgtgattcatgaatgatcatcatcttgattaagttgagattgggagcaagactacaagaattaatgtcatgtatgtatatcaacaaatgctttgtgacatggaaaagaaatttgacataacttttttgagatgtctaaactatataggttttgtcgtatcacccagcttagcattgcatttcttgcctgaagggatgatctctggaacgttctgaatcaagaacacatggaattgaacatcaaaaaggaaaaaaaaactcatcgaatttaagcatgggaaattaagaagctaatttagttaggggtgagaggataaatgagcttagcagtcccactgcagctgctccatgccattgccggcagcggcatcgccgccaccacagaacatcccacacgactcgccatcaggtccagatcgaacgccggcgccgtcgtacacggtacaccgccgacgagatgtccaccatctccacgctcgtcttattggagaatactttagtaagacggtacacgaaccatagaaagtttgggttcttgagacgtgctcaccatgcgtacgcaactatatgatgcagcaatcagatgtgtctcgatgttggatcctagaaatgccatgaagaaagggatggggggagggcgatagatggcggccggaggacggggaggcaatgacactgttggttggtcgccgttgccgtccttggtcgccgccgccttggacgactgggatacgccgcctcctgcctctgtagatccaaaaaaaatcgggaaaattgatcagtggttagttacgatgtggaacaacgacatatatgtatacgatgatttatatactgctatcagtaaaacaattacttacggtagaattcgatagtgccattagtaaaacaattactggaattgaggggggcaggggtgtgtatgtggtgggggtgaaaaaaaaaagggggtgttgcgtgcggtgtgtggggtgggttgtgctacagctactacaccctaggtgtagtgtgtgtatatatattacttgctttcatcgatgttttggcaggggttaatttaatataagggtagagtgtcacgaagcgaagcttatagaattcctgaagtaaataattctaattaggtggaagaagattccctatacttctaatatacacccaaactctaatctacatttgctagtatacaatcatgtggccaatacccctaacagtgccctcctggtgtttcaagagaccaccccgggttgccgagtttcttacgacaacctgttatggtcgtccaaccgggactaaatacggaggagtaccctccccagaaatttgtcttaggttttctcataatcgctatgaggatcatccctgaatatgggagcacaacccggagcttgaatgtctttggaatccggcgatggcttcagggaggactctttagtcagacccgaacatgttgaaggctcggtttcaggcttggcaaaagaaggttcctcacttcctgacacaaatgcctctggatggggttcaacacactgcccgacaaaggaggtattttccgatatgcgatcgagaatttccttgccttcggcgggagttttgtgcatgaatgaccctccagcagttatgtcaaggtagaatgcagactccctatctaaacccgtatgaaaatgctgcaatagcacgtaatcgggtatagacaggggtgggctagactgaactaaattagtgaatctggaccatgctgcaccaatcgattctttatttatctaccggaaacttagaatttctacacgaagagtagtaatacgggttacagcgaagaatgcgaggcagaacctgtctcgcaatttctcccagttaccgtttacacactcgacggtagatgtgtaccattgtttcgctctctcatgaagagagaacggaaacaatctccactgaacaacctcttgcttcatgcctcgaatcttaaggcacgagcaaagctgctcgaattcccgcagatgatggtaggggttttcctggcctaaaccagagaaagatttctccctaaccatactgatgaatttgggacgaatttgatagccaggtgataaaatatgctccgatgaaggaggtggctcgtaaaattcgccccgaggaacagataattggaagatagatagtggctccatcagttgagaatgtttttttaggaatacttctttggggtacgggtgaaggtagaagaaaggaaaataaaaaggatacgaggatgaacaaggttcggagataaatagcaaccgttccccggcaacggcgccagaaatgcttgttggtatttcttatgatcacagatagaatccgtaagcgcacggatataccgatgtagcacttcccttacggagtattccaagggtatcgaacccaagggacatgtgtgattatctcttcctccggttcatccaaggacacaagataaatatgggcaaaggatagagaggatttcctagtgagaaacagtgtcaaaggaaagcttaagtttaatcctaacgcgatacttcaggcactggcaacccgctgttcccagatatcgctctactacgtaaccggacagggaggacttaagtgctcttgagggctatcaccacctctacacgcacctctaacgtactgcgggatacgcagcaaccaccagaaattaattacccagacaccgcgtctatgcaattaataactactctagcactaaagcaatcacgatatattactggactatagtgaacaatgatcccatatgctaattaggaactaaccaagaataattctcactaagcaaatcttaattactcagaatgatatttctattaaagcagagtaattaccaaagtacaagaataaggagaggattaccgacaactccgggattccttcgacttcttctactttactctctccctattctaaatatactatagaacatataaagtagctaaagtatacttagagcctcttgtaattcagctctacatcttggtgtgtgtcaaatgagggagaggagaggggtatttatagtgtggagccttcttgggagtgtggagatcctccatggaatcctatgagcatcttcactctcctcat

SEQ ID NO: 29701 - DNA, 26048 bp, Oryza sativa
gcccatttggaggtgtttaattgggtttctgagtccaaaactccataagttcagatacgagtttgattctcatcctccttcatgtatatttcctctcaactttggtagtttgtcacctgcatatgaatatacaccaacactcgtggaaattgttagaaataagccctaccgctaagttggatgttccacgtttatggtcttatgcaggtattgacggcgttaatttcgtacttaacggccgtcaacatccacctctactgtcccgcagcatatatgcccagataatgatatttactaatttaagcaccatgcttacattaataaatactactctacacctctacagatgatataaagcaaccgataaatcggacattaaatccacaccattgcacctctctggtaggctacccacataattatattggcacaaatataaagtaagagtagtattcatactaggtaaagtactgagaatataagaagtatttcattaattccaacagtattacggaagagaatataaaagctactagagccataccgaaactcttccgaagactccgaggactattctattctactccacttagcactaaaactactaaaataaagtatgaagaggaatcttgaacttgcttgagtatgttgagaatgaagtgagctcctccttttatagggtcggtatgatggttgtagccatgcgaattgtccattttgcccttgcaaccgccatcagcaagccatcccgatcgtccacgtgcagagccaacctgagcagacgcagccagggtttggccgaacctgggctggcccagaaggcctccacacttctctgggtcactgactggtgggtccttatgacggttgtggtagttaaagcggtttccaggacagttacacctagcttgtgggtccatcttatccataagcttgcttaggagtgaggtttcctcatttcttcattattttatttgctcaattcctgcaacacagtattctccaagtacaagtgaaactatattattgtaaaacaaatatgtattataagcatagctagttctcctttattattgtcatattgacggtcgaaatttgtctgtaacgaccgtcaacatctcacaacttcaccttctcttgccaaccgaagcttttatgtttccctgcaggttacataagtatatgtgtggcggtaaaagtgtgatggttaagcgaacagaagaccaagatgacgtaaacgatgttttctttttggagcttggtgggggtaaaccaacactaagcaatctgaaatctagttgttgtaaagataagtaacaatccaaactagaagttcattgctaagtgctgatccataatgtttggaatagaaacaccaactcacgcacaagagaaagatattttgatgcaaaacaaaggattacgctagtgatagatggacgtcatttcaaacctagcaaaatttgcaccgacctctaattttgcagtatggcgtaaacggttcagcacatgcaacacaaatagatcgttctttcctcctttctcttctcacaattttttcacctcttttttaactatttattttttttcagcacctttttttttctgcaatttttttctttgcacaaaaaaaaagactataacatgtataacactctcacaaatgatagactaaaaccaaaaatatataactagcaattagagcataataggatcaaggtatacacaaaggatagatatggttttactatttttttgtggggattttcctagagaaaacaatatatcggctcaaaggacacgcgaaggaaaatagatcaacaactaaacaaggactctaatgaactgaaacttaaccaaactcactagaataacatatgcaattataggctatggaataaatttttgtaggctttttctggataagaagaaaacaaatatatatacatagggataaaaaatcctaccgtgacaacgaaagctctgataccagatgatacgacccaggtaggggtgatgtcccgatgttcacggcgtaggatgaagaaccgataactagcctcgaagagatcgagatagttagttgcaagcagctaagatatcggtgcaacctgacgatcgtattcgaagccaaccaccgtgtctattacggcaagctgaatcgatggttcacccaaccacactctaagttaccaaccaacacaacctggaatcaatcgaggaaaaatcctcaaaagggaccaggagcaccaatttggggcgttgaacaccgcttctttaatcccacaaggaaatcacaagagcaaaggattagagatctctctctgaatttgttagcacacagctaaacaaagggggttcatattctcattttcaaaagtcttccaaatgataaaatataggagatatttatactaggaacaaacctcataaatgggaatgaaaggtcttgagagtttactgaacataggctagctcaaaggtcacaataagtgaattcccaaaaagactcgcgcgtctgtttgctttctgggcagtcctcaatgatttatccattactccttattgggaagtagaaatgacgacccgtctgttggatgtgaaactagacttaaatggtcgcacatatatattaagcatggagattgttgattggctgggtcacacatcccttgatgttggagcaaatgtttggagacagtgtactctaaattcagtatgacataaatggtcattatctttacgtaaccaatcatcactttgaacttctagctcttcgtcgatgcccagcaagtcttgtgcatgtgtaaacctaagtaatagcaaagtacttgatttaggtagtatataattcttgtcaatattgaaatatgtttcagatacgagtgagttcacctcttgtttgtagtttctttgcacggctacatgtaatcagttcttgaaatggtgtaacggattggctctcatcagcggctaagtcagatgattgtcttgtatgttcatgtgacgagggctggggcatatcaaaaatcttattgtgggtgataagaaattgatttggccaggactatcacggtccacagaggtaatcagattcatttccctggtttaatccagcatttctcaacataaaaactagggaaataattttttatataaggctgaatttggtgtagaaaattgtgaaggctgggacgtctagcttgtatatacttataatttataaaacacatagtcgtaatttaaatcttacgtacagatcttaaggcgacgttgaattgttcattgtctgctgatttggtacagtagagcaaatggacccatcagaaaacgacgcaaccattgacaaattttatttttaagccacggtgtaaccatctatctatctatctatctatctatctatcttctatctatctatctatcttatatctatctatctatctattatatctatctattatatactaaaagtccatgagacttcctacaaacgctctcaagccgccaagtggcgctctaataaaatagagaaaatcctagaaattctaagaaaaaagcaaaaaatctacccctttcacttaaattggtgggtccaatattatacaccattagataaaattgatcttaaaacaaactaaatactatgggtcccacctatcctcctcctgtgcgttggcaggtggcaggtttgtacgtacatgtacgtatgcttccttcctttcttttcctttttttccttttttttcttttttccatatatatatatatatataaatatatatatataatggatatttttttaaataatcataattttacaaaacaaaagaatctaccatcatataacaaagaaacttcctttcaaatattgcactattttaaaataaattttacacatttatattctatacatattaaacgcactcaagccgccaagtgatgctctaataaaatagagaaaatcctagaaattctaagaaaaaaataaaacatctaccccttgattttcacttaaattggtttgtccaatattatacaccgttagataaatcgatcttaaaacaaactaaatatcatgggtcccacctatcctcctcccgcgcgttggcaggtggcaggtggagtatatacgtacgtacatgtatgtatgcttcctttcttttcctttttttcctttttacatttatatatatatatataatggatatattttttaaataatcataattttacaaaacaaagaatctaccatcatataacaaagaatcttcctttcaaataatgcactattttaaaataaattttacacaattatattgatatgtacctattaaataaacaatatctatattaattaatttatacatgcacataaattgatggccccattacataaatcattagatctacttttcattaccttggtctattattccctgtttcaaaataaggtctacaccattatattgttacccattaaattaacaacttaaaatctatattaactaatttaacttacactagaactggtggacttattattataatcatcggatctattgtttgctaataaataaagcgtccaaaattctctttttgcccactgcacaatacacatatgcacctttgcctttcgcatgtgtgacaaagtgtagtgtctgagacatataaggtgatcacaaccgctgtagagctaccactttgccacaaatcaaatcatatatggagatgattaattttgttaataacatgaaaagaaaattaaatatgtgatgcagtgagagaataattaagtaccatggattgtgtttttctcaacactaattagctctgtttaagttgaaaccgagagttgattacgtaataattataatgtatctatgttatgtcgtatttggattttgtactatttgttcgtataggtgaaaggaatcattatgttataaatgtgagcgcaatattgacgaatattgatagaactcttactacgacaagggtgataaaagggaatttaaggccctctctttttttcccgattccatattttggaattttgtttgcatgctttccaagtttctaaatagtgtcttctttaaattaaaaacattctaactttttagaagtcaattcattcatttataccctcaaaaaaatatcacataaattatataattcatccatttcaaaaaaaatatcacataaattatataattcatcaatttcagctatcctaaaccttaagtactacatttttttttcatgcgagtcatggtgataaattattaaagtcgtacgatgaatatgtaagaggtactttgaacaattgtaaataggtgtcaaaattaattgctattaattagacatctaatggcttgcaagccacaaaattaatttcactcaacatgtatataaacatggacgaagctggaacaaatattaccatatgtcccatacatatatattgcacagttaatattctaattacatgtgttaagcatttaacattccttaaaatgctctcaagctgcgacgtggtgctctaataaattagggcaaatattagaaattctaagaaaaaaacaaagtatctatttcttgattttcacttaaatcggtaggtccaatattacaaaccgttagattaaattgatcttagaacaaactaaatagtacgaggtcccatctctcctcccgcggcataggtacggacctacgtgcatgggtacgtacgcttcccctcccttttccattttttctctttcttcctttttttcccatgcatatgcttccctctctttattactatatcatgcgccttcatgagacgatttaatcaaaagaattttgagtatcttgcactcgcatttttcatttgcggtcatactacacggtatgcgtatagatggattatatgataattaactagcaatagttttttatttactcaagaaaaaaagaaacatgattcaaaatcgtaagtacttaatccatctcctacttaagtttgtgaatggttttttaagatacgttaagaaaaatagaacccttaaattattataaaataatattatccaaacttatttagtttgcccttaatctatgagacaaaatttctgaacaaacaataatcttacctttcaataatataagtgcccgtgcatacgcgcgggccacctttctagttattatgtactaaaagtccattaaacttcttcaaaacactctcacgtcgccacttggcgctctaataaattagtgaaagtactcctagtaattctaagcgaaaggcaaaacatctagccattgatttttatttaaactagtgaacacataattttgcatcgttagattagattaatctccggggcccctctcctaccaaagccctctctaggaacctgcggcacatagctgccacctcccgtacgcccctatttcttttccttttcctttttattggttgttaagatatttaatggcctattttatatagaaacttaaataaattcacacttctctttttttaacgtgaaggatgagatcggactatgcaccgcttgcatccatgcacttggcatgcatttgtggtttatactttttgagttggtccttttaaaaataaataaacagtatttttagtggttacagcttttaaattgtatataaccaatttgtgatcgatttgaaccattcggtatttctttacttaaacgatttcagctgcattgaactatatttcagaatacaagacaaatattacatgttggacccaagaccactaaattaaagacaatcattaaaaattctcaaacttttttttatggaactgatcttttgacggaaaatcatggggcaaaacatgcaaattttccaccgttggatatgctttaagatgcatgcgtggaagtgagaaaaaaatcaaatggcgcatggataccaaggatcgaactggcgatcgacgcacaaaacactagagcatgtgttcactgccaagctttgtaacattttctattttacattactccctccaactttttctattttacaatactccctccatctatttttgatagacatatttctaaatctaaaaaaatttacttttgataggcatatttcaatccaaccacctatcatcttattgactttctcggatttaatgcgtgactctctattattccacacaatattggctacatgggtatcgaggaatataaatattaataaatcacttgtttacgaggaataactagtagcatgtttaaatggttgataagtataattacttatccttggtcgttatgacaagatgaaatatggctattaaaagtagatgaagggagtaataattacatctttcttgtactgcagttacatacgagttacaaatgtaattacactgctattttatgataattacatttgccagatttttagggggattttctaccgaatgttagataggcggcggttgcgcggcgtggcggcagctctagcagcggcggcgcgcggccagagattggctgcggtggcggagctcgggtgtggcggcgagagcgcggtaaagggcacgggagaagcggggcaaaaaaaggaaataggtggaggaggatgagggtagctttataggggtttgggaggggcggacgtggcagggaggtggccggattcttcgccaacgacgtggggaggtggagagagagagagatgggggatttcgaatccccgccatttgcgggcgcgtgcacgtgcgggagaggcgggggagtgggcgggtgacgtgggcacagagcgtgggcgcacatgtggaagaaggggagatcaactccggtcagaccggcggatcaactccgatcaaaccgatcgacattgattcgagggtaacttttaattccgctataaatttggtttttggtactataaccattcaccgccttttttggttggcttagttattgctgtttgatcctacaaacacctggtgacagcttgccctcacaaaatacaagatttcgtgaccaggtgacagaaatttgatgactgaatgctgtcaccaaatctctttgtgaccgcctttgggcttttggtgatggtgaggggcagtcgccaaaaaaccattctctggtagtgaacgacgtactacagtatacagactatacctaccgtttgatgtttcaacgagcacactttgaattttttatgggcgaaccggcgaagtcaaacgtgtgaacatgtgagctagtcatcccagtatatgcatgatcacaaattcaactgctgagcaacctctaccacttgaaaggtagaattcaaagtgtgaacaatttcgtcgcatacaacgtccacaccatatacagactacatcaatattgtaggagatgaacaaattttgtcgcaataaaacgtgggaacatgtgacctagtcacctagaattaatcccagtatatgcatgatcacaacctctaccacttggaaggtagaaatttaaagtgtgaacaatttcgtcgcaatataacgtccacaccatgtacagattacggctttgtttagattccaaaaaaaatttagctaaaaatatcacatcaaatgtttatacacatgcatggagcattaaatgtggacgaaaaaaaccaattgtatagtttgcatgtaaattgtgagacgaatcttttgagcctaattacgctatgatttgacaatgtgatgctacagtaaacatttgctactgatggattaattaggcttaataaattcgcaaagcagtttacagacgaaatctgtaatttgttttgttattagtctacgtttaatacttcaaatgtgtgtccgcatacttcaaaaactttacacccaaataactaaacacaccctagatcaatattataggagatgaacaatttggtcgcaataacacgtgcgaacatgtcacctagtcacctagaattaatcccagtatatgcatgaccacaactactgagcaacctctaccacttggaaggtagaaggttcagcgttgtactatgctacacttgttatagctagttgccagtagtatattaattattgtatgagttgctgatcgtgtaacttctgtagtacgttacgactgtcatggtgtatatataaagtcgccggcttcgaggtcatctgcgaccgcacgttcagcccgccgcgcgccttcctcgcaggcgacccgccattgttcggcgacaagtggccgccggacgtgtggacttgtacctttacttaattatttccaaactggggatgccagccaaagaagatgcggatgacagcgcagagacgcagcaatatgtgggcatgaaggggctataaatagatgagatggacatttatgatggatcatgcataaacacgtacacagactcaaatatttatgcctagctgctgtaggttatacatatattgagcaaaatgttgatgatcctgccctgtagattgctgctgcgtctagtcctcgcaacccttctgattttggctgctagtacagatcaacatgtagccacgctgccgccgataacacttccaggctgcatcgacaagtgcggcaacatcagcatacccttcccgttcggcacgaagcagagcagttgcttccttccaggcttcgaggtcacctgcaacgacacattcagtccacctcgcctcttcctcggaaattctaatcctggagacaggcaaaactatcaggaatttgaagagcgctactacttgacgacggaggaaggcatgccgacacatctcatgactgatgattttttgttcatggagctgatgagcataaacctcacagagggcgtagcacgggcatatggccctgtgagctcggattgcagcctcaacgacacatatcatttggtgaagaggcagatgacgggcttggccgggccattcctcatctccacgcgcaatgctctcacagccgtcggctggaacatggaagcaaacctcgcgagatcggtgcgtggatccggcttcctcaagacctgtggtgtgcggctcgggcaacctgaatttgcaacgaatgggtcatgcctgggaggaggctgctgccagggtgaaatcactcaaggcattggctctatcgcggtgtccttcctacggcagaacaactctttgtgagggattactccctgttcctacggcatggtggtggagaaggactggtacaacttcacttcgccggacctctattccgacaacttctccaagaaatatccaaagggtgtcccgctagtgattgacttcgccatcagggatggtttttgcccagcggcaggccaggcgccgccggcgaactatgcttgtgtcagcagcaacagctcatgcgtcaacgtgaccaacggtgatggttacatctgcaactgtagtaagggatatgatgggaatccttacatacctaacggatgtcatggtgcgttctcctcctctctgtaactctacatccatatattatcgttcttgatgacattgatgtgatatactcactccgtattttaatgtacgacgccgttgactttttgacaaacgtttgacctttcgttttattcaaaaattttatgtaattataatttattttattgtgacttgatttatcatcaaatgctctttaagcatgacataagtatttttatatttgcataaaatttttgaataagatgaatggtcaaacgttggttaaaaagttaacggcgtcatacattaaaatatggagggagtataacaatattacaccatgagtacacggatatgtgaaaattaattgctgtttgcgcacagatattgatgaatgtgccctccgagatagccatcctgagctccgagtcctgtatccttgttcaagaaatggaatctgcatgaacagaccaggcggatatgattgtccatgcaaacgtggaatgagcggtgatggcaaagcaggaacttgctcagagaaatttcctttacaggctaagattgttgtaggtacgtgacattatattcgcggtgatatttttctgccatcatgaaggaactcataatgcatggatacaaatcccttcatcaacaacttcgtttcgaaaagaaccgttctacatatatactattgctttacagtcaagaaaacacttcgtttcgaaatacatctaatgatcctagaaaataaccattctactatgatctaagcatttataatgattatacaagaatgcaatatgtagctttgtaatagctctacttggctgagttagacaaactaagttgggaactcatctctcacgtacgcaaaacgaagcgactcattagtgcatgattaattaaatattagctattttttaaaatggattaatatgatttttaaaataacttttctatataatttttttaaaaaatacgcaccgtttaaccgtttaggagacgtacgagtgaaagacaagtgggatgaagttgagaacactgagtagagaacgcaacccgtaattgataggctcacaaatttttgggagcatatggtgtggtacaagggcacttgtcccgggtggactttattcttgtagaacccttttacagtactccaacatacctctagggatgtaacaggctacaattgttactagtatatttttcctaagaaaaatataattgctcctttcatttaatatatcacagaaaaaattaaaaagaccaacgctcattaattgcccttccataactcaattatgcaagcttgtagaagttaggaactatagatatgtattgaaatgaagatgagcacgtcaatttattcttaaaatatgtatatgtgaaatcatacatgaatataatttaaatactgtacatcacaatttttttactatacatttaaattagaaatcgcataatacttttctaagtgtctatatattttagtgttctcaaatcagattagaaaagacttgcctttatggtccagtcttgattttaaatatgattgagatttgattcaaacaaattatattcagggtgctaaacataattggcatatttgtatttcaaatttgtaaacagaaatatgtgatatagttttacaaattacaccacgtgtcctatgaacagtgttaattttaatggcacattaagggatatatttcattccttattctgaggtattacctccaaccagataagggcatgtaaaaagctagagttcgatttaggctcttagttaatacatatcacttagagcaagtcatatcagctcctatatgttgctcataaaatttgccacataggattagataatgacgtagaggaaagaagttaggagagaaaataagccattcctcatgcaagggataacttccacataattttcaagcaaagtgcacgatggtgttagggtttgtgtattagatgtgatacgttgtacttgttacctcttaattaatgagtagatgatatgatttaaattagaggtgacatcaacctccactgtaaaacttgcttttagagactttttctataataattaagacaacaaaacatcttacccattaatgcacgaaagtaagtttttattaccctagtttccttttctttaaccccatgcaataaaattttatctaataaatgctaagagtcgactaaaaccgttgtaatgcgtagcaactatgtttccctttccttcccctctctcttccacatcggaaaaagagcccgttattagataccgttatacttttttttaagataataataccgttgtgcatgccctaatagatcacacgtaccattgcttcctagtataatgaacggcgaaaaaaaaactgagctccttaaaaacttcattttattaagataaccataagggtgaattatatttttatataaactcagtcaaacgtttgatttacggccagacgtgcttatatggtcttcaaagaaaaaactgtgtactcggctgtactcgccagcatataccagaggatcccctcgacgaggctgctgcccaggttcccgtcgttgtggatagaactgcagcctgattcccacactgagcagatcagtcctctgtctagcataagattgatatggactgggagttcgtaatccagacgcccacaaagctctattacttttccttccctcttgtctcatccctgagttggtgaatttaatcaatggcagcacggtttagtaattcggtccgttgtgtcaggtttgatgtaggctacatataaaaacaaaacaaaaaaaaaaacagatcagcttacaaggatttgcttttgggaactgttctcttttagatcgatcttggaccatcattggcaagaatggattcagggactaattttagtccctatcacatcagatgtttggatactaatttagagtattaaacatatattaacaataaaactaattgtataaatgagagctaattcgcgagataactttttaagcttaattaattcataattaacacaagtttactgtagcatcacataggctaatcatggattaattaggctcaatagatttgtcccgcgaattagtccagggttatggaatttgttttatcattagtctacgtttaatacttttaattagtatcaaaaatccgatgtgacagagactaaaaattagtccctggatccaaacataccctcagttgttgactagaggtttttagtttgcgacggtggcgagcaggacaagttcccagtatgctttggtgtggcctccggacttgtaggaacggagattaactccctcaaggatgatgtttatactattaagtacctcttcttcaaaagttgtgctgtttttttctttgaagagcataaaagcacatctcgtatttgtagtacccttggtaaatgtaacgagcattttcaaggtgattctatatgatattttaaaattttaatgtattaaagatttatccatgtaccacatttagtatttacaagttaattagtcattgacatccaagcaatttaaaattttgttattcatttactctaaacagtatagaaacaataaaaatatcattgtaaaactcaatccgtcagtttaatatttatagcttcatgatacattattgtggttcgtttcaatgatattgagtactctattatatattccacatgcaggtgcaataggtggtctctttattgtcgcagtccttgtgttccttgcacttgttcacagagagaaaaggaagatgagagaattttttgaaaagaatggtggtcctatattagaaaaagtcaacaacataaagatattcaagaaagaagaactcaaaccaattctgaaagctagcaatattattggaaaaggtggattcggagaggtttacaaaggccgtcttgctgataacaaactggtggccgtaaagaagtccatcaaagtcaatgctgcacaaaaggatcaatttgcaaacgagatcatcatccaatcccgagtcatccataagaacattgtcaagctgataggttgttgcgtagaagttgatatcccaattttagtatatgaatttatcactaatggcagtctcgatgacattcttcacggtagtaacggagaacctctcagtttggatttacgtttggatattgctgccgaatcagccgaaggtctggcatatatgcattcgaaaaccaccaatacaatcctgcatggtaatgttaaaccagctaacatacttttggatgacaactttgttccaaagatatctgattttgggatttcgaggctaattgccgtagataaaaatcaacacacagataaagtcattggtgacatgagttatatggatccagtttacctacaaacaggactattaacgaagaaaagtgatgtctacagttatggggttgttctcttggagctcatcagcaggaagaaggccacatattctgacaacaatagcttagttcggaattttctagatgctcacaaagagaaaaggaaagcaactgagctgtttgataaggatatcacgctggcagaagacttggacgttcttgatggtctcgtgaggattgctgtggaatgtttaaaccttgacgtggatcaacgaccagaaatgacaaaagtaacagacgatcttttcatcttgatgaaatctcgagctaaagagaccaagcagtaaccagacaaaagttgcaagatgcataagatattctacatggttcagaggatttggggaggtaccatgatttctagcttatattttggtatccttgttatgcgttcttagtgttaagataccttgatgtatcataaagtgataaataagatgtcgtaccatcttaaaagtattgtaaaattactcttattgttgcattgaatctgtgtctgtaaaataagactgaggccaactatcagtgtggttgtggaaaaatggcactacgagacattgaatgcatcagtgtatataacttcagtggggttcacatcctatagcataatggcactaccattatagacattgacgtatggtgcaataggagggtgagaccccataccagtgattgtaatggtagtgacattatagtagaggatgtaaaatcaaagtgtgtttgattcttattatgtgatgaacaaaatgacatatcagattattggttttgatatttggagattattagtgaagtggttttggagatgattggatttgcaggtgatgaataggtgctgttggatgttaggtccggtcagaccggacattggttgccggtcagaccggcgtgtatcgagcggtcggaccggctagcccgtggtctgaccggccgactttgtgttggtttcggtttcgggttgtttcgttggatatccgtggttagttcatgtttatggcttctagatggatactatacgcatgtaataccattgtttgctaataatgagtcaagttggagatagcttggtctcggaatatggtttctttgtttgatatatgtgtagttgtcttgatgcctcgggagagtattgccgatgatggatcgggagtcaacttggagataaggtggcatccggacagttagatatcatgcgggatacttaggctaaacatcaatgcacgtagttggtgaagattccattgtgtgcatatgggatacgaagttgaatttggaaggagtccaaaattagtatgattggagtttgtaaagttggtttcttgtacgggaaggtttcctaggtggattaggatttcttgtatgagtttggttcgtggttttatgctgcctagctcatccctactttctataaagttaatgccattcacatcacctcaattgtttttagcctttgcatgattcatcaagagtgtaaattacatatcttcccccaaaagacacaccatacaacacaaccatttataacctatggataattgataaaggcacaaagatatataaatacatgaaaaaaatcatatagtaggtaagaaaattttttttggaattcatatctactatattatcacacagttctcccatagcaacgcgcggggtatccatctagtgtataaatagatggagggtgtggcatcccagtatcgcttttgagagcattgagttgagagattagttagggtttcgaggttagtcgagattttcgtgaggagtgctgttgttgcactttgtaaacatagatagaagtaataaaattatcatctacaccaagagttcttcaatttgtatttgctcgggttcgacggtccaaccggtgggatactggcgatcagaccaacggcattgcggcggtcaaactagcggagtaacagtggtcagaccggcagcgacaacagacattggtgacaagtttcggtggttagaccgagagatcaataccggtcagaccggcggctacggttcggtcaaaccggttaatctacaccggttagcccgtgattcatcgattcgagggtaaattttatttccgctaaaatttttgatttttgggtactacaaccattcacccgtctctggttggcttagttcttactgtttggtcctacggagaattctcacccaacttcactgttatacctcacgcttcaatgaagcattttcagaaataaactggagataagggtgaacattcagcttttaaagcattgcttggatagacgatgtctaactgtaccaaacagaccatacttgtgctacaattggagttccgacgaagacatggcaatcggtgaacatggggcatcacatttctctttttttccccgttaaatatatagtggcacattgcggagtgaaatggtaaacttaaaaaccagagttgaatatattttcccagcccatcaaacacatacgggtcatctcaacatcttaagcacgtgaaagaccggtgcctgctatagagggagggtgaatatggctttctaaaaatctttacccaaatactcgctcaaaattcttccacaatatctcccttagacagaagctatgtgataagctagatttagcagaaggttgagaaaagatacaaagaatctagttgggatgagaacttcaacctcccaaatagctcgaaagtcatatgaggttgcctttccgttcatcgctaggaaaacaagagccgatagaattagaaggagaatagaaacacactccacataaatctagaaagggagggggcaatacccataaattgatatagtataaatttaaattatacgaagtaaatacaaaatttaaattgcacaaaataaattcaaatcaactcataacaaaagagtgttcgcatgttagggttagggtttatgcgccacccgggtgaccgggcggcggcagagctctcgcgtgtggcgagatgggtctggatggagatctcctccaatatgctcctgatgtctccgggggttttacccgccgtgggttgttctgggggggatttcctccctgtgttgaaacgtgatctggtagggtggcttgatcatactcgtataggagataagttgaaggctttccctttaggcggattgatctatgggaagggttcgttctctgctttccatattgttccagtggatctgtggcccttgcgaaattctggaagggggaggagattgaatctgttttggcatccgaagttcgagttgtattggaatcctaattctgtggctttgcagtataaatacaaggcacagtggtggccgaaggtgcggttcaaagtttttccggagatagggctaggcgttgtcaaccccgtctctttgtttgttggatctagcggaagtcccatggcggccaatgtcggtgggggtgataaagggatcgtcattgggataatttcccacccgaagccgacgagcggtaatgagacggacgcggtgattctcgacaggattcctctgaagatgatcaagggagcagcgggcacatctgatcagggccaggaacacacaacggctgcgaggaggggatctgcagagaacaaccaagttgatgcaacacagggtcctacggtgttcaccgaaggagatctggtggaggatgatgaggatgtggttgtggtgaatattgaggatgatgaactgcagactgctggcctgtggacgatcttggcgaggttctattctctgagaactccgaaccaagtggccctgtttgacgacatgcgcagagcttggagattgagagcagatataagctacaaatcactacgtgacaacatgttcatcataaccttctcggcagagggagactatgattttgtcattaaagggggtccttggattcatagaggagatgcgctcctggtagcgagttttgatggcattacgtgcccatcaaacgttcctttggatgttgttccgatctgggtgcgcatatatgacctccctctggtgttgatgacaaaggtaagaggtgagatgtttgggagcaaactcggcaaagttcgtgaggtagacgtgggggatgatggacgcaacaaacatgattttttccacattcgtgttgatctccctgtcaagcgtcctctgaaatcacagatagctataaggatgactgtccaaggcaaggaggtccttcgcaggttcgatttacattatgagcgggtaccgcacttttgctttatctgtggttttattggtcattccgacagagattgcaatagaagatctgctaatgaggagcaacctttccaattctcagctgagctacgatgctccccccttaaaccttttgagaagaagatcagtaaagtgaaagctgcccaaacatcaagtgttgcacgtaacttgttcttcagaggggcaggaagtgctagttcgttgtcctccagacacaaacaagatggtcagatgcaggaagcaataccgcccagagttgatgcccatgatgggtttgagtttaaggaaagggaaggggacactgcaatcgatgagatgttagctcaacaggctgggaagatggatgttacgggggacaaaactcagggaacatcgatggttgtccctgctgggaagctagcccagcaacaatcggagaaggaagcacccaagaagactgatggtgatgaaatttctgcttctgagatgataccagccatgaggaaccttcaacagcaagcctcgtttggggaagtgtcatccgaggagatcagcgatgccaataggaagaggatgccagaccagtcaggactccagataaaagggagggttcagcaagcattgttggaataccaacaatacacaggtggcagcaattccatgcatggggatatcggcaaggcagctagagcagtgaagagactcaagaaggctgtagagggtgaggacacagacgatatggaggcaaccagccatggggccgctggtaaactgacgggacctgtgattgggtcccgtcaggagcaatgagttgcttggcttggaactgtcgcggtatagggaacgcggtgacagttcgtgacctttgtgccttagtgaaggaggcaggttcccatattgtgtttttaagtgagactaggcaaaagattgagaaggttcgtaggctgcggaatagattgggtttgaggggttttgctggggttaacagtgatgggatgagtgggggtctggctttattctggcatgagtctattcatgtggaaattataagtatgaatgagagatatattgacgcgtatgttcgtttatctgtgaatgctcctgtctggcatgctacttttgtgtacggggaacctagagtggaaaacagacatcgtatgtgggcgttgttaaattcaattaagcaagtttcggatctcccgtggttagtggtgggtgattttaatgagactctttggcagtttgagcatttctctctaaaacaacgaagtgagctgcaaatgcaagcctttagggatgtggtccagagatgtgatctccatgatctggggttctcgggggtgccatacacttatgataataggagagaaggacgcagtaatgttaaagtgcgcctagaccgcgcccttgcagatgatgggtggaggggactgttctctacagcacaggtgtttcatctgtcctctcctagatcagaccattgccccatccttgtcaagtgggaatcctgtgaagtgtgtccattatgaaatttactgggaaagagaccctgcaatctctgaagttatagcagaatcttggggcgtctccggagttaagcaggatttgagcgacattagtcaagctctgtttaggatgatgtctgatcttcgcacatggagtaagaaaaagttcaggaatgtcagccgggagattgagaaaaatagaaagaaactatctaaacttcttctaagtaatgccaacaacagggaaataagacgggtgtccgattaaatgaatgaacttctgtaccgtgaggagatgatatggctgcaacgatctcgaattgcttggctgaaagaaggtgatagaaatacacgcttctttcacaacaaagcagtgtggagagctaagaagaataagattacaaagctacgggatagtgacgatactgttcacagtacgacaaaagagttggaacgtatggcaactgagtatttccaaaggctgttcactgccgaccccagtattgatcattcgagagtcactagcctgatgaagccgaaagtcacagatgcgatgaatgaggaactatgcaaaacctttagtgaagaggaaatagcaaatgctctgttccaaattggtccgttaaaagctcccgggccagatggattccccggtcggttctatcagaggaattgggctatactaaaggacgacattgtgcgagctgtacaagaatttttctctttgggtaccatgccttcgggggtcaatgagactgccattgttctgataccgaaaactgagcaaccacaggaactaaaggatttcagacctatcagtttgtgcaatgtggtctataaaatagtgtctaagtgtttggtgaacagactaagaccaatcctggatgatctggtgtcacagaaccagagtgcctttgtccctggtagattgataacagataatgccctgatagcattcgaatacttccaccatatacagaggaataaaaatcctgagaatgcttacagcgcatacaagttggacttgtccaaagcgtatgaccgtgtagactgggaatttttggagcaagcaatggttaaactgggtttcgctcactgttgggttaaatggattatggcatgcataaccttggtgagatatgcagttaaacttaatggaaccctgttgaacacctttgctccatcacgaggtctgcgtcagggtgatccgctttcgccctttctattcctttttgtggctgatggactgtccttcctactagaagagaaagtggatcagggagctatgaacccaattcatatatgccggcatgctcctgctgtgttgcatttactgtttgcggatgacacaccgttgttctttaaagcggcaaatgatcaggcggtagtgatgaaagaagttctcgaaacttatgcttcctgcactgggcaattgataaatccttccaaatgctccatcatgttcgggcaaagctctcctactgctgtccaaaatcagataaagcagaccctgcagataagtaactcctttgaagataaatatttgggctttccgacgcctgagggtagaatgaccaaaggaaaattccaaagcctccaggagagattatggaagagaattatgctgtggggggagaaatttctgtcaactgggggaaaggagattttgattaaagcggtcctacaggccatgcctgtttatgttatgggactcttcaagctcccggaatcggtctgcgaggaattgacaaaactggttcgtaatttctggtggggagcagagaaagggatgaggagaacgcactggaaatcctgggactgtttgattgctcagaagttgaagggaggtatggggtttagggatttcaggctgtttaatcaggcgcttctagctagacaagcctggagattgttggacagaccggacagtctctgtgctagaattttgaaggccatatactacccgaacggttctctcattgatacaagttttggaggtaatgcctctccaggctggagagcgatcgaatatggtttagaattactgaagaagggcatcatatggcgcattggcaatggtaaatcagtcagattgtggagggatccctggattccgcggagctattcaagaagacccatctcagctaaaagaaattgcagactgagatgggtttcagacctgattgatcagtccgggtcctgggatactgacaaaatctcgcagcatttcctgcccatggacgcagaggccatcctaaacattcgtttatcttcaaggctggaagatgatttcattgcttggcatccggataaactggggagattttctgtcagaagtgcttatcatctggcagtagctctggcacatgttgatgaaggctcgagttcgtccgggaatggaaatagcagagcctggaatgccctttggaaatgcaatgcgccccaaaaggtgaagatttttgcctggcgagctattactaacagccttccaacattggaaaataagaagaagaggaagcttgaagtttcagacatctgaccatttgtggggtggagtcagaatatgttgctcacgctttgtatcgttgcccacatgcccggtaattctgggaagcgatgactgttgatatgaagcttaaccctctcagtaacattcgcaatggagatccgaaagtgatcctggacctgttggagcagtcgcagccggaggatcaggtcatgcttttaatggtactgtggcgaatctggcacacacggaatgaaatagtgcatggcaaaccagctccaggaatgctagtgtccaaacgtttcattgaaagctatgtgctctcccttgctgagatcaagcaacacccccaagcaagtcctgagaaggggaaacatgttgtggatgtggttcaaaagaagttgcacagcatcaaacggagtcgagaacctgttcctgacaaatggttgaagccgctcccaggaagcatgaaactgaatgttgatggctcattccaggagagtgacggcaagggtggtataggcgctgtgttgcgcaattgcacaggagaggttatttttgctgcttgtggacatgttgattgttgtagcagtgctttggaaacggaactccttgcctgcagggatggtcttgctctcgccctacaatggaccctgctgccaatagtgattgagacagactgcttggcgatgatccatcttttccgcgatgcaacaggtgctaaatcggagctggcgtttttaatcagggagatagattctctcttggtgggaaatagggatattagcttcagtaagtgtcttagaagtcaaaatcatattagccactatttagcaaataagggccgttgtgacaagatcacacagttttggccggacaataagtgtacttttatctcgcagtttatctgtgaggaggctaatgagtaattatccctttcccctgcaaaaaaaaaaagagtggaaccaacacactcaaagatacaccttcacattatatttgaatttgaactcacacaaaaagccctagatacactctcccacaaagcacaagggacacctcaaacctgcaaaaaagggcaccaaggggggcaggggtgagtttacctcttttccgtagtttctaaatcatcgataaatcgtctataaaaaatactctgttaacctggaggaaatcctattgaacattacggttaataattggaattatcagggagaattttttttgaaattctctatgcttaaaatcattaacaggactttaggggaatattcagagcagaggaagtaataatgttaatttaaaatgtcaggatttgaattaataattctttcctccccctcccgtggtcgtgaaccgttcttggttcactgtccccgtgcgcggttcgtcgtatccaccgacccctttgccgctttgctttcgttttatatgacgagccgagtcctattcctattcgagtcccattcccttttcctttcctgaaacggcactcccactttcctttttaggttccccttctcccgtattctttccctcctccccagccgtgcgcgcgcgcctttccctctcccactcgaccgaagccgcccccacctccctctcctttgcgcgcattaccgccggtcccgccaaatccaactccacctccacctatataagtcatcataccctctcttttttttatttctatcttttgccgtcaaccctagccgcccctctcccgtgtgccaccctagcttgccgccgccctagccgccgccgccgctagttgtcgccgccgtattgccggtgagctcacctccctattatccatctcaccggtatggtttattgctgaggtttttccgctagggtttaatctagtctagactaatctgttgttatctagcgtcatcgttgtctccgggtgttgccgccggattgccgccgtcgtctcccggtgaggactccttttcacgccatgttttagttttgtgcgtcgccgtcgttgtgtagtcactgttgcgttgttgccgccggcggtgccctagcggcgccaccatgccatgctgctgctgcgcgcgctccgttgccgccactactgcaccgctgccgcgagttggccgtgctgcagcttgttgagccaagccaagccatgccctagtgccgccggtgccgcccgcgctagccgcgccaccgctgctaccatgttgtgggcgtgtcgctgctaaaccatgtcgtcgtcgctatctcgctgctgctcgtcacgtggtagccaagttgtctagccgcagccatattcctaagcctctaccagccttgccacagctgttcattagtcgttaatcattgttagcacgtagtgtagccaaagtctcgttcgttcggtcgttttgagtcgttctgagctgccggttccgttcacctgttcggttgaccatttgagtggtcccgtgtcacggtaggttgattcgttgagtcgctaacccatgaggctcgcttaccggtgttatattttgtcacaccctaaaaatcttaaatatataaattgttgattaattggaatttttagaaattattttaaaagcctacaagctaaaccctaattttctaggaaaattttcaacataaaaatgagctagataaaattttattaaatactatgcttgctcctctattttctagaattttctgggaattatttgagcaagggaagtatttttaataattgaaacaacattttacaaattgttttattcaaaaaagttcaaaagttccccttcttggtccttgggccgaattcggcccaactctctctttcctccccctcctccgcgcgcggcccacgccggcccaagccgctgccgcccgcgcccctctcgcggaggccgacaggtggggcccacctgtcgggatcgtctccctcctccggccggcgccgccgcccgagcccgaaccctagccgccctttctcctctcaattcgtcctaa

SEQ ID NO: 29702 - DNA, 719 bp, Oryza sativa
tccccctcttttttcctcccctctctccctcgggcccgttttattctcccttcttccctctcggcccagccacccggcccaagccgtggcgccccctggccgagctgctcccctcccgtgccgcgcacgtgcgcgcactgacgacgcgcgccccacgtgggacccgcctgccaggcgcgtcttcctcctcccgctcggcctcttctccctcccgtgaaaaccctagttcgttcctccttcgaatccgcgcaatttaagcattggattccaaaattgattagggggaattaatcccctttccctcctctctctttcccccttaattcccccttgattcgtgcccccaatcgccgggaacggacgcgccaaccccggccaccttccatgggcgccggccacaaactccgccgccgttccccgctcctcccgtggccggctccctctcctcccctataaaatggaaccaactctttgcgttctatcgttttagcctcctcccgcgtcttcccgtggccacaccacctctccccgccttctccttctctctctccggcgccggccggcatccagccgcctctccctcctcgcctgagtgccgtccggccgcaccgtcttctctctcggcctcgtaggtgcatcctcttccccggcgccgcctctgattcgtggggaaatcaccggagacacgcccccgccggctacagtggcggcaacaccac

SEQ ID NO: 29703 - DNA, 2120 bp, Oryza sativa
ttggccatttgaactcggaattggactgttcaagtctctaattttttcttaagaagtcaagaacccatttttgtgctttgttcatgcttgttatatggagtttattagagtaaaagcccttttcttttccgttggtcgtgtagatgctgcagcttcggaagatccgctcttcgtggaggttgaagccaacgtttgggaaagcgagcaaggcaagtcacatcattctttgaacatattggatcccactttgtgaaattactttgatttaaattattgcattatcgctttacttaaattcccgcgttatcactgttttatttagccatgcctatttacctttgttatgaccttattattgttgttattgttattattaccttgttcaccctagaaaaaacaaaaccccaactagtgggcactctattcatggttccactagtatgaagttaggtagatgcttcgctgattaattaggcaacattaggtggttttataactctagactttgggaatattcatatcacttgtaccttatggaatggttgatttattgtggaactggatgcacacctccccctctattcaaaactctcaaaatggttttaggctgggcttggggtgcatggttttgatagtagcacctcggccacataaggaccggtcttcgggcctcggttgcaaagcactaccatacttccacatgtctagtgggtaaggcttagtttgtggctcagtctggttataaacaaaagtacacggatggagatggacgaagtcgggggtcgatggacatctctaggacaaatgaaggctacacgagctgcggcccggtagtcgagatgtcgtggcacagggccggtgtcctgctgttaggggctcagtcctgcctacctgtcccggaggttccggccgtaggtggggttgggtcagtactcttgtctatggctaggatgggttggaaactatgtcatgtcttccgtccatatgccgtggtggtatgcggcacgtggttgcacgtgaggaagacgtgtcttgtgggtaaagatgtacacctctgatcagagtaaaacctattcgaatagacgcgccctcggttatgggcaagcctagcaatgtacccaagttagtgttttaaattcttaaaacctgtttaacaactaaaatgtggaatggttggcctgggttggcttgggacgagctgggacccagggtcgggttgccagttcggtctgaatcatcgtaggccttgggttaaggcaggttcgtgcgggttcacggccttgatttataatactgtgtagctctaggatcgtctttttaaaatggctttgggtaactaagtgacttttaaatcctatttactgcaaaatttaacccctattattagctccttgtacccccttgcattaatcatgcatctcccggtgtgatttgctgagtacagtggttgtactcattcttgctctatctttcccccccttcagtaagagaagctttagagaagaagtcttaggtggagtcctggcttataccccagttgagcgcctatgaagatggagccgtaggcccgctagtccgctgctgtttatttttgtttgtcaggcctgaagtgcctttgtaataatgtaaatattatcgatataataaagatgtgccttttgtatcatgtttgtttggtgtaccccggcttttcctgggacggggattaatacactagctttcgggaaaaggcaattttctcggtcgcgacaaatcatattgtcggaattggcttgatcggctaacctagtccgactcgaactttgtcgattaaggtcgcagccgattcggacttagccgattcttgctccgtttccacaacgatatttgtcttggattccgcttcgatctaatcttcatatccgatactcagattagcaaatttggttgttaacagtaaccaaagcaagatcaccccagaagtgatgagccatgatgaactatacaaggaaaattgatgcagtcagaatcaatgaggggtcagccaaacctccagttcggctgaaccacctctaccatgaatcgtcctctgttttataaagagcgcaggtttgcacgattggggatcctctagagtcgac

SEQ ID NO: 29704 - DNA, 2072 bp, Oryza sativa
acattatggaatggttggattattgtggaattggatgcacacctccccctctattcaaaacccccaaaatggttttagtctgggctcggggtgcatggttttgttagtagcacctcggccacataaggaccggtcttcgggcctctgtaacaaagcactaccatacttccacatgtctagtgggtaaggcttagtttgtggctcagtctggttataaacaaaagtacacggatggagatggacgaagtcgggggtcgatggacatctctaggacaaatgaaggctacacgagctgcggcccggtagtcgagatgtcgtggcacagggccggtgtcctgctgttaggggctcagtcctgcctacctgtcccggaggttccggccgtaggtggggttgggttggtactcttgtctatgactaggatgggttggaaactatgtcatgtcttccgtccatatgccgtggtggtatgtggcacgtggttgcacctgaggaagacgtgtcctgtgggtaaagatgtacacctctgatcagagtaaaacctattcgaatagccgcgccctcggttatgggcaagcctagcaatgtacccaagttagtgttttaaagtcttaaaacctgcttaacaactaaaatgtggaatggttggcctgggttggcttgagacgagctgggacccagggtcgggttgccagttcggtctgaatcatcgtaggccttgggttaaggcaggttcgtgtgggttcacggccttgtttaataatattaaatagtcctaggatcgtgttttaaacttagctttgagcaattaagagtcttttaaatgctgtttattgcaaaacctaacccctatactataactccattgtactcctttgcatttatgctgcacttgtgggtgtgtcttgttgagtacggtgattgtactcagtcttgctcaatttttcccaaacccagaagaggagcccctagatgatgaatgctttggtgtctagctcgtgcctgccgtcaagcgcctgtggtcatcgccttagtcttccgctgtttttcgttgtctttgagtgtgctgggccgtcgctgcccatgtaataattaactatttacgcttccgcttgttaaactctgaattgtatcaacttttggtgtaccttgcctcctgggacaaggaataatacacgcacgtaaggaacgcccgttgggttatttccggtcgtgacacctgtggtctttgtagtgtctaccatgtgatcctgagcaattgagaaattgaacaatcttgacttaagtcagcctaacttttcatgaagaacaacgtggggttttttccagtaacacaaaattacaactttgctttactccaccaatgattctctcaatcactcaaagtgtatgattcctcacaaaggcatatgattgtgccttttcttttcctaccacctaataaggcatatgtggagctcagggtatgaaaaagagtagagcattacttgcaccacatatattgcaaagtcaaataatggatccgcggaaatagaagacatactttctggttaagaatgtgcatgtgtatgtgtatggtgaatttgtaaaagaaaaataagaataactccttttgtatacctcctctccatttatttattttttttgaaatttcgaagagtacatggctatctttttttccctttttttcttttttttctcatcatcatgctccatacttgtatgagcactttttttttatttctttttgctaagccatgcatctctcactctttttttttaaagaactttggaagaagaggcataaatttcatggagtatttattttgtggaatgtggatgaaatgaatgataaatgaggaatgctaacttcctgtgtagaagtcaagcattggtgggtgtatgtggagtgtatgtgatcttgaccataaagtatgaaaagcatatcactagggtcacaaaacttgacaacgctcaatgtattgacaagcagcgtatctagcaagctaatcatgaacgatcaacctatggctctagtgggaataaaaatatcaatgaggtatttaacatca

SEQ ID NO: 29705 - DNA, 3072 bp, Oryza sativa
ttagtccaggtttataacaccaaccgggagtaaagttgggggcctgacaaggactaacaggtttagaaccgagactaaagatcatctttagtcccggttggtgccaaccgggactaaagatcaaatatgcccactgtagccaccaaccaggactaaagatcatctttagtcccggtttttagtggaatcgggactattgtggatttcggccgaccgaccaaagattggtttctccaccagtgattagaaatatagatttaaactgtttttgctgtctcttgtaagcatttggtataaaataatttagcaattttgaattaataagtacagaaataaacttggtttggagttaagctttttcatgatttaatgattcctatattcatagttattaaatatcaagttgtattccatgtggagtaaagtgaatgaaatcgattggagcgagagataattgaatgacccaatagagcgaatagatttcaagagtacatttaaaaaatgtgaagcggtagcaataattatacatgagttgaatatgatacactacgccagatcctcacacttctgacgggatacctatgacgggcaacggatttggtcactagtgaccattacctctgacgggtcagacgggataacgtcaccggtgagccatccggccgcggaccgtcacaggtatcccctcacctgtgacgggccgaaaggaaaacccgtcagaggtataccagtgacgagttttgcttccaacctgtcactggtatcccctcacctgtgacgggccgatacattagaagccgtcagaggtgatgggccgccacctgtgacggctttcatttctggcccgtcgcaggtgaggggataccagtgacgggccgttgaacagaagcccgtcaaaggtatgagcaatacctttcacgggctttttttatctaacccgtttgaggtgtgttgggtctataaatacccccaaactgccaactgctttccatcccgaccattgtactgttcacaaatcagttgggagggcaaggggggcgattttttgctaaaattcaaggtaaaaaacacattattctccattcattctcaacatatcgatcatcatttatttttcttcgtatgttgttgatttcagatggatcgtagatggatgtactatgcgcatcgttcgtctaccgagtatagagaaggggtcactgaatttgtcacatttgcggataatgacagaaaaagtaggatgagcatgcacatgttgtgcccatgtagggactgtaagaatgaacagatgatcgaagacaaggatgaagtgcatgctcatttgataatgaatggattcatgaagaaatatacctgctggacaaagcatggagagcaagaggcgcctgatgtcgcagctgaagaagtgttggatcaggatgtagagaacaccgccgcaactcgagaaggcatgttcgtaccttctcctttaggtggagagaccatagatttggacactcaatgtctatctacaatgttgcatgacattgaagacgcagaggacaacgacagagattatgagaagtttagtaagttggtggaagattgccagatgccgttgtatgatggatgcaagtcgaagcacagcaagttgtcatgcgtgttggaactcatgaagcttaaggctagtaatggctggtcggacaagaattttacagaactccttgagctgttaaaggatctgttgccagaggggaacaatttacctgaaacgacatatgaagcgaagcaagtattatgtccgttgggcccggaggtcagaagaattcatgcatgtccgaacgactgcattttgtattacaggaatacgctgacttggatgtctgccctatctgtggggcatcaagatacaaacgagcaaagagtgaaggtgaaggaagtaagtcaaagaggggaggcccagcaaaggtggtgtggtatctcccaattgcggagcgcatgaagagaatgtttgcgaacaaggaacaagctaagcttgtgtgctggcatgccgaagaacggaaagtcgatactatgctgaggcacccagcagattcagtacagtggaggacaatgataggatttaccaggaattctcaaatgacccaagaaacatgcgtttcgcaatgtgtacggacggcattaatccttttggtgatttgagcagtcgtcacagtacatggccagttctgcttgttaactataaccttcctccctggttgtgtttcaaaagaaagtacattatgcttgccatgctcattcaaggaccgagacaacctggcaacgatatcgatgtgttccttgaaccgataatcgatgacttcgaaaggctatggaatgagggcacacgaacatgggacgcaaatgcacaacaacctccatgcgatgctgttttgtaccatcaacgataatccggcccttggcaacctttctggccaaactgtgaaagggaaatgggcgtgttcggagtgtatggaggaaacaagaagcaaatggttgaagcattcacacaagacggtctacatgggtcacaggagatttctcccaaggtatcacccgtataggaatatgagaaagaatttcaatggacacagaggtacacccggacccctgacagagctaacagggacagaggtgcacaacttagtgatgggaataaccaacgagtttggaaaaaagaggaaagttggaaagcgaaaagagaagagcacatcgaaggaaaaaacagaggagcatgttgaaaaacaaaagacaaaagagaggagcatgtggaaaaagaagtcaatattttggagactaccatactggaaagatcttgaagttcgccactgcatagatttgatgcatgtcgagaagaatgtatgcgagagtttaatgggattactgcttaacccaggtactacaaaggatggtctcaacgcccgacgagatctggaagatatgggtgttcggtcggagctacatcccataaccacggaatctggcagggtttaccttcctccagcctgctacactctctcgaaagaagagaagattgatttgctaacatgtttg

SEQ ID NO: 29706 - DNA, 1769 bp, Oryza sativa
ccctatgtcatcttgagatgtactttcctccaactttctttgacataatggaacatcttccggtgcaccttgtgaggcaaacaaagtgctgtggtccagcattcatgacgcagatgtatccttgcgaaaggtacctggggatccttaagggttatgtacggaaccgttcacaccccgaggggagtatcatcgagagttacaccaccgaagaggccatcgaattttgtgtggactacatgtcagaaacatcttcaattggattaccacgatctcatcacgaagggaggcttgacggtgttggtactgttggaagaaagactattaggttggatcggaaggtgtacgataaagctcatttcacggtactacagcatatgactgaggtggtgccgtacgttgacgaacaccttgcagttatcagacaggagaacccaggccgatcagagagttgggtcaggaataagcacatgtcttctttcaacgagttggctgaagaaccgaattgccaggttgcagaacttgtctagtgaaacacttcagtggttgtcacagggtcctgaatggagtaccaccacttggcaaggatatgacataaatggatacacctttcacacggtaaagcaagacagcaaatgcacagtgcagaacagtgggttacgcatcgaggctgctagtgacggtggtcgtcgtgatcaatactatggtaaagttgagcaaatattggagctagattacttgaagttcaaagtcccgttgtttcgttgtcgatgggtcgatcttcgcaatgtaaaagttgacaatgaaggtttcaccactgtcaacttggctaacaacgcgtacagggatgaaccgttcgttctcgccaaacaagttgttcaagtgttctacatagttgacccgtgtaacaagaaactacatgttgttcgtgaagggaaaaagagaattgttggattggacaacattgcagacgaggatgattacaaccagcacgtccacggcataggtcaagaaatacctctagaagaggaggaagaagaagatgaagttcaatatgcacgtgtcaaccatgaggaaggattatttttgtaatttatgtacgtagtttatgtctacatgtctattatctgtatgactctaatatgttcgcaatgatcaatagtatattgcttatgaaatagtcaaataaaataaataagtgaagcacccactagaagtgaaataaaataattaagcaagtataagcattggaaataaaataattaaagtagtataataatgaagtgcaattactactgttagtgaaataaaataattaagtataaaaaaatatgtagtgtatgtgaaaatatgttaaggaaaataaaagaactaagtgaaataaaataaaataaaatttctctaagcaaactcacctgtgacgggctctatcagtagggccgtcacaggtgacctcacctgtgacggcccagagtgttgggcccgtcacaggtgggcttacctgtgatggctccacggttggcgcccgtcacaggtgaggccacctgtgacggccacatagttggcgcccgtcacaggtgagtttgactagggttgacctagggttggacatcttctagatcgatccagatccggcacccactctcactcactcactctctcgaccgccgcctcgcctctctctctctcgatccagatcatccaccctccttgccgccgcctcgacctttccaccgccctcctcgacgccgcctcgacctctccaccaccct

SEQ ID NO: 29707 - DNA, 6167 bp, Oryza sativa
  unsure (1)..(6167): unsure at all n locations
caggattggctcataggatattttgcattaaaagcagcatttataaatcataagttgaaaatagtaaaacaatagataattaagaagtattaacatcatcactgtccaatgctaaaccacgttgcgataggcccaacccaaaaccacctgaactacaccagttcaagaagtcaaattattaaggtgagattaatcacggtgagctagatgaccgcccaataaccgcgggcacggctattagaattgttttactctgatcagaggtgtacaactttacccacaagacacaattccgcacatgaaaccatgcccccaagtaccgccacgatactgcaaagggataaatcgtgacaaaatcctccatataaccaccactaaccagtacacccacctccggtttcacccctatccccataaggcgatgggcagtccccgctcatgccttggtaaatccggaagcagcgtagaccccccccagcccatccatactccatcacgcctaccctcgccaatggtgtgctagctagaaaatataaaacttaagatttagcctggagcccatctggcttgtggttagtacaagcatatcttccagggattcccttgaaccggtccttaattgtcatgggcacgaccaccaaatgaatcatgcatgtacccacgacccaccaataaagcatatataattaattaaccatatgccaaaatggcacaatatcagcataaaaattaaggactgtattacagtgaatcttattgtgagctagttgatccaagcatggctaagcatccctagaccaatcatctagtcaaattattatcctaggctatcaatgaatcagggtaaacataggctgagtactggtaaattccatcccacatggcataataaaataatgcaaatttaagagaaaagcaggggttttgtaaataggctcaatatgatcaatgatattcatatgacttgccttgctcttgagctgacgggacctcagtgaccacttcaaaataaactggagcgtcggaactgctggagtctaaacgacaaacaaggcacacagtaagtacaagctaaaaagctactgaaacagcaaaagaaaccaattttattgaattcttgatattttagcgaatttactacaatttgaatgtgttaaaacggagctcagattatttaattatcaattttacaagatgctctgtgttattactaataacagaaaaaacttaatcatttgacagagattaatgtccaaaacaaaataagatcaaaggatagattgactggctagcgagcctcacgagataccgactcaacgagttgattctacgtgacaggggatcatcgaaatgatcaaccgaaactgacggctctgaacggctctaaactaaaggacaactcaacacggacgaatgaacgaaccacgggagcaccttgttcgaacgaacgagcgaacgactcaacaacggctgcggctaaaccggcgggctagacaggattcacggtaaagccttggtacggcaaacaataagccggtaggaacctagggttgcacctacggctagacaactcaactactgaggaacgggacaaaacaacggctaggttctagcaaagcgcaatcatgacacaacggcggcaagcggctcggcacgacaaggcggcggctcatcatgacgcggcgctgctcggcacggcagcgacgcggctcggcaaggcgtctaggtggggcaacatggctgtggcggcgcggcatggcggctcggcacggtggtagctcagctagacggagcggcacagcggcggctagggtttaggcggcacgattcaaaccaacaaaaacaaggggaaaaactaaccctaaaacagggggaaaaccttactggagagcaaaaccagcgagggagcacgacgacgatgtcggcggtccgtcggcaagcacgagattgatgatggaggcggtgctagagaggacacaacgggttatgttagacagggatataattgacattgggttcaaacaattcaattaagaggaaaaatggatcaccggtgacgcgaggcgacgacggcggctaggttattgagttgcagaaggacaaaaaaaggggagggatcccttatataggggaggactaaattaggaaatgtgcagtcctagggggagtaggattgagaggaggggagggaatcggagtcggcaaaggggaaggncggcgcgcgcacggaaggaggggnaggcgtacggttgaggggaaagtgggaaggaaaaaggaaacaaggggagactgggactttcccgaaaaggaaaagcaatgcagtgccattttaggaaaagaacggaaccggatattgttcgtcatgcaaaacgaaaccgcagaccgagaggggtgtgaattgggcacaattcacgagcaaaagcaaaggaagaaattattagcttgacacttttacttagcaacactgcctccattgttctaatatttactctttaggtcctgttagtgattttcagagcaaagagaatttgaaaaaaaaatttccctgacaattccgattactaaatgcattgttaattgggtttttctcctgattaaccaaagcaaattcttgaagccatttattagtgatttggaacctaagggaaggtaaaactcagggtgtgacaaacctacccccttaaacagaatatcatcctcgagattcggaagaactggcgaagagatggggatggatggctttcaactcatcttctctctcccaagttgcttcatcttccgaatgatggctccactgaactctacaaaacttgatcactttattcctggtgttcactttccacttgattcaaacttactcctttcttctgagttaatggagactgcatcactaccacttctccttttccattaactaacgtaactgtgcggcttgcacaatcaatgactccgttgtgttttgtcaaccaatccattcccagtatgacatctaggtctttgcactccacaaggataagattggctagaaaaggtgacacttggatttctatcatcgtagagggacaaaaactaactaatgttgagctatttcccggtgtattaactttcatgggagaactaagttccacttttcttaacccgtgtaccccaacaaatctcttggatataaatgaatacgtagcaccagaaaaaaaaaaactatagcaggaattgagttcgcagggaacgtacccaaaaccacttccagcgctgcttgagcttcttccgtagacacgtgattaacacgagcttgaacaatcttgggtccattgcgctttcgtttaggacacttacctgcaaaatgtccgggatctccgcagttgaaacatgtgaggggctttcctcctaactccttcggctgttggggctgcgaagcttgagactgtttcattggcgggcgcggaacgggattacggttgttctgatttccactattgccttggctgaaatttcctggctgatacggcctgtgctgtcgaacaatcatagtagttggaccattgtgttgacaatcatagtagttggaccattgtgctgtcaaggaccgtagcggagcttctattgtccatcttgctgactcctgaactgtatagctttcctcttgcgatccattttgttacgctagtcttcctgacgaatggctttgtccacaattctctgaaaatcagcataatctctagaaatcaactcgttagtcaactcatcatacaaacctgccaagaacttttcccatctctcagcatcggttcgcacatcctcaggggcataacgtgctagacgattaaactcatgcagatactcagtaacagtcatgtttccttgatgtagagacctaaactctcgcttcttctatgcaacaattccatcgggaacctgggctttcctgaaaacacgacaaaactcatccaagtaacttctattccggctgaataggtaatcatttaattatcccaccaagctaaagctagaccttgcaactgatgtgtggcaaacgcaaccttctcctgatcagtgcacttaagtagattaagtttcttctcaatggcgtacaaccaatcgtaagcctccattgggttacttgtgctcgagaaagtcagcggacggacacatcaaaactttggcaacttggactgagggggaccattgtgctgctggttctgctactgttgctgcatcatatgttgcatcatctgatgatactgttgttgcatctgatttatcatggttgtcattatctgagtctgtcttgctattgtctaggcaagcggaggattctctgatatatctcctgaaccatttcctaacagctgttcctcattgacattgtttccagaacgggtagtccttgtgttcaccatctgaagcagaagacgagaagagaaatagggaaggagaaaaacagttactagggaacctcattacttttttatttattgttcaactgtaattgttctgctctggtttaaaacacactaaaaaatccttaagtagaacgtcataccataggcacatggtatcgactgtcaactaaaccccacaagcaaacacacctaaacacaaaaatctaccaagcaatgagtaaacaaaacggtaaactagggtagcaagcctaatgcttggaacagctcctatgatcggcagagacgacatcgtcttcttcatcaccactcgaactgctgctactagagattgacacgatccacttcactgcatcactaactgttgcggctttggcggcggagagcatcggcaactgcgaagacgcgcgaactgggacgggaacgggatcgacggctaggacatcgactggggcgggacgccaactgcatgcgaatgggagctgtagacctcttcctcgacattgtccggattttggctcttcttggtgctggacgaccttggagcattgcgctctcgaccttgagacgatcaacctcatcttgcaaacgagctatttgaataagcttcttgtcgttcaacgtctctgaggctcggtgaagatcctggtgcatcttgtcaagcgctctcatcacagtcctcatgcgaccaaaagtagtatcattctcacttgaagctgaactgaaactactagcaatgcctcctgctgaacagcttggatgataacggtaagcaattccatcgaagatgaaaacaaacttctctcaaatcctggtcatcaccaaatatacggcttcctggcaagcatgctctattgttcctctagaagtctcaaccaccatattaaccagaggggtgcccaaactaccatgaacttccaagcgaactctatgcagcaactctccactgaggggctcaataactgtgtactctgaagcttcaatgtagccggcaaccaatgtcatatttgcgagctcagcacggtgaataggggggaaatcagccatctaaagagaagatagaaggaacaaagctgactccaatcagaaatgagatgctggcattaaaactagaagcaaaaaggaagaaaaagcactaaactgaaatcaaaagactaaagcaatatataaatatattttttaaaatactattttcagccaaatttttttaaataccaaaactctttttttaaaaaaataccaaaacctctcttttttttccgctgaaaaatccccctttttttaaccgaaacattttttttgccgaaatgttttttttaaaaaatagccgaaaacacattttctttgaaaatcaaaaaggcacaaagaaaaaatatatattttttgacgaaactcagaaactcaaaagaaaacagactcatatatttagactcactggaccacttcaaaatgtgggaataagagatttccaggggaagaagagaatttcagagggctctatgtgttttccgtttggtttgtcctacggtcaagatcagctctgatatcaacttgtcgcgcccagatattcgacaacccgaatcatcgctatctattgtgagctggttgaccgcacaataaccacgggcacggcaatttgaatagttttactctgatcagaggtctacaactttacccacaagacacgattccgcacatgaaaccatgccctgaagtaccgccacaatactacaaagggggaaatcatgacaaaatgatgtggactagggt

SEQ ID NO: 29708 - DNA, 3164 bp, Oryza sativa
  unsure (1)..(3164): unsure at all n locations
gttggtatttcttacgatatttactagaaatataattccaagcaatggcgaagaaatactcntgatatattatggtacagggttcatccgcaagtgcacggatataccattgtagcttttcacccgagagtattccaagggtattgtatttgtttaattccatgggaagatcatagtagagagaaccatactaataatttatatgttacttgtaataatcatagtctaaataggggttaagataaatcaaagggtagagtgacacataagcatggagctactcattctcatactaaaatatctaagctaagtggaaagaaaatagaaaagaatctattcctatacttccagtatacatagtatgcatacattctagttatacgattaactagctaataccctctttctgatgccctcctggtacttcaaaacgccacccctgactgtcgattttccttacgacagcctgtcatgaccatataaccggggtaaatacggaggagtaccctccctaggaaattaacataggactatatacacgcgtggaggaatacccgtactgagctgtcaccatcagcggcccacctctcatccgcagcatataaccccaaatagtgatatcccataatctagacaccacgccaaaactaccacatactactctaatatcatcgtcatgacatagagtaattgcataggcaaacgttatacccgttaactatgcagtataatcaatataagatgaacataatgtaaagttggcattcatatactcggaaagtattccaataccagaaatgtataaagaagagtattctatataaagtacaaagcttacaaaagacgaaaggagagctactagagccatacccgaactcttccggactccgatttttattttattcctacttcactagcttaagaacactaaactaaacttgagagaatatgagagagtgtgttgaaatgtagagagtgagctccttaaatagacaggtaatgacggctatgacggttggaaaggtcagtaataccctccaaccgtcattggggatcaatcccagccgtcaatcaaagaccttgcatccagcggctgcatggctggtttggccgaactaggggacggcaaaatccagcccaatttcggctggcggcctcctcttctgttgctcactttagacttgtgaattttggcccaattcatcgtgtcaattctgagttcttggccaattcatacataagtctgattctcgacatcatccgattgatttgtcgtctaatttgatgtcgattctcctccactttatgattattctctgcaaaaggtaagtgatccaaacactagtggaatattattattctaacacaaatatgcattgcaagcataactagttctcctctattttggtaatattgacggtcgaaactgatcgctaacgaccgtcacagccgagaatgctaatccctggttgccaatcgaagaacacaaataagaaacaagatagaatacaaccaaaattgcaaatgaatgattaagctcacaagttggggtcttacaaaccgatctagtggcgaaactgttctcgacagaataatctaagcaaaacccaaaccataaagatgacggccggtactgatatatagagtttgggtcgtgcaacaaacccttggcgcaaccctaatgggctccaacacgatacattgcccaaaggcccaaatacggtgatgcagcatcggaacagattctggatgccaacttgttcgatcgattcctattgactcggaaagaatttggacatgggaccaaatccattggaaaggttatcttcttaccttttccatacatgtaaagaacgccccaatccaagcgcgtatgcgacctggtcgcccgttttagtgcagactggtcctggactccgagttgcactagaggttgacttggtttgggcctccaccttgatgatcctcgatgattctaagtccttctctaagtgtctccttgtcccctccattgttcctaatcacaatataatgattagatagcaatctattctcaaatttgtaccaagaagaacataggtacgagctcatctctaaattcaatcgtcgcgcgcgagctcttgttatcggtccttgaatgaccattgaaggattgttgaaggagtgatgtccgcatcatcttccccctcctgaattggagtcatcctccactcaagctcatgttcttctccccaagtatggcttcaaatctgaaatgttaaacgtgggactaaccctaaactcgggaggcaactcacgtttatatgcattatcattaatcttctcaacaattttgaaaggaccatccacgcgaggcatcaacttagactttctcaattctggaaatctatcctttctcaagtgcaaccaaactaaatcacctggttcaagcttcatttcttgcctacctttactattatcaattctatacttttcagtcatcttttcaatattgtgcttagttgtctcatgcattttcaaaataaatgcaacacgtgccttagcatcattgtgaaccttctcactagtaggtaaaggcaagatatcaataggagcacgagggttgaaaccatatactacctgaaaaggacttaccttggtagtagaatgtcttgcccgattgtatgaaaactccacatgaggcaaacattcttctcacatcttcaaatgtttcttcaaaatagcccttaacagggtacccaaagtatggttgactacctacgtttgtccatctgtttgtaggtgacttattgtagaaaacaatagctttgtacccaacttgttccatagtgtgtgtgtgccaaaaatgacttaagaattttgcatcgcgatctgaaacaataatagaagtcatacaatgcaagcgaacaatctcatgaaaaaacagatcagcaatatgaatagcatcatcacttttatgacatggtatgaaatgtgccatcttagaaaaacgatccaccacaacaaaaatgctatccctacccctcttagtcctaggcaatcccaaaacaaagttcatagaaatatctgcccaaggaatagaatgtataggaagaggtatatacaaaccatgtggattaaatcgagacttagctttttgacaagtggtgcaacgtgccacgaac

SEQ ID NO: 29709 - DNA, 19347 bp, Oryza sativa
aggtgcccggttaagggggggagggggaggggaaaaggaaacaaggggagactaggactttcctgaaaaggaaattcaatgcggtgccattttaggaaaagaacagaaacggtcccacgaactaaaacggatacggttcgtcatgcaaaacgaaaccgcggactgataggggagtgaattgagcacaattcacgaccaaaggcaagggaagacattattagcttgacacttttacttagcaacactgcctccgttgttccgatatttactctttaagtcctgttagaaaagctactaagattcctacctattagaaaagctactaagattcctaataagagcatctccaagagtcctataaacatgttcctaaagttaaatttcgtaaaaccccatctattatatatggtccaagttacacaaaaccataagaatcttaatacatgacatataacttcaaaaattatagttctaaaattttagaaaaccgcaccgttaaccatttttatatactcctatattcatatttaaaaaagctttacatacatgcatataaaatttataatggataaaacactcataaagttaattaagatgtgattgtagaactcaaaagtgtggttgatcaaagtcaaaatgatcaataccatggttttctgaaactttatggccagagtatctaaagttacgtgttacatgacaaaaatcgtgtgattttgtacaacttagatcataataatattcatggttaagtgagatttactctataacataagtcaaagacaaagctctctaacaagtaccaaaaccctctcccaatttttaggcacgaccaacagcgctccaataatcatattcagatgagaaatctcttgggcatattggtgcgaactggagctcagtggtgatgacacaggtatagcagttggcctggttagtaatttgaagaaatagcagggcaaaatcagaatttgtctctgataaaaaaaattgcaggtgcacttccacctagttctaatttcttgttgggttggaagaagaaaatagtgcagaaatacaacatttaattaataatatgaagaaaaaccggaagttctgaatggaacttgtcgaaacttctgacttttgggatcatcaagagctcaatgtgaaattccaatttgaacatcggaagttcctaactagtccaattctaatgcaaggtaaaatcagtgcccatttttcttcgatttgattttatctctagctgccaagcccaactagagaccctcaaacgcaaccattcacatcttatattttgttttaatttcctaggttttgggaaacttaagattttatagttttcctatagattgttccttatctcctaagaaattgatttaatctgccgtgatttgctcataattaaatcacttgttcttcacacaaaacatgacatgccctttcacaaaatgtgattatctcatcagcattagcacatgtaactagctgctgccatcgcaatcaccaatgccaccaccaaagctgtagtcactggaaccgctgccgccgctgtccgtcaactactctccgctgttcgcactccaatcctaggagataaggattagtggccatacaaaagagtgaaggcatgcacggctggaaagttgagcgggagggggataatacatttaccgtcatttacataggctcgtatttctttcctaatatttactagtgtgtcacttatctatattttagcttatataatataagacatgatcaaactcggcacggtctccataattaatttttactccctccattctataatataaggcacaaccacttttcttagatattctataatataaggtatacatgcaagcatgcaattaattatgacatcttctccattaaattattacttttttaaatcatccactctcatgttatctaatcctattggatgcatgcattagtatttattaggatgatccaaactacaagatgataataattatttcttggtctttaaattaagggtgattgtgccttatattttggaatggagggagtagcttataatttctcatattgtataaggtttataccaataaaaatataacctaaattcaaatgtcaattgaatgatattattttcaacaaataaaatttaattcatgttatattgattgttagttaaatgttttaaaaattgaatcttaaattgcacgcacatgttatattatgggttggaggaaatagtatctaaactaatttaatttatgtgcaattggcttgtttcttcgtttctaggttcctctagcgttaaaattaaggacgaaaagacgggggcaatatacactgttcaagggggttaccattcttcgggatggagaattcaatggcagatgcccctggttctgttgttggttacaaaggtgtcaaactatctacttttctaacacaacgttaactctattttcacccaattattatgattccaattcctttcctgataagttctgtatttgattttcataaaagatataattccactatatctgtcttgatatgaaacaataatgaattttcatatggaattctcctgctctagttttcctacgggattgaacattactgtgttttgtcgattggctggagtccattcgatgtatctcgccaggtgtgcatgcaccagagcttcatttcatttatccaatggttaaatgtacacatgctatacgctgataaatactttgtaattatgaacagcagctttgtatagggggctagcacaaaatctgtggtagtggagtcgtgatacatgactccttttgtgcatcagatcgtagtgccaacaagtattggatccaacaattatgcttactacaaacatttaatgcttcacggatttatacatgcaccaacaataagatttcttagagcatctcgagtagtagcccctacaatagagcctctaaaagtcaaatgggggctgcccccaattctttaggacactaaatatgtcatcaactctagcagtagccctcatatcttagctcctatttctttttctcttttattttattatataatttatgtttaaatacagtttaacaccataataattcaaacataaataattctagcacatggaattcaaccgtattcgaatttgcaatttcaaacaccatggttcaaatttgagttcaaaattttctaacatgaaaattgaaagtgcatctaggcccctaatgattttcatgattgattacaatgcgattagagaggactaacattttcattcaagcaaatgtgaaggttgttatgtcctcaatgtgttgcaatacaatccatatcccgtgaatgcgacatcgcgatgtaacgcggcaatgatcaaatggtatattgtatctttttcctcgcattgtgtcgtagaaaagccatactattatgggggatgatgcatagacatgtaaggagtgatgcgtgtgctcaaaatcatttttcctttcaagcatttctcttttggagcgttctggaaattttcggaagttccgaaaatacacagaagcgttctggaaatttttggaagttccgaaaatgtttttcggaagttccgaaaaatgcgttgacttcgattatttctcagatctggaattttcggaagttccgaaaattgtttcggaagttccgaaaattgcatttattgcactccaacgggcagatttgtgctgtgggtataaatacccacctcgcctcacttgtgagggctgctggttccattccaattatttgtgcccttggcttgctctctctctctctagttcatttgagccttgcttcctcgattcatctctccacctgtgtttgattcggatttggtgtgtgtgtgagagtgtggattcgagtttgtgtggatgctccttgtggtctttgtgaagatttgtgagcacttgcatcatctccgggagttctttgcatcatcttttactcttggaggttgaggactcctagacggctaagtgtcactcccgagccaccgatctacttgtggttggccgggagaagtttgtgaaggccggatctcgcctccgcaagggaagagatacctcttagtgaaaggagtgcttagtgcaacctcttgacgaaagggttagctaagacccggctcttagtgagctcctcaacggagagtagaatcccctcaaggatttgaactccgggaacaagtttgcaagcttcaccttggtgatatctctttatccctctcctctaactttgcttgcttgtgccgctattggtctagttgctgtatgtgcctttgtttacatgtggtagacttctagatctagatacttctttttgtgtgcgctgctctgtgcattaacggaagttccgaaaatcctttcggaagtttcaaaaattcccagcctagttccgaaaattactgctttcgctttacttaagtttttaaattagcctattcacccccctctaggcctaattgaccttttcaaaaataatataaggcaaagcctagacaagagtggcgtgttaagagcacagttacgacagccgatgaagctgaagccgataaggccaagaggctgcttaaaggaaaagccgttacatctacatcggtaaatatgatttttatgctacctgcagagtttgaagccaaagaagccgatgttgatgatgttgaagaggcctctgctaggttgattttgtcaccagatcaagcagtttttgagaaaccagaagggacataaaatcggcacataaaaccattgtatcttaatggatatgttaatggcaagccgatgtccaagatgtgagtcgatggtggggctgctgtaaacttgatgccatatactactttcaggaagttgggtaggaaatcagatgatctcatcaagacaaacatgattctcaaagattttggtggcaatccatctgaaaccaagggagttttgaatgtagagttgacaatcggtagcaaaactgttcctaccatgttttttgtcatcgatgggaaggggtcctacagcctgttgcttggaagggattggattcatgcgaattgttgtgttccttcgaccatgcatcagtgcttgattcaatggcaaggtgacaagattgagatcgtgccagccgataggtcagttaatgttaccagtgccaatttagctctttgggatatggatggtattgattgtttgtctggaaagatttgggatggaatttttctaaaagtgtccgattgtgatatacaaccaattgaagatggagagcccgaattattactttgagggcgtcgtggagggttcaaatgtctacaccaaggacacggtagatgatcttgatgacaagcaaggacgggattttatgtcggctgatgatttggaagaagttgatattggtccaggagataggccgaggctgacatttatcagtaagaatttatctgcagagttgaaccaagctgatagagctattaaaagaatatagagattgctttgcttgggaatattatgaaatgccagggctcagccgatcgattgttgaatatcggctttctatcaaaccagggtttaaaccgcatcaacaaccaccaaggaggtgcaaagccgatatgcatgatgctatcaaggctgagattactcgtttgtatgatactggttttattcggctatgccgatatgctgagtgggtttctaatatagttccagttattaagaagaatggcaaacttagggtgtgtattgattttcgagatttaaacaaggctacccctaaggatgagtacccaatgccagttgccgatcaattggttgatgctgcttcaggacataagattataagtttcatggatgacaatcagatttttatggccgaggaagatattcataagactgctttcaggtgtcctggtgcaatcggtttatatgagtgggttattgttgactgtcattatcaaccagtttcgaccgtcaatattaccaaaatagaggagaactagtgatgcttgcaacgcataaatgtgttagaataataatattccactagtattaggtatgctaacctttagtagagaataacactaaagtggaggagaatcgacatcaacatagatgataaatcagtcggacgatgtcgaggatcagacttatgtatgaatgggccaagaactccgaattgacacgatgaattgggccaaaattcacaagtctacataaaggagcaacgaaggaggccgccagccgaaaggtgggctggttgggccgacccatggttcggccgaacctccctcgtcgccgtttgatcctggttttggctggatggttgagatgaagccccaatgacggttggagggtattaccgaccattccaaccgtcacaaccgtcatagttcagctataaaatgagctcctcttctcacttcactcacacacatcaagcaagagctctctcatttttctcaagtttggtttagtagtatatagctggtggaataggaatatagtagaaatcaggagtccggaagccttcggaagagttcgggtatggctctggtagctttcctttcctcttttgtaagctttgtacttttattagaatactcttctatatacatttatggtattgaaatactttccgagtatatgaatgcctactttacattttgttcatgttatactgaatataaggctagcttatctgggagatgctttggtgcgggtataatgtttgcttatgcaattactctatgtcatgacgatgatattaaagtagtatctggtagtttagatgtggtgtctagattacgagatatcattatttggggttatatgctgcggatgagaggtgggccgctgatggtgacagctcagtacgggtattcctccgcgcctgtatatgatcctaagttaatttcatggggagggtattcctccgtatttagccccagttgtatggtcatgacgggctgtcgtaaggaacttggcaatcaggggtggcttctcgaagtatcaggagggcatcggatagagggtattagctagtatatcagataactagaatgtctgtatactatgtatattagaagtataggaataggttatctttctcttttctttccacctagcttagatgatatatcatgagaataagaagttaatgcttgtgtgttactctacccttggattatcttaacccctacttagaatatgattatcacaagtaatatataaattactagtcaagttatctctacatgatcttcccacgggataaaataaatacgatacccttggaatactctcgggtgcaatgctacaatggtatatccgtgcgcttgcggatgaactctgtcaccataatataccagaagtatttctgcgccattgctgggaattatatttctagtaatatcgttaagaaataccaacaagcatttctggcgccgttgctgaggaagattcataatagagattacctgaactaatactttatatttacctttgtataatcattttcctttgtaggctaaccttggttattttcacttttgttgtgaaaacagggtagtgcgtgactggtttcaactggccggaatacttcaacgaaaatccataagctttcttccgtagcgtcaggccgcgagtcgttgttccgtagaaaactctaccgacagagaaaccagccgtaccagcgccaccgaccttcaagactatggctaacaagactcttcgcgagttcgctgctccctctgctgagaatgtggccattgggccgcagatcaacatgggagatgtggatttcgacttggagttcagcctcatcacgatgtcgtaggctagcctgttctgtggcaagcctaatgaggatgccaatgctcatctgcaacagttcctggagatctgtagcacgtacaccataaaagggcgtcagtccagacgccgtcagggtatggctgttcccgttctccctcctcaggagagcgaagtagtggttctatgccaatcgtgctgctgtcaacacctaggacaaatgctctatggcattcctctcgaatttctttacaatgggcaaaaccaatgcccttcgtgggaggatttccagtttccagcagacaagggacgaatctattccggaagcatgggaacgactgcaggagtacatggccgcctgtcctcatcatgggatggatgactggctgatcctgcagaacttttataatggactcaccccgatgtcccacgatcacctggacgcggcagctagaggggccttcttctctaaaacggttcaaggagccgttgatctaatagagaagatggtttccaatatgtattggagcgaggaacgacttcagacccgtcagtgaggcatgcataccgtcaaggagacggaactgcttactgccaagctcgtgttgatgcaaaaaacacacagtggcctgggagatctgcttagctatagtgcaggtccaaaggatagtgagatgcgagtgtgccagtcagtttgatcctgcaactgacaagatatgcaaataatagatcaaacagccgatcggctgacaagctgatggagtagttccagccgatgccgataccagccgatagcgatagggtttaagcaatcagctatatgtccaaagtagataatgatataaaggcaatcggctgatgataatcaatataattaaacaatataatccagtagaaaccagtcggctaataatgatatgatagaataagcattgatctgaaggttaaagcatacatcggctgaaggtccgatgtcataaaatccacaagattaaataatgaaacctttgttgtcatcggctaaatccaacttatatgtatatgcaatccttgtaagccgatgcaacatatagatacctgatcagctgaaaccccgatgaaacccttattgacagtcaaaagcaggctaaggattatggttctaaacatgacttagtagatgaaatttaactgatgcaacactaagtatgaaaagaaacataatatctagacaatcaagtcgttgactgagttttcaggggggaagatgtctaagctaatcaaatctagcaacacgatttagccgataccagcataaaccctaaaacgagaagcagccaatagagctaaattgatatgctaagactagattaacagagacatatgataaataggtaggcaaatatatcatccaaaccagagcaatccaagaggtcgaatgtaatgatgcagccttgaacgacgccgacgtaaacgatacatttgcctgggccgatggtacattggacttaccccttcgccggagattgaacaccgatgcagccccacgtcgggtgccaagtcccgccggacgataaaataaagttgaaaaggtaaaaggtggtgatgcgccgaattgtattgatcgagattgatagattacatagaccccgggtgtacatatttgtacccatgggttgatacaagtccttgtcggacaagaaagaaactttcctaaagataaaaggaaaacataaagtccttatcagacactaaacacactttcctaaagataaaaggaactaacaaactattcctaattaatagataacttgccacgccgcatcctccttgaactcggactcttctggataaattccctttagttgatccgactccatcgaaaacacggttgctggcgatttgacgactcccatcggttgtttcctccaatcggctgattccagtactctaaagccgatattgactctaagccgatgataacttcgggctttaccaaatttcactgttaacagctggacctcctcatgaagcgattggacgaccacgacaaaaagccacaagggactgtcaaggtcttggactcacacgtcacgtgtgaggtctgcggcaacacgggtcattctggaaatgattgcctggatacccgtgaggcgatgtacatgggcaacaacaacgggtactgtccacaacgaggtcaggggtggaaccagccatgcccatatgttgacagaaaacatgaggcctgggaaatctgcttaactccagtgcaggtccaaaactcgccttcggatgtatgagcgtgccagttgatttgatcctgcaatcaacaagaaataaagacaagaaaaccgtagttaaatctataaatgatagctgatcggctaggtgccgatgacatatgatttatattaagccgatgtcatatgtacatcgatcggcaagtgtttaataaacaattcagaactaaatctactcgatcggctgtagatattaatgatatacaatccttatatcgatatatacttaaatcaagtgattgggatagatgggtcaccttaccgagacagtataaatcacttaaattgagatatatattaataatgagattatatatattcatagcatagccgatcagatagatttagcatgtatcggctaatactccgataccactctatattaagatattaaaacaagcagaatatatcaatcataagcctaatatacttaacagcaataagatcttaatatgaagggcagatttaacatatcaatcaagcatataaaataaaagtagttacatcagataagatcggctgaaactccgatgctaccctaatcggcaaccagaaagcaggctagagattgaagttctaaacatgacttaatagatcaaactcaactgatgcagtattaagtatgaaaagaagaacaatatctagacaatcaagccgctggatgtttcatagagtggtagatatgtcacgtaatctaagtcaacgtcgctatataacctaatcggctatcttctattaacagatattagccgattataggttacatgacgatactatcaacgattacgtgagatatatgataactcgacgaattacataaacaagattagagtatcatgaagatggaagcactaatctcgagaacacaaatcgtcataacaagctttacctcttgttgaagatcgacaccgatgcagcccaacccgaaagtaagaactcgtcgaaataaaactaaagcaaaaagggtggcgatgcgccgagattgtattgaacgtgtgttagcttgattatatagggctcggggtctatttatacccgagaattacaagatacgtccataccggacacgactattatctctaacaaactctaagataccataagtctttgcggcagacttttgcccaaacatatctctaaggaaattacatagaatatcctaactagtagatacaattgccttctcaggactctatccttgtgcggcaatcaccatgaagcacattaactcaacccgatgacgtacaccgaatcgtattgtcggaatcggctgtatcgactagccccgtctgactctaactctgtcgatcctgaccgtagccgatttggattgcagccgattcttgctctgtttctgcaacgatcttcgtcttggattccgtttcgatcggcccttcatctccgatactgaagttaccaaatttggtcgttaacaccatattatgaaggaggcaacaacaatggtaacttctctaaccagccctccttgaaggatcttgtttttgcgcaagccaaaactattgatgctttaagcaaaaacctcgctacaaatgacaagatcctagagaacataaatgttaagctagatggcttcgcttctgctttccaaaatcagctgagatttaataaaatgttagaaacccagctagctcagtttgcatccttagtccctgcaaatgaaactggtaagtccactcgtgagaatgttaaggcgatcacgttgagaatgttaaggcgatcacaacgaggggaggtaagtccactcgtgatccgccgtatcctaaccctgcaggaactaacggaattgcaaaagaagtgccatctagtgactcggctgacaaagaggttcagctagaaaagatagtgccgcaggagtactgcgacacatggttgctgtcgtttcatcaacggagtaggaaaccatcagtggacgagcaattcgctcgttttgctgaagtaatccagaagatccacatcaacgtaccgttgttggacgctatgcaagtgccaacatatgctcgttatctcaaggacatgctcaacaacaagagactgctcccaacaatggaggtggttaagctgacagaacaatgtagcagcgtgatactccacaagctcccggagaagaagaaagatccggggtgtcctacgatcacctgctcgatcggggcacaacagttcgaccaggccttttgcgacctcggagccagtatcagcgtcatgccaaaagacgtccccgacaagctcaacttcacggtgctgacaccaacactgatgtgcctccaactggctgatttgtcagtccattacccgacagggatagcggaagatgtgccagtcaagatacgggatttcttcatcccggttgatttcgtggtgctggatatggacatggggaaggagacgccgctcatcttggggcgtccgttccttagcaccgcgggagccaacattgacgtgggaatggggagtatccgtttcgacatcaacgggaaggaaaaaagtttgagtttcatccgaggacgggccgaacccacagaatattcaaatggtcgaagtggagccacccaagatggacagcctggtgagattcatgcagaattttctggagaaggaaacaacgatgcccaggaaccgttattggaggacgccggtaaaaccacccataccggccaagaagctagagcagtcggctccgaggaagccgccgtccgcacgaaagcgaaataaggtgtggagggagaagccaaagacgcccgctccatcacctccggagatgggaggaaaatccgtgagctaaatcagaaggaggtacagtcttgcacgtcggacttaaaatgacgcgacctttgtcaacaggtaaattggtatgtatccgcatatttatgttcaacaatttgaatttttgcatcaacacatgtttgaatttcaaaattgcatttaggatttttgaattttgaggaaattcttcaaatgaatttttttcagagcaaaccaaaataaaattttcaacaaaaatttactgtgccacgatcacactgaccattagaatccaacggccgaaagtggggccggttggcccaccagaggttcggccgaaccggccaggcaacggttacctgccacttttggcaaggtaatggctagtgggtctcacatgttatttctgaccgttgtgggtaccctataagagccaaccggccgagagagggaaatccaccccatttcaacacattttcattccctctccaaagtttgcgctcaagttcattcaagctttgatagtttcccccaaattcaaaacacttagttgcatatatacaagttgctttggtgaaactaaccggtgggtgcaactcttgtcatttctaacccctaccgagttagtccgttcgtgctccattgtccagaatgaggaggcgattgtctcgtttattctaggggtccgattcttcatcaagtcatcatgacgagtctagcactcgttcattagttgatgtctcgatggaagacaccgaagctccgtgacgactcctgaacgacaccaacctcgacattgtcggtgatcgggagagacaaacctactacatgctgagcgaccgggagtatgctcacacacgagactactcaccggagctgctgaaaaagataggtatagatgttgaattttgtgctatttggaaagctgttggttggcagagatttgttgtggtagatgagcctggttcttgtttgcttactatgcaatttctgtgcactttgaaagaaacagaagatggaatttcctttcgctttttccataagaagtatacacttatatggaaaggcttaagcacacttcttggtttttacgattcctgtaaaatcaatctctagaaagaaatttctaggttcgagaaaaataggttatgggaagatatttctggtgctccaatttgcaagaaacctaggacgaatgatatccataatcctacacttaggctcatgcacaaatggattgctatgactttgtttcctagaggtgatcttagacccattaggggggatgaattgattatcatgtttgcatggttagaaagatcaaaattgctcctgtgaaatatatgatacggcaatggtttgaataaggtagagagtgaggggaagctctggaggagtgcccggaagtttggcgctcatccgacttctacctagacgagtgtagcttcgtaggaggaattctagaggagtaccggagctgtcggtacactctgctccaggttcggaggacttcttctataaagtaagcatctgtgttcctttcttatgttatttaatcatttagtctgagtatgatatatttccatctttgcgggttcattgtttagtatatatactaagtgctctagtactaggactcgggataaaaaaggaagttcctgcgcgagtattagagtagtaattaataacttaagcgtggtgtctcggttagagattaccttcgtttgttgtgcatcccacggatttgttagaggtaggcggcatgtggtgacagccttgaatcccgtcccagtaatcctccacgttcgaatacatcatagagctatagccagaactacgcttccagaccagcaggggtcggtgcccgaagcaacaaataggaaattacctttgcttagcgtagataattaaaacacatagaaagtcctctctagcctagcctacatatcattagttgttgcccttggatagtcttagccttaggtaaattacacacgttccctgagttcgatatcctataggggttacccgaaggtgaagtgctactgcggtacgctgtgcgcttgcggatttatctgtggtcgaaagaaataccaacaagcatttctggcgccgttgccggggaacggttgctaatttatccgagtctaggtcatcctcgtatgtttatttttatttcttcttcttttattcctttccttgatggagcaacccacaattcaaaacctttctgctcctcgggctgatctttgtgagccatcctgttcttcaaaaccaaccctttcggatggctacgaaatcggtcctggctttatagccatgattcgagagcaaaccttctcttgtggtattagtgaagacctatacctccatcttcgggactttgagctagtgtgttcatgcctatccatcgtaggcatgacgcatgaaactctaaagtggaagttgtttcctttttcacttagagatgaagtgaagcaatggtacactctgtctgtcaagaaattccatggtgaatgagaggagctaaagtgcaaattttgccttgccttctttccatcaacccgtgtaattaatcttcgattagacatcctttctttctgatagaacgagaaggaatctctcagtgcagcctgggctaggttctcattattaactcagtctggcccagacttgtctttacccgatcatgtattgttacaacattttcaatacgggttagacatggagtctgccgaaaatctcgatatttctgccgaaggatcatttgcccacaagacaaccgccgaaggaagagaactcttatatctgatcttagagatcgaagtgaagccgtctcggaggtcgagattatcgatgaggaacctctgcacgtggagtcggaacccgactcaactgccgaatcctcattccaaatgctggagcctgaggaagaagaaattcatccttcggaaattccattccaattcaggggtgatctttatgatgattatgagaacaccctgaattattccagcaaaaaagaaggctcgtcccaaccatgagccgttcgaggaggtgatattgtttgtatctttgtccgtttcttctgaacctattatccatcttcatgaaactgaacgaccgtcatcaccctcgatcaagcctaagccttgtccctctggccctcataatgttgttcttgtttatcaccaagaaacaacccgattcttgcacgatccatctgttgagaacaagaaccttcaggccacgggcaagcttgagacattgactctggaggatgagagaaaacattccacatatgagcataaaagtttctattgcaaaatccctttggattcatgctcacataaggaatccctagagtcctgttcgattagtacaacttccctgtgtgaggaccaaaaccaccttccagtcctcatttctagcatgtttataaggatggttgtggatgcttacatttatcataaatactgcaaatctcgtatttgtttgtggcactaatcttgcaaagcgatgtctccatggtcgagcttgtgagcataaacaaagcactggcgggagataccccggattatcatggtaagctttcttcccaataaaaggaagaaccagtttttaggataatatgcaccttcgggtattcttggtcgctaaccattgtaggttgagattaagaacgagggtcatgcgatgcctaaggacacggtagctatatcaactgtacactttggtgatccttggtattgaaacacactctataggataatccgacatcacacacttggttttgatgtcttgtgacacaaaagtccaagtgtggggggaaggtcgacgagcttttcatgacgagttccatccactaaggccatcttggtttgaagtaggtgttagtcctagcttgctaaaaaaagaaaaaaaaagaaaaaaaaagaggacaaaagagagatagaagaaaagaaaaaaaataggaggagaagaaaagagcaagagagctgatgggctacatttggatcaatgaccacattaggtgcgtgtctttaaaatatggctatacaactcgctagtagcaatcgtgctgcctggctacacctagtcccgccttcaagctcatgcacaacttctcgctcccgcagcacctacgcgcaattaagtaagaggagttgccctcttcttttctaagcgtttgctgccactccagttggcacctgcatatttgcccaaaaagagagctatcctacgtctctacatcattttgccaatggatcacgccttcaaggcacaaggttcttgcacctgaggtgtgagcgtgaccaagttgcttgccagagttagcatggtcaaagcgtcgtcctccgatacaatctgcgtggagatggaggagaaatagacaatcatatgtgaccatgccactgccccatagatttcaaaatatacatcatgctggcagtaagtacactcaggtatgcgaaggacagaaaaaaattcaccacatcttttactcttacttatctctatttgaatgagacttgagtatacatggttatgtttcttatgtctatttgcatatgctctggtttgggtgttttcgcaagacacccatagactttttaaattaagcatggtgcttaggttaaactagtctactttaatcaaattagacatggtgtttagtttgactaatgaatttcatagttaatatgttcatagacattggatatatatcttccgtggactaacccctgcaggaaaattttcacattgacgggtgagtcctcaagttcaattcacaatggaggtaggtcagggccgggaacaaatcaattggtaacatgcaaaggagaaacatatcacctataaaggtccacggtgcgtatattactaattgctcctttaacatgttcaagcaaatttacctcagccttgtatgagttacacttaaacgaaaacttgctgaatattaaaaatttgaaaaaaaatattttcagaataaaaggactgtctctcgaaaataaaataaaatgttggcaacttctgggatccacgcttcttaagttttgaatccaatttcgttttagcgtggatgtgaacaattaatcttgaggcgatgatgaaatcttttcaaatctttgtagtccctcaagtatttgttgtccactaacctttttcaggaaataaaaagacaatcaaggagcagtgtacaataacttcaaatagttataacacgctccttatccatgagaaaagagatgcacagggaaccaagtagaacaaatgcaaaacttgttgcattcttgcattcggttcaaatcttggtaagaccaatctggtaagaatatcatacaccatgcgaatcctcatctcatgtctccatcttgccaggtgttggtatttcttaacgacattactagaaatataattcccagcaatggtgcagaaatacttatggtatattatggttacagagttcatccgcaagcgcacggatataccgttgtagcatttccgtcgtatttattttatcccgtgggaagatcatgtagagaagacttgactaataatttatatattgcttgtgataatcatattctaagtaggggttaagataatccaagggtagagtgacacacaagctttaactactcattctcataatatattatccaagctaggtggaaagaaaagagaaagataatctattcctatacttctaatatacatagtatacatatatcctagttagctgatatactagctaataccctctttccgatgccctcctggtacttcgagaagccacccctgactgccgagttccttaagacagcccgttatgaccatacaaccggggctagacaccacatcaaaactaccagatactactctaatatcatcgtcatgacatagagtaattgcataaggaaacattatacctgcaccaaagcatctcccagataagctagccgtatattctgtacaacaagaacataatgtaaagtaggtactcatatactcggaaagtatttcaataccataaatatatttagaagagtattctaataaaagtacaaggcttacaaaagagaaaaggaaagctactagagccgtacccgaactcttctgaagacttccggactcctgatttctactttattcctattccaccagctagatactactaaactaagcttgagagaaatgagagagctattgcttgaggtgtgtgtgaagtgaagagagtgagctccttatatagaggtagttatgacagttgtggaaggggaattgtccgaagtgccctccaaccgtcattgggatgcaatcctggacgtccaggtcaaaacctggatccaacggcgccaggattggtccaggttcggccgaacctagggatggcccaatccagcccaatttcggctggtgtcctcctctattgctccactccgtagacttgtgaattttggcccaattcattgtgtcagttc
